United States Patent Application Publication US 2018/0126003 A1 - sequence listing, part 76

SEQ ID NO: 138691 - DNA, 3044 bp, Artificial Sequence
  derived and/or modified sequence
aacttaaccggagcgtgcacacccgcctgcgaggctgacccgagcgcgtcccacccaaggtcgcccagccccgcgggcgtttacttttcaaagggagggataggagaagaaaggtgctgatcgtggtaggcggtgctgtggcgactcggaacggcatgggagccctgggcgtttcgggatcttcctctcctgggggatgtcctgggtggcggcgccttcctgccgccgttaacacaaacccggtggacttcgctccaggtgtaattactcaagcctccaggatggcaatccagttccgttcgctcttccccttggcattgcctgggatgctggcgctcctcggctggtggtggtttttctctcgtaaaaaaggccatgtcagcagccatgatgagcagcaggtggaggctggtgctgtgcagctgagggctgaccctgccatcaaggaacctctccccgtggaagacgtctgtcccaaagtagtgtccacaccccccagtgtcacagagcctccagaaaaggaactgtccaccgtgagcaagctgcctgcagagcccccagcattgctccagacacacccaccttgccgaagatcagagtcctcgggcattcttcctaacaccacagacatgagattgcgaccaggaacacgcagagatgacagtacaaagctggagctagccctgacaggtggtgaagccaaatcgattcctctagagtgccccctttcatccccaaagggtgtactattctccagcaaatcagctgaggtgtgtaagcaagattcccccttcagcagggtgccaaggaaggtccagccaggctaccccgtagtccccgcagagaagcgtagctctggggagagggcaagagagacaggtggggccgaagggactggtgatgccgtgttgggggaaaaggtgcttgaagaagctctgttgtctcgggagcatgtcttggaattggagaacagcaagggccccagcctggcctctttagagggggaagaagataaggggaagagcagctcatcccaggtggtggggccagtgcaggaggaagagtatgtagcagagaagttgccaagtaggttcatcgagtcggctcacacagagctggcaaaggacgatgcggcgccagcacccccagtcgcagacgccaaagcccaggatagaggtgtcgagggagaactgggcaatgaggagagcttggatagaaatgaggagggcttggatagaaatgaggagggcttggatagaaatgaggagagcttggatagaaatgaggagggcttggatagaaatgaggagattaagcgggctgccttccagataatctcccaagtgatctcagaagcaaccgaacaggtgctggccaccacggttggcaaggttgcaggtcgtgtgtgtcaggccagtcagctccaagggcagaaggaagagagctgtgtcccagttcaccagaaaactgtcttgggcccagacactgcggagcctgccacagcagaggcagctgttgccccgccggatgctggcctccccttgccaggcctaccagcagagggctcaccaccaccaaagacctacgtgagctgcctgaagagccttctgtccagccccaccaaggacagtaagccaaatatctctgcacaccacatctccctggcctcctgcctggcactgaccacccccagtgaagagttgccggaccgggcaggcatcctggtggaagatgccacctgtgtcacctgcatgtcagacagcagccaaagtgtccctttggtggcttctccaggacactgctcagattctttcagcacttcagggcttgaagactcttgcacagagaccagctcgagccccagggacaaggccatcaccccgccactgccagaaagtactgtgcccttcagcaatggggtgctgaagggggagttgtcagacttgggggctgaggatggatggaccatggatgcggaagcagatcattcaggaggttctgacaggaacagcatggattccgtggatagctgttgcagtctcaagaagactgagagcttccaaaatgcccaggcaggctccaaccctaagaaggtcgacctcatcatctgggagatcgaggtgccaaagcacttagtcggtcggctaattggcaagcaggggcgctatgtgagttttctgaagcaaacatctggtgccaagatctacatttcaaccctgccttacacccagagcgtccagatctgccacatagaaggctctcaacatcatgtagacaaagcgctgaacttgattgggaagaagttcaaagagctgaacctcaccaatatctacgctcccccattgccttcactggcactgccttctctgccgatgacatcctggctcatgctgcctgatggcatcaccgtggaggtcattgtggtcaaccaggtcaatgccgggcacctgttcgtgcagcagcacacacaccctaccttccacgcgctgcgcagcctcgaccagcagatgtacctctgttactctcagcctggaatccccaccttgcccaccccagtggaaataacggtcatctgtgccgcccctggtgcggacggggcctggtggcgagcccaagtggttgcctcctacgaggagaccaacgaagtggagattcgatacgtggactacggcggatataagagggtgaaagtagacgtgctccggcaaatcaggtctgactttgtcaccctgccgtttcagggagcagaagtccttctggacagtgtgatgcccctgtcagacgatgaccagttttcaccggaagcagatgccgccatgagcgagatgacggggaatacagcactgcttgctcaggtgacaagttacagtccaactggtcttcctctgattcagctgtggagtgtggttggagatgaagtggtgttgataaaccggtccctggtggagcgaggccttgcccagtgggtagacagctactacacaagcctttgacccccatgctgcttcctgagagtctttttttgcactgttgaaattgggctt

SEQ ID NO: 138692 - DNA, 3153 bp, Artificial Sequence
  derived and/or modified sequence
gtgacttacacaggcccctgaggatgaaggtaacagtcctgtgagcactgaggctgggctgggaccaacacctgagccatggctccagcactctgattcctggcccagccatgctgctgagggtgcacagcccaggcctaccatcgcccccacccttggtggcagaaccgagcactacccagcaaggtgtaattacttcaagcctccaggatggcaatccagttccgttcgctcttccccttggcattgcctgggatgctggcgctcctcggctggtggtggtttttctctcgtaaaaaaggccatgtcagcagccatgatgagcagcaggtggaggctggtgctgtgcagctgagggctgaccctgccatcaaggaacctctccccgtggaagacgtctgtcccaaagtagtgtccacaccccccagtgtcacagagcctccagaaaaggaactgtccaccgtgagcaagctgcctgcagagcccccagcattgctccagacacacccaccttgccgaagatcagagtcctcgggcattcttcctaacaccacagacatgagattgcgaccaggaacacgcagagatgacagtacaaagctggagctagccctgacaggtggtgaagccaaatcgattcctctagagtgccccctttcatccccaaagggtgtactattctccagcaaatcagctgaggtgtgtaagcaagattcccccttcagcagggtgccaaggaaggtccagccaggctaccccgtagtccccgcagagaagcgtagctctggggagagggcaagagagacaggtggggccgaagggactggtgatgccgtgttgggggaaaaggtgcttgaagaagctctgttgtctcgggagcatgtcttggaattggagaacagcaagggccccagcctggcctctttagagggggaagaagataaggggaagagcagctcatcccaggtggtggggccagtgcaggaggaagagtatgtagcagagaagttgccaagtaggttcatcgagtcggctcacacagagctggcaaaggacgatgcggcgccagcacccccagtcgcagacgccaaagcccaggatagaggtgtcgagggagaactgggcaatgaggagagcttggatagaaatgaggagggcttggatagaaatgaggagggcttggatagaaatgaggagagcttggatagaaatgaggagggcttggatagaaatgaggagattaagcgggctgccttccagataatctcccaagtgatctcagaagcaaccgaacaggtgctggccaccacggttggcaaggttgcaggtcgtgtgtgtcaggccagtcagctccaagggcagaaggaagagagctgtgtcccagttcaccagaaaactgtcttgggcccagacactgcggagcctgccacagcagaggcagctgttgccccgccggatgctggcctccccttgccaggcctaccagcagagggctcaccaccaccaaagacctacgtgagctgcctgaagagccttctgtccagccccaccaaggacagtaagccaaatatctctgcacaccacatctccctggcctcctgcctggcactgaccacccccagtgaagagttgccggaccgggcaggcatcctggtggaagatgccacctgtgtcacctgcatgtcagacagcagccaaagtgtccctttggtggcttctccaggacactgctcagattctttcagcacttcagggcttgaagactcttgcacagagaccagctcgagccccagggacaaggccatcaccccgccactgccagaaagtactgtgcccttcagcaatggggtgctgaagggggagttgtcagacttgggggctgaggatggatggaccatggatgcggaagcagatcattcaggaggttctgacaggaacagcatggattccgtggatagctgttgcagtctcaagaagactgagagcttccaaaatgcccaggcaggctccaaccctaagaaggtcgacctcatcatctgggagatcgaggtgccaaagcacttagtcggtcggctaattggcaagcaggggcgctatgtgagttttctgaagcaaacatctggtgccaagatctacatttcaaccctgccttacacccagagcgtccagatctgccacatagaaggctctcaacatcatgtagacaaagcgctgaacttgattgggaagaagttcaaagagctgaacctcaccaatatctacgctcccccattgccttcactggcactgccttctctgccgatgacatcctggctcatgctgcctgatggcatcaccgtggaggtcattgtggtcaaccaggtcaatgccgggcacctgttcgtgcagcagcacacacaccctaccttccacgcgctgcgcagcctcgaccagcagatgtacctctgttactctcagcctggaatccccaccttgcccaccccagtggaaataacggtcatctgtgccgcccctggtgcggacggggcctggtggcgagcccaagtggttgcctcctacgaggagaccaacgaagtggagattcgatacgtggactacggcggatataagagggtgaaagtagacgtgctccggcaaatcaggtctgactttgtcaccctgccgtttcagggagcagaagtccttctggacagtgtgatgcccctgtcagacgatgaccagttttcaccggaagcagatgccgccatgagcgagatgacggggaatacagcactgcttgctcaggtgacaagttacagtccaactggtcttcctctgattcagctgtggagtgtggttggagatgaagtggtgttgataaaccggtccctggtggagcgaggccttgcccagtgggtagacagctactacacaagcctttgacccccatgctgcttcctgagagtctttttttgcactgttgaaattgggcttggcactcaagtcaaagatgaacatcggaataacaaacattgtcctctccagaaagtcctttctttctccatactgtagtcctattgagaagacatttcgtctctgagaaaaaaggatggaactatgggttctcttcgcaaagccaaaggatagtgtttaacaagccagctggcttatgct

SEQ ID NO: 138693 - DNA, 2712 bp, Artificial Sequence
  derived and/or modified sequence
atggccatccagttcagaagcctgttccccctggccctgcccggcatgctggccctgctgggctggtggtggttcttcagcagaaagaagggccacgtgagcagccacgacgagcagcaggtggaggccggcgccgtgcagctgagagccgaccccgccatcaaggagcccctgcccgtggaggacgtgtgccccaaggtggtgagcaccccccccagcgtgaccgagccccccgagaaggagctgagcaccgtgagcaagctgcccgccgagccccccgccctgctgcagacccaccccccctgcagaagaagcgagagcagcggcatcctgcccaacaccaccgacatgagactgagacccggcaccagaagagacgacagcaccaagctggagctggccctgaccggcggcgaggccaagagcatccccctggagtgccccctgagcagccccaagggcgtgctgttcagcagcaagagcgccgaggtgtgcaagcaggacagccccttcagcagagtgcccagaaaggtgcagcccggctaccccgtggtgcccgccgagaagagaagcagcggcgagagagccagagagaccggcggcgccgagggcaccggcgacgccgtgctgggcgagaaggtgctggaggaggccctgctgagcagagagcacgtgctggagctggagaacagcaagggccccagcctggccagcctggagggcgaggaggacaagggcaagagcagcagcagccaggtggtgggccccgtgcaggaggaggagtacgtggccgagaagctgcccagcagattcatcgagagcgcccacaccgagctggccaaggacgacgccgcccccgccccccccgtggccgacgccaaggcccaggacagaggcgtggagggcgagctgggcaacgaggagagcctggacagaaacgaggagggcctggacagaaacgaggagggcctggacagaaacgaggagagcctggacagaaacgaggagggcctggacagaaacgaggagatcaagagagccgccttccagatcatcagccaggtgatcagcgaggccaccgagcaggtgctggccaccaccgtgggcaaggtggccggcagagtgtgccaggccagccagctgcagggccagaaggaggagagctgcgtgcccgtgcaccagaagaccgtgctgggccccgacaccgccgagcccgccaccgccgaggccgccgtggccccccccgacgccggcctgcccctgcccggcctgcccgccgagggcagccccccccccaagacctacgtgagctgcctgaagagcctgctgagcagccccaccaaggacagcaagcccaacatcagcgcccaccacatcagcctggccagctgcctggccctgaccacccccagcgaggagctgcccgacagagccggcatcctggtggaggacgccacctgcgtgacctgcatgagcgacagcagccagagcgtgcccctggtggccagccccggccactgcagcgacagcttcagcaccagcggcctggaggacagctgcaccgagaccagcagcagccccagagacaaggccatcaccccccccctgcccgagagcaccgtgcccttcagcaacggcgtgctgaagggcgagctgagcgacctgggcgccgaggacggctggaccatggacgccgaggccgaccacagcggcggcagcgacagaaacagcatggacagcgtggacagctgctgcagcctgaagaagaccgagagcttccagaacgcccaggccggcagcaaccccaagaaggtggacctgatcatctgggagatcgaggtgcccaagcacctggtgggcagactgatcggcaagcagggcagatacgtgagcttcctgaagcagaccagcggcgccaagatctacatcagcaccctgccctacacccagagcgtgcagatctgccacatcgagggcagccagcaccacgtggacaaggccctgaacctgatcggcaagaagttcaaggagctgaacctgaccaacatctacgccccccccctgcccagcctggccctgcccagcctgcccatgaccagctggctgatgctgcccgacggcatcaccgtggaggtgatcgtggtgaaccaggtgaacgccggccacctgttcgtgcagcagcacacccaccccaccttccacgccctgagaagcctggaccagcagatgtacctgtgctacagccagcccggcatccccaccctgcccacccccgtggagatcaccgtgatctgcgccgcccccggcgccgacggcgcctggtggagagcccaggtggtggccagctacgaggagaccaacgaggtggagatcagatacgtggactacggcggctacaagagagtgaaggtggacgtgctgagacagatcagaagcgacttcgtgaccctgcccttccagggcgccgaggtgctgctggacagcgtgatgcccctgagcgacgacgaccagttcagccccgaggccgacgccgccatgagcgagatgaccggcaacaccgccctgctggcccaggtgaccagctacagccccaccggcctgcccctgatccagctgtggagcgtggtgggcgacgaggtggtgctgatcaacagaagcctggtggagagaggcctggcccagtgggtggacagctactacaccagcctgtag

SEQ ID NO: 138694 - DNA, 2838 bp, Artificial Sequence
  derived and/or modified sequence
atgggcgccctgggcgtgagcggcagcagcagccccggcggctgccccggctggagaagactgcccgccgccgtgaacaccaaccccgtggacttcgcccccggcgtgatcacccaggccagcagaatggccatccagttcagaagcctgttccccctggccctgcccggcatgctggccctgctgggctggtggtggttcttcagcagaaagaagggccacgtgagcagccacgacgagcagcaggtggaggccggcgccgtgcagctgagagccgaccccgccatcaaggagcccctgcccgtggaggacgtgtgccccaaggtggtgagcaccccccccagcgtgaccgagccccccgagaaggagctgagcaccgtgagcaagctgcccgccgagccccccgccctgctgcagacccaccccccctgcagaagaagcgagagcagcggcatcctgcccaacaccaccgacatgagactgagacccggcaccagaagagacgacagcaccaagctggagctggccctgaccggcggcgaggccaagagcatccccctggagtgccccctgagcagccccaagggcgtgctgttcagcagcaagagcgccgaggtgtgcaagcaggacagccccttcagcagagtgcccagaaaggtgcagcccggctaccccgtggtgcccgccgagaagagaagcagcggcgagagagccagagagaccggcggcgccgagggcaccggcgacgccgtgctgggcgagaaggtgctggaggaggccctgctgagcagagagcacgtgctggagctggagaacagcaagggccccagcctggccagcctggagggcgaggaggacaagggcaagagcagcagcagccaggtggtgggccccgtgcaggaggaggagtacgtggccgagaagctgcccagcagattcatcgagagcgcccacaccgagctggccaaggacgacgccgcccccgccccccccgtggccgacgccaaggcccaggacagaggcgtggagggcgagctgggcaacgaggagagcctggacagaaacgaggagggcctggacagaaacgaggagggcctggacagaaacgaggagagcctggacagaaacgaggagggcctggacagaaacgaggagatcaagagagccgccttccagatcatcagccaggtgatcagcgaggccaccgagcaggtgctggccaccaccgtgggcaaggtggccggcagagtgtgccaggccagccagctgcagggccagaaggaggagagctgcgtgcccgtgcaccagaagaccgtgctgggccccgacaccgccgagcccgccaccgccgaggccgccgtggccccccccgacgccggcctgcccctgcccggcctgcccgccgagggcagccccccccccaagacctacgtgagctgcctgaagagcctgctgagcagccccaccaaggacagcaagcccaacatcagcgcccaccacatcagcctggccagctgcctggccctgaccacccccagcgaggagctgcccgacagagccggcatcctggtggaggacgccacctgcgtgacctgcatgagcgacagcagccagagcgtgcccctggtggccagccccggccactgcagcgacagcttcagcaccagcggcctggaggacagctgcaccgagaccagcagcagccccagagacaaggccatcaccccccccctgcccgagagcaccgtgcccttcagcaacggcgtgctgaagggcgagctgagcgacctgggcgccgaggacggctggaccatggacgccgaggccgaccacagcggcggcagcgacagaaacagcatggacagcgtggacagctgctgcagcctgaagaagaccgagagcttccagaacgcccaggccggcagcaaccccaagaaggtggacctgatcatctgggagatcgaggtgcccaagcacctggtgggcagactgatcggcaagcagggcagatacgtgagcttcctgaagcagaccagcggcgccaagatctacatcagcaccctgccctacacccagagcgtgcagatctgccacatcgagggcagccagcaccacgtggacaaggccctgaacctgatcggcaagaagttcaaggagctgaacctgaccaacatctacgccccccccctgcccagcctggccctgcccagcctgcccatgaccagctggctgatgctgcccgacggcatcaccgtggaggtgatcgtggtgaaccaggtgaacgccggccacctgttcgtgcagcagcacacccaccccaccttccacgccctgagaagcctggaccagcagatgtacctgtgctacagccagcccggcatccccaccctgcccacccccgtggagatcaccgtgatctgcgccgcccccggcgccgacggcgcctggtggagagcccaggtggtggccagctacgaggagaccaacgaggtggagatcagatacgtggactacggcggctacaagagagtgaaggtggacgtgctgagacagatcagaagcgacttcgtgaccctgcccttccagggcgccgaggtgctgctggacagcgtgatgcccctgagcgacgacgaccagttcagccccgaggccgacgccgccatgagcgagatgaccggcaacaccgccctgctggcccaggtgaccagctacagccccaccggcctgcccctgatccagctgtggagcgtggtgggcgacgaggtggtgctgatcaacagaagcctggtggagagaggcctggcccagtgggtggacagctactacaccagcctgtag

SEQ ID NO: 138695 - protein, 235 aa, Artificial Sequence
  derived and/or modified sequence
MNIRNARPEDLMNMQHCNLLCLPENYQMKYYFYHGLSWPQLSYIAEDENGKIVGYVLAKMEEDPDDVPHGHITSLAVKRSHRRLGLAQKLMDQASRAMIENFNAKYVSLHVRKSNRAALHLYSNTLNFQISEVEPKYYADGEDAYAMKRDLTQMADELRRHLELKEKGRHVVLGAIENKVESKGNSPPSSGEACREEKGLAAEDSGGDSKDLSEVSETTESTDVKDSSEASDSAS

SEQ ID NO: 138696 - DNA, 708 bp, Artificial Sequence
  derived and/or modified sequence
atgaacatcagaaacgccagacccgaggacctgatgaacatgcagcactgcaacctgctgtgcctgcccgagaactaccagatgaagtactacttctaccacggcctgagctggccccagctgagctacatcgccgaggacgagaacggcaagatcgtgggctacgtgctggccaagatggaggaggaccccgacgacgtgccccacggccacatcaccagcctggccgtgaagagaagccacagaagactgggcctggcccagaagctgatggaccaggccagcagagccatgatcgagaacttcaacgccaagtacgtgagcctgcacgtgagaaagagcaacagagccgccctgcacctgtacagcaacaccctgaacttccagatcagcgaggtggagcccaagtactacgccgacggcgaggacgcctacgccatgaagagagacctgacccagatggccgacgagctgagaagacacctggagctgaaggagaagggcagacacgtggtgctgggcgccatcgagaacaaggtggagagcaagggcaacagcccccccagcagcggcgaggcctgcagagaggagaagggcctggccgccgaggacagcggcggcgacagcaaggacctgagcgaggtgagcgagaccaccgagagcaccgacgtgaaggacagcagcgaggccagcgacagcgccagctag

SEQ ID NO: 138697 - DNA, 708 bp, Artificial Sequence
  derived and/or modified sequence
atgaacatacgtaacgcgagacctgaggatctgatgaacatgcagcactgcaacctcctatgtctgccagaaaattaccagatgaaatattacttctatcatggacttagttggccgcaactcagttacatcgccgaggacgagaatgggaaaatagtcggctatgtattggcaaagatggaagaggatccagatgacgtcccccacggccacattacctcgctcgccgtcaagcggagccatagacgtctgggtcttgcacagaagttgatggatcaggcctctcgggcgatgatagagaactttaacgccaagtatgtgagcctgcacgtcagaaagagtaatagagctgccttacacctgtatagtaacacattaaactttcagatctcagaagtcgagcctaagtattatgctgacggggaggatgcttatgcaatgaaaagagacctgacccagatggccgatgaattacgtcgtcacctggaactcaaggaaaagggtcgacacgtggtcctgggggccattgaaaataaggtcgaatctaaaggcaattcaccaccctcatctggtgaagcatgcagagaggagaaagggcttgccgccgaggactccggcggggacagtaaggatctgtccgaggtctccgagacaactgaaagtacggatgtcaaggactcttccgaggcgtccgatagcgcatcctag

SEQ ID NO: 138698 - DNA, 708 bp, Artificial Sequence
  derived and/or modified sequence
atgaacatcagaaatgcccggcctgaggacctgatgaacatgcagcactgcaacctgctgtgcctgcctgagaactaccagatgaagtactacttctaccacggcctgtcctggccccagctgagctacatcgccgaggatgaaaatggcaagatcgtgggctacgtgctggccaagatggaggaggaccctgatgatgtgccccacggccacatcaccagcctggccgtgaagaggagccaccggcggctgggcctggcccagaagctgatggaccaggccagccgggccatgattgagaacttcaatgccaagtatgtgtccctgcacgtgaggaagagcaacagagctgccctgcacctgtacagcaacaccctgaacttccagatcagcgaggtggagcccaagtactatgcagatggagaagatgcctatgccatgaagagggacctgacccagatggctgatgagctgcggcggcacctggagctgaaggagaagggccgccacgtggtgctgggcgccatcgagaacaaggtggagagcaaaggaaacagcccccccagcagcggggaggcctgccgggaggagaagggcctggccgcagaagattctggaggagacagcaaggacctgtctgaggtgtctgagaccacagagagcacagatgtgaaggacagcagcgaggccagtgacagcgccagctag

SEQ ID NO: 138699 - DNA, 708 bp, Artificial Sequence
  derived and/or modified sequence
atgaacatccggaacgcccggcccgaggacctgatgaacatgcagcactgcaatctgctatgtctacccgagaactaccagatgaaatattatttttatcatggcctgtcctggccccagctgtcctacattgccgaagacgagaatggcaagattgtaggctatgtcctagccaagatggaggaagatccagacgatgtcccacatggccacatcactagtctggctgtgaagcgcagccaccgtaggttgggtctcgcccagaagctgatggaccaagccagtcgggcgatgattgaaaactttaacgccaagtatgtgagcctgcatgtccgcaagtccaacagagcagcgctgcacctctatagtaacacgttgaatttccagataagcgaggtggaacctaagtactacgctgatggagaagatgcatacgcaatgaaacgggacttaacccagatggccgatgagcttcggaggcacctcgagttaaaagaaaagggccgccatgtggtgctcggagccatcgagaataaagtggagtccaaggggaattcgccccctagttcgggcgaagcatgccgcgaggaaaagggtttagcagcagaggattctggtggagactctaaggatctgagcgaggtttccgaaactaccgaaagtacagacgtgaaagatagttccgaggcgagtgactccgcaagctag

SEQ ID NO: 138700 - DNA, 1772 bp, Artificial Sequence
  derived and/or modified sequence
cgcgccgagggaggggccggctccagctccggggcagcgcccgccccgcccccaggcccgccccgcgctgaccggctccgcgcattggcccgccccgtgcgctggcctgtcccgcgcattggccaagcggccgggaggacgggcccggcggccgtgcacttccggccggtggccggcccggcgcgcaccgccccttccgccgtcgcccagcgagcccagctccggtcccagccccggccgtcccggcgtcgcttcggagcgcggcggcagctgactgcgccttcacgatccgctgggacccgcgagccccgccgccgttatgaacatccgcaatgcgaggccagaggacctaatgaacatgcagcactgcaacctcctctgcctgcccgagaactaccagatgaaatactacttctaccatggcctttcctggccccagctctcttacattgctgaggacgagaatgggaagattgtggggtatgtcctggccaaaatggaagaggacccagatgatgtgccccatggacatatcacctcattggctgtgaagcgttcccaccggcgcctcggtctggctcagaaactgatggaccaggcctctcgagccatgatagagaacttcaatgccaaatatgtctccctgcatgtcaggaagagtaaccgggccgccctgcacctctattccaacaccctcaactttcagatcagtgaagtggagcccaaatactatgcagatggggaggacgcctatgccatgaagcgggacctcactcagatggccgacgagctgaggcggcacctggagctgaaagagaagggcaggcacgtggtgctgggtgccatcgagaacaaggtggagagcaaaggcaattcacctccgagctcaggagaggcctgtcgcgaggagaagggcctggctgccgaggatagtggtggggacagcaaggacctcagcgaggtcagcgagaccacagagagcacagatgtcaaggacagctcagaggcctccgactcagcctcctagagcctgccccatcccctcctcaccccacgagctttcacaataaattcgctccgtggcactggggaactttgtgtgtgagcgcgcgcacatttagagggtgtgtttctccaggtcctctggtggggatgtgagccttggccttttgacccagagcatcctgccaggcccgagtacaaggaaagagctttggaggtgggactccctagtctcatgaccttcagcagctgtggccccggggaaggaggccctggacttatgggagagaccctgccttggaggtctgcttggccacgctgaatgtgttttgtggcacaagccggggctgctcaggctcaaagctcaacagcagggctcccactcttggtggccttcagttctcttcccaccttcaccttcagactttctctccctaatcacacctgcttcgggctacagcagctccccagcatacccgtgggctccagatgtggacatccaactgctcattgggcttatctacaaatgtcctgtctgagtaatgacccagccagatgccccatcaacagtccttgagtcctccctcccctgccaccctaatggtcagtgagtccatgatacctcttgagtctactccctaacctgagtttgcatttgaaaataatttatttttagtacaattccccgcgtttccccattgacattttgtattagttggtgtatttgttattgttgatgcgccaatactgataagttattgtaaactaca

SEQ ID NO: 138701 - DNA, 708 bp, Artificial Sequence
  derived and/or modified sequence
atgaatattcggaacgcaagacccgaggatctgatgaacatgcagcactgtaaccttctgtgccttccggagaactaccagatgaaatactatttctaccatggcttgtcttggcctcagctatcctacattgccgaagatgagaacggtaaaatcgtggggtatgtgcttgccaaaatggaagaagaccccgacgatgtcccccatggccacattacctcactggcggtaaaacgttcacatcggcgtttaggtctggcacagaaactgatggaccaagcttcacgcgctatgattgaaaacttcaacgccaaatacgtctctctgcatgtgaggaagtctaatagggcggcattgcacttatatagtaacaccctgaatttccagatctctgaggtggaacctaaatactacgcggatggcgaagatgcttatgccatgaagagagatctcacccaaatggccgacgagctacgaaggcacctggagctgaaagagaaagggcgacacgtggtactgggagccatcgagaacaaagttgagtccaaggggaacagtcctccgagttcgggggaggcgtgcagagaagaaaaaggactggcagcagaggacagtgggggagacagtaaggacctgagcgaagtgtctgaaacgaccgaaagcacagacgtgaaggactcttccgaggccagcgactctgccagctag

SEQ ID NO: 138702 - DNA, 708 bp, Artificial Sequence
  derived and/or modified sequence
atgaatatacgaaacgctcgccctgaagatttgatgaacatgcagcactgtaatttgctttgcctacccgagaactaccagatgaagtattatttctatcatgggttgtcctggccccaactaagctatatcgctgaagatgagaatggcaagatcgtcgggtacgtactggctaaaatggaagaggaccccgacgacgtgccccatggtcacattacgtcactcgccgttaagcggagtcataggcggttgggactggctcagaagttgatggaccaggcatccagagctatgatcgagaactttaacgctaaatatgtcagcttgcacgttaggaagtccaatcgagccgcgctccatctatattcgaatacactgaactttcagatctccgaggtcgaacccaagtactacgctgacggtgaagatgcttacgcgatgaagagggatctgacccagatggccgatgagctgcggcgacatcttgagctgaaagagaaggggcggcacgtagttctgggggcaattgagaacaaggtcgagagtaagggcaactcacccccgagttccggcgaagcatgccgtgaggagaaaggtttggcagctgaggactcgggtggagactcaaaggacctgtcagaggttagcgagactactgagtccacagacgtgaaggatagttcagaagcctccgactccgccagctag

SEQ ID NO: 138703 - DNA, 824 bp, Artificial Sequence
  derived and/or modified sequence
cccagctccggtcccagccccggccgtcccggcgtcgcttcggagcgcggcggcagctgactgcgccttcacgatccgctgggacccgcgagccccgccgccgttatgaacatccgcaatgcgaggccagaggacctaatgaacatgcagcactgcaacctcctctgcctgcccgagaactaccagatgaaatactacttctaccatggcctttcctggccccagctctcttacattgctgaggacgagaatgggaagattgtggggtatgtcctggccaaaatggaagaggacccagatgatgtgccccatggacatatcacctcattggctgtgaagcgttcccaccggcgcctcggtctggctcagaaactgatggaccaggcctctcgagccatgatagagaacttcaatgccaaatatgtctccctgcatgtcaggaagagatcagtgaagtggagcccaaatactatgcagatggggaggacgcctatgccatgaagcgggacctcactcagatggccgacgagctgaggcggcacctggagctgaaagagaagggcaggcacgtggtgctgggtgccatcgagaacaaggtggagagcaaaggcaattcacctccgagctcaggagaggcctgtcgcgaggagaagggcctggctgccgaggatagtggtggggacagcaaggacctcagcgaggtcagcgagaccacagagagcacagatgtcaaggacagctcagaggcctccgactcagcctcctagagcctgccccatcccctcctcaccccacgagctttcacaataaattcgctccgtggc

SEQ ID NO: 138704 - DNA, 708 bp, Artificial Sequence
  derived and/or modified sequence
atgaacatccggaacgcccggcccgaggacctgatgaacatgcagcactgcaacctgctgtgcctgcctgagaattaccagatgaaatattacttttaccacggcctcagctggccacagcttagctatatcgccgaggatgaaaacggaaaaattgtcggctacgtattagctaagatggaggaggatcctgacgacgtgccacatggccacataacgagcctggccgtaaagcgcagccatagaaggctcggactggcccaaaaactgatggaccaggccagtcgcgccatgatcgagaatttcaacgccaagtatgtttctcttcacgtgcgcaagtctaaccgcgctgccttgcatctatactctaatacactcaacttccagataagcgaagtggaaccgaagtactacgccgacggagaggacgcatatgcgatgaagagggaccttactcaaatggccgatgagctgagaaggcacctagagctgaaggagaaaggccgtcatgtcgtgcttggagccatcgagaacaaggttgagagcaaaggcaacagtcctccaagctccggagaggcatgtcgggaggaaaaagggttggccgccgaggactccggaggggatagtaaggacctgtctgaggtctccgaaaccaccgagagcacagacgtaaaagattcgtctgaggcctctgactctgccagctag

SEQ ID NO: 138705 - DNA, 708 bp, Artificial Sequence
  derived and/or modified sequence
atgaacatccgcaacgctcgccctgaagacctgatgaatatgcaacattgtaatctgctgtgtctccctgaaaactatcagatgaagtattatttttaccacggcctgagttggccccagcttagttatattgccgaagacgagaacggcaaaatagttggttacgtgctggcgaagatggaggaagaccccgacgacgtgccacatggacacataaccagcctagctgtgaagaggagccaccggcgattggggctggcacagaagctgatggatcaggcctcacgggctatgatagaaaatttcaacgccaagtatgtgtccctacacgtgaggaagagtaaccgagcagctctgcatctttacagtaacacactcaacttccagatctctgaagtagaacctaaatactatgccgacggcgaggatgcgtatgcaatgaagagggatctcacccagatggcagatgagctgagacgacacctggaattgaaggaaaagggtagacacgtcgtcctaggcgcaatagagaacaaggtcgagtcgaaaggaaatagtcctccctctagcggggaggcctgcagagaggagaaaggtttagccgcagaggattcaggcggtgactccaaagacctatcagaggtttcggaaactactgaaagtacagacgtcaaagattcaagcgaggcttcagattccgcaagttag

SEQ ID NO: 138706 - protein, 136 aa, Artificial Sequence
  derived and/or modified sequence
MARTKQTARKSTGGKAPRKQLATKVARKSAPATGGVKKPHRYRPGTVALREIRRYQKSTELLIRKLPFQRLMREIAQDFKTDLRFQSSAVMALQEACESYLVGLFEDTNLCVIHAKRVTIMPKDIQLARRIRGERA

SEQ ID NO: 138707 - DNA, 411 bp, Artificial Sequence
  derived and/or modified sequence
atggcacggacaaaacagaccgctaggaaatccaccggaggcaaagcccccagaaaacagttagcaacaaaggtagcccggaaaagtgcccctgccactggcggggtgaagaagccacaccggtaccggcccggaaccgtagccttgcgggaaatacgccggtaccagaaatccacggaactacttatccgcaagttgccctttcagcgattgatgcgggaaattgcccaagattttaagactgatctacgatttcagtcctctgcggttatggcactccaagaggcttgcgagagttacctggttggcctgtttgaagataccaacctatgtgtgattcatgccaaaagggtcactatcatgcctaaggacatacagctggctagacggattcgcggagagagagcttag

SEQ ID NO: 138708 - DNA, 481 bp, Artificial Sequence
  derived and/or modified sequence
atggcccgaaccaagcagactgcgcgcaagtcaacgggtggcaaggcgccgcgcaagcagctggccaccaaggtggctcgcaagagcgcacctgccactggcggcgtgaagaagccgcaccgctaccggcccggcacggtggcgcttcgcgagatccgccgctaccagaagtccactgagctgctaatccgcaagttgcccttccagcggctgatgcgcgagatcgctcaggactttaagaccgacctgcgcttccagagctcggccgtgatggcgctgcaggaggcgtgcgagtcttacctggtggggctgtttgaggacaccaacctgtgtgtcatccatgccaaacgggtcaccatcatgcctaaggacatccagctggcacgccgtatccgcggggagcgggcctaggagggctatctcgccacctgagaggttgcgcaacgttcaccccaaaggctcttttaagagccacccacct

SEQ ID NO: 138709 - DNA, 411 bp, Artificial Sequence
  derived and/or modified sequence
atggcccggaccaagcagacagccaggaagagcactggaggcaaggcccccaggaagcagctggccaccaaggtggccaggaagagcgccccagccactggaggagtgaagaagccccaccgctaccggcccggcaccgtggccctgcgggagatccgccgctaccagaagagcacagagctgctgatcaggaagctgcccttccagaggctgatgagagaaattgcccaggacttcaagacagacctgcgcttccagagcagcgctgtgatggccctgcaggaggcctgtgagagctacctggtgggcctgtttgaggacaccaacctgtgtgtgatccacgccaagagggtgaccatcatgcccaaggacatccagctggcccggcgcatccggggggagcgggcctag

SEQ ID NO: 138710 - DNA, 411 bp, Artificial Sequence
  derived and/or modified sequence
atggcccggaccaagcagaccgcccggaagagcaccggcggcaaggcaccaaggaaacagctggcgacaaaagtggcacggaagagcgctcccgccaccgggggtgttaagaagccccaccgctaccgaccaggcaccgtggctctcagagaaatcaggcgctatcaaaagagcactgagcttttgatccgcaaacttcctttccaacgacttatgcgcgaaatcgcccaggacttcaagactgatcttcgctttcaaagttccgctgttatggcccttcaggaggcctgcgagagctacttagttggcctgtttgaagatacaaacttatgcgtgatccatgccaagcgtgtgaccatcatgcccaaagatattcagctggcgaggcgcatacgcggcgaaagagcttag

SEQ ID NO: 138711 - DNA, 411 bp, Artificial Sequence
  derived and/or modified sequence
atggccagaactaagcaaaccgcccgaaaatcgaccggcggtaaggcccctcggaaacaactggctaccaaagttgccagaaagagtgcccctgccaccgggggagttaaaaaaccacacagatatagacctggaacagttgctctgcgcgaaatcaggagatatcagaaatctacagaactgttgatccggaagctgccattccagaggctgatgagagagattgcgcaggactttaagaccgatctgagattccaatcctctgctgttatggcactgcaagaagcgtgcgaatcttatctggttggactttttgaggatactaacttgtgtgtgatccacgctaagagggtgaccatcatgcctaaggatatacagctggctagaaggattcgaggagaacgggcttag

SEQ ID NO: 138712 - DNA, 411 bp, Artificial Sequence
  derived and/or modified sequence
atggccagaaccaagcagaccgccagaaagagcaccggcggcaaggcccccagaaagcagctggccaccaaggtggccagaaagagcgcccccgccaccggcggcgtgaagaagccccacagatacagacccggcaccgtggccctgagagagatcagaagataccagaagagcaccgagctgctgatcagaaagctgcccttccagagactgatgagagagatcgcccaggacttcaagaccgacctgagattccagagcagcgccgtgatggccctgcaggaggcctgcgagagctacctggtgggcctgttcgaggacaccaacctgtgcgtgatccacgccaagagagtgaccatcatgcccaaggacatccagctggccagaagaatcagaggcgagagagcctag

SEQ ID NO: 138713 - protein, 2080 aa, Artificial Sequence
  derived and/or modified sequence
MLRVFILYAENVHTPDTDISDAYCSAVFAGVKKRTKVIKNSVNPVWNEGFEWDLKGIPLDQGSELHVVVKDHETMGRNRFLGEAKVPLREVLATPSLSASFNAPLLDTKKQPTGASLVLQVSYTPLPGAVPLFPPPTPLEPSPTLPDLDVVADTGGEEDTEDQGLTGDEAEPFLDQSGGPGAPTTPRKLPSRPPPHYPGIKRKRSAPTSRKLLSDKPQDFQIRVQVIEGRQLPGVNIKPVVKVTAAGQTKRTRIHKGNSPLFNETLFFNLFDSPGELFDEPIFITVVDSRSLRTDALLGEFRMDVGTIYREPRHAYLRKWLLLSDPDDFSAGARGYLKTSLCVLGPGDEAPLERKDPSEDKEDIESNLLRPTGVALRGAHFCLKVFRAEDLPQMDDAVMDNVKQIFGFESNKKNLVDPFVEVSFAGKMLCSKILEKTANPQWNQNITLPAMFPSMCEKMRIRIIDWDRLTHNDIVATTYLSMSKISAPGGEIEEEPAGAVKPSKASDLDDYLGFLPTFGPCYINLYGSPREFTGFPDPYTELNTGKGEGVAYRGRLLLSLETKLVEHSEQKVEDLPADDILRVEKYLRRRKYSLFAAFYSATMLQDVDDAIQFEVSIGNYGNKFDMTCLPLASTTQYSRAVFDGCHYYYLPWGNVKPVVVLSSYWEDISHRIETQNQLLGIADRLEAGLEQVHLALKAQCSTEDVDSLVAQLTDELIAGCSQPLGDIHETPSATHLDQYLYQLRTHHLSQITEAALALKLGHSELPAALEQAEDWLLRLRALAEEPQNSLPDIVIWMLQGDKRVAYQRVPAHQVLFSRRGANYCGKNCGKLQTIFLKYPMEKVPGARMPVQIRVKLWFGLSVDEKEFNQFAEGKLSVFAETYENETKLALVGNWGTTGLTYPKFSDVTGKIKLPKDSFRPSAGWTWAGDWFVCPEKTLLHDMDAGHLSFVEEVFENQTRLPGGQWIYMSDNYTDVNGEKVLPKDDIECPLGWKWEDEEWSTDLNRAVDEQGWEYSITIPPERKPKHWVPAEKMYYTHRRRRWVRLRRRDLSQMEALKRHRQAEAEGEGWEYASLFGWKFHLEYRKTDAFRRRRWRRRMEPLEKTGPAAVFALEGALGGVMDDKSEDSMSVSTLSFGVNRPTISCIFDYGNRYHLRCYMYQARDLAAMDKDSFSDPYAIVSFLHQSQKTVVVKNTLNPTWDQTLIFYEIEIFGEPATVAEQPPSIVVELYDHDTYGADEFMGRCICQPSLERMPRLAWFPLTRGSQPSGELLASFELIQREKPAIHHIPGFEVQETSRILDESEDTDLPYPPPQREANIYMVPQNIKPALQRTAIEILAWGLRNMKSYQLANISSPSLVVECGGQTVQSCVIRNLRKNPNFDICTLFMEVMLPREELYCPPITVKVIDNRQFGRRPVVGQCTIRSLESFLCDPYSAESPSPQGGPDDVSLLSPGEDVLIDIDDKEPLIPIQEEEFIDWWSKFFASIGEREKCGSYLEKDFDTLKVYDTQLENVEAFEGLSDFCNTFKLYRGKTQEETEDPSVIGEFKGLFKIYPLPEDPAIPMPPRQFHQLAAQGPQECLVRIYIVRAFGLQPKDPNGKCDPYIKISIGKKSVSDQDNYIPCTLEPVFGKMFELTCTLPLEKDLKITLYDYDLLSKDEKIGETVVDLENRLLSKFGARCGLPQTYCVSGPNQWRDQLRPSQLLHLFCQQHRVKAPVYRTDRVMFQDKEYSIEEIEAGRIPNPHLGPVEERLALHVLQQQGLVPEHVESRPLYSPLQPDIEQGKLQMWVDLFPKALGRPGPPFNITPRRARRFFLRCIIWNTRDVILDDLSLTGEKMSDIYVKGWMIGFEEHKQKTDVHYRSLGGEGNFNWRFIFPFDYLPAEQVCTIAKKDAFWRLDKTESKIPARVVFQIWDNDKFSFDDFLGSLQLDLNRMPKPAKTAKKCSLDQLDDAFHPEWFVSLFEQKTVKGWWPCVAEEGEKKILAGKLEMTLEIVAESEHEERPAGQGRDEPNMNPKLEDPRRPDTSFLWFTSPYKTMKFILWRRFRWAIILFIILFILLLFLAIFIYAFPNYAAMKLVKPFS

SEQ ID NO: 138714 - DNA, 6914 bp, Artificial Sequence
  derived and/or modified sequence
gcggccgccgcccagccaggtgcaaaatgccgtgtcattgggagactccgcagccggagcattagattacagctcgacggagctcgggaagggcggcgggggtggaagatgagcagaagcccctgttctcggaacgccggctgacaagcggggtgagcgcagccggggcggggacccagcctagcccactggagcagccgggggtggcccgttcccctttaagagcaactgctctaagccaggagccagagattcgagccggcctcgcccagccagccctctccagcgaggggacccacaagcggcgcctcggccctcccgacctttccgagccctctttgcgccctgggcgcacggggccctacacgcgccaagcatgctgagggtcttcatcctctatgccgagaacgtccacacacccgacaccgacatcagcgatgcctactgctccgcggtgtttgcaggggtgaagaagagaaccaaagtcatcaagaacagcgtgaaccctgtatggaatgagggatttgaatgggacctcaagggcatccccctggaccagggctctgagcttcatgtggtggtcaaagaccatgagacgatggggaggaacaggttcctgggggaagccaaggtcccactccgagaggtcctcgccacccctagtctgtccgccagcttcaatgcccccctgctggacaccaagaagcagcccacaggggcctcgctggtcctgcaggtgtcctacacaccgctgcctggagctgtgcccctgttcccgccccctactcctctggagccctccccgactctgcctgacctggatgtagtggcagacacaggaggagaggaagacacagaggaccagggactcactggagatgaggcggagccattcctggatcaaagcggaggcccgggggctcccaccaccccaaggaaactaccttcacgtcctccgccccactaccccgggatcaaaagaaagcgaagtgcgcctacatctagaaagctgctgtcagacaaaccgcaggatttccagatcagggtccaggtgatcgaggggcgccagctgccgggggtgaacatcaagcctgtggtcaaggttaccgctgcagggcagaccaagcggacgcggatccacaagggaaacagcccactcttcaatgagactcttttcttcaacttgtttgactctcctggggagctgtttgatgagcccatctttatcacggtggtagactctcgttctctcaggacagatgctctcctcggggagttccggatggacgtgggcaccatttacagagagccccggcacgcctatctcaggaagtggctgctgctctcagaccctgatgacttctctgctggggccagaggctacctgaaaacaagcctttgtgtgctggggcctggggacgaagcgcctctggagagaaaagacccctctgaagacaaggaggacattgaaagcaacctgctccggcccacaggcgtagccctgcgaggagcccacttctgcctgaaggtcttccgggccgaggacttgccgcagatggacgatgccgtgatggacaacgtgaaacagatctttggcttcgagagtaacaagaagaacttggtggacccctttgtggaggtcagctttgcggggaaaatgctgtgcagcaagatcttggagaagacggccaaccctcagtggaaccagaacatcacactgcctgccatgtttccctccatgtgcgaaaaaatgaggattcgtatcatagactgggaccgcctgactcacaatgacatcgtggctaccacctacctgagtatgtcgaaaatctctgcccctggaggagaaatagaagaggagcctgcaggtgctgtcaagccttcgaaagcctcagacttggatgactacctgggcttcctccccacttttgggccctgctacatcaacctctatggcagtcccagagagttcacaggcttcccagacccctacacagagctcaacacaggcaagggggaaggtgtggcttatcgtggccggcttctgctctccctggagaccaagctggtggagcacagtgaacagaaggtggaggaccttcctgcggatgacatcctccgggtggagaagtaccttaggaggcgcaagtactccctgtttgcggccttctactcagccaccatgctgcaggatgtggatgatgccatccagtttgaggtcagcatcgggaactacgggaacaagttcgacatgacctgcctgccgctggcctccaccactcagtacagccgtgcagtctttgacgggtgccactactactacctaccctggggtaacgtgaaacctgtggtggtgctgtcatcctactgggaggacatcagccatagaatcgagactcagaaccagctgcttgggattgctgaccggctggaagctggcctggagcaggtccacctggccctgaaggcgcagtgctccacggaggacgtggactcgctggtggctcagctgacggatgagctcatcgcaggctgcagccagcctctgggtgacatccatgagacaccctctgccacccacctggaccagtacctgtaccagctgcgcacccatcacctgagccaaatcactgaggctgccctggccctgaagctcggccacagtgagctccctgcagctctggagcaggcggaggactggctcctgcgtctgcgtgccctggcagaggagccccagaacagcctgccggacatcgtcatctggatgctgcagggagacaagcgtgtggcataccagcgggtgcccgcccaccaagtcctcttctcccggcggggtgccaactactgtggcaagaattgtgggaagctacagacaatctttctgaaatatccgatggagaaggtgcctggcgcccggatgccagtgcagatacgggtcaagctgtggtttgggctctcagtggatgagaaggagttcaaccagtttgctgaggggaagctgtctgtctttgctgaaacctatgagaacgagactaagttggcccttgttgggaactggggcacaacgggcctcacctaccccaagttttctgacgtcacgggcaagatcaagctacccaaggacagcttccgcccctcggccggctggacctgggctggagattggttcgtgtgtccggagaagactctgctccatgacatggacgccggtcacctgagcttcgtggaagaggtgtttgagaaccagacccggcttcccggaggccagtggatctacatgagtgacaactacaccgatgtgaacggggagaaggtgcttcccaaggatgacattgagtgcccactgggctggaagtgggaagatgaggaatggtccacagacctcaaccgggctgtcgatgagcaaggctgggagtatagcatcaccatccccccggagcggaagccgaagcactgggtccctgctgagaagatgtactacacacaccgacggcggcgctgggtgcgcctgcgcaggagggatctcagccaaatggaagcactgaaaaggcacaggcaggcggaggcggagggcgagggctgggagtacgcctctctttttggctggaagttccacctcgagtaccgcaagacagatgccttccgccgccgccgctggcgccgtcgcatggagccactggagaagacggggcctgcagctgtgtttgcccttgagggggccctgggcggcgtgatggatgacaagagtgaagattccatgtccgtctccaccttgagcttcggtgtgaacagacccacgatttcctgcatattcgactatgggaaccgctaccatctacgctgctacatgtaccaggcccgggacctggctgcgatggacaaggactctttttctgatccctatgccatcgtctccttcctgcaccagagccagaagacggtggtggtgaagaacacccttaaccccacctgggaccagacgctcatcttctacgagatcgagatctttggcgagccggccacagttgctgagcaaccgcccagcattgtggtggagctgtacgaccatgacacttatggtgcagacgagtttatgggtcgctgcatctgtcaaccgagtctggaacggatgccacggctggcctggttcccactgacgaggggcagccagccgtcgggggagctgctggcctcttttgagctcatccagagagagaagccggccatccaccatattcctggttttgaggtgcaggagacatcaaggatcctggatgagtctgaggacacagacctgccctacccaccaccccagagggaggccaacatctacatggttcctcagaacatcaagccagcgctccagcgtaccgccatcgagatcctggcatggggcctgcggaacatgaagagttaccagctggccaacatctcctcccccagcctcgtggtagagtgtgggggccagacggtgcagtcctgtgtcatcaggaacctccggaagaaccccaactttgacatctgcaccctcttcatggaagtgatgctgcccagggaggagctctactgcccccccatcaccgtcaaggtcatcgataaccgccagtttggccgccggcctgtggtgggccagtgtaccatccgctccctggagagcttcctgtgtgacccctactcggcggagagtccatccccacagggtggcccagacgatgtgagcctactcagtcctggggaagacgtgctcatcgacattgatgacaaggagcccctcatccccatccaggaggaagagttcatcgattggtggagcaaattctttgcctccataggggagagggaaaagtgcggctcctacctggagaaggattttgacaccctgaaggtctatgacacacagctggagaatgtggaggcctttgagggcctgtctgacttttgtaacaccttcaagctgtaccggggcaagacgcaggaggagacagaagatccatctgtgattggtgaatttaagggcctcttcaaaatttatcccctcccagaagacccagccatccccatgcccccaagacagttccaccagctggccgcccagggaccccaggagtgcttggtccgtatctacattgtccgagcatttggcctgcagcccaaggaccccaatggaaagtgtgatccttacatcaagatctccatagggaagaaatcagtgagtgaccaggataactacatcccctgcacgctggagcccgtatttggaaagatgttcgagctgacctgcactctgcctctggagaaggacctaaagatcactctctatgactatgacctcctctccaaggacgaaaagatcggtgagacggtcgtcgacctggagaacaggctgctgtccaagtttggggctcgctgtggactcccacagacctactgtgtctctggaccgaaccagtggcgggaccagctccgcccctcccagctcctccacctcttctgccagcagcatagagtcaaggcacctgtgtaccggacagaccgtgtaatgtttcaggataaagaatattccattgaagagatagaggctggcaggatcccaaacccacacctgggcccagtggaggagcgtctggctctgcatgtgcttcagcagcagggcctggtcccggagcacgtggagtcacggcccctctacagccccctgcagccagacatcgagcaggggaagctgcagatgtgggtcgacctatttccgaaggccctggggcggcctggacctcccttcaacatcaccccacggagagccagaaggtttttcctgcgttgtattatctggaataccagagatgtgatcctggatgacctgagcctcacgggggagaagatgagcgacatttatgtgaaaggttggatgattggctttgaagaacacaagcaaaagacagacgtgcattatcgttccctgggaggtgaaggcaacttcaactggaggttcattttccccttcgactacctgccagctgagcaagtctgtaccattgccaagaaggatgccttctggaggctggacaagactgagagcaaaatcccagcacgagtggtgttccagatctgggacaatgacaagttctcctttgatgattttctgggctccctgcagctcgatctcaaccgcatgcccaagccagccaagacagccaagaagtgctccttggaccagctggatgatgctttccacccagaatggtttgtgtccctttttgagcagaaaacagtgaagggctggtggccctgtgtagcagaagagggtgagaagaaaatactggcgggcaagctggaaatgaccttggagattgtagcagagagtgagcatgaggagcggcctgctggccagggccgggatgagcccaacatgaaccctaagcttgaggacccaaggcgccccgacacctccttcctgtggtttacctccccatacaagaccatgaagttcatcctgtggcggcgtttccggtgggccatcatcctcttcatcatcctcttcatcctgctgctgttcctggccatcttcatctacgccttcccgaactatgctgccatgaagctggtgaagcccttcagctgaggactctcctgccctgtagaaggggccgtggggtcccctccagcatgggactggcctgcctcctccgcccagctcggcgagctcctccagacctcctaggcctgattgtcctgccagggtgggcagacagacagatggaccggcccacactcccagagttgctaacatggagctctgagatcaccccacttccatcatttccttctcccccaacccaacgcttttttggatcagctcagacatatttcagtataaaacagttggaaccacaaaaaaaaaaaaaaaaaaaaaaaaa

SEQ ID NO: 138715 - DNA, 6240 bp, Artificial Sequence
  derived and/or modified sequence
atgctgcgcgtgttcatcctgtacgccgagaacgtgcacacccccgacaccgacatcagcgacgcctactgcagcgccgtgttcgccggcgtgaagaagcgcaccaaggtgatcaagaacagcgtgaaccccgtgtggaacgagggcttcgagtgggacctgaagggcatccccctggaccagggcagcgagctgcacgtggtggtgaaggaccacgagaccatgggccgcaaccgcttcctgggcgaggccaaggtgcccctgcgcgaggtgctggccacccccagcctgagcgccagcttcaacgcccccctgctggacaccaagaagcagcccaccggcgccagcctggtgctgcaggtgagctacacccccctgcccggcgccgtgcccctgttccccccccccacccccctggagcccagccccaccctgcccgacctggacgtggtggccgacaccggcggcgaggaggacaccgaggaccagggcctgaccggcgacgaggccgagcccttcctggaccagagcggcggccccggcgcccccaccaccccccgcaagctgcccagccgcccccccccccactaccccggcatcaagcgcaagcgcagcgcccccaccagccgcaagctgctgagcgacaagccccaggacttccagatccgcgtgcaggtgatcgagggccgccagctgcccggcgtgaacatcaagcccgtggtgaaggtgaccgccgccggccagaccaagcgcacccgcatccacaagggcaacagccccctgttcaacgagaccctgttcttcaacctgttcgacagccccggcgagctgttcgacgagcccatcttcatcaccgtggtggacagccgcagcctgcgcaccgacgccctgctgggcgagttccgcatggacgtgggcaccatctaccgcgagccccgccacgcctacctgcgcaagtggctgctgctgagcgaccccgacgacttcagcgccggcgcccgcggctacctgaagaccagcctgtgcgtgctgggccccggcgacgaggcccccctggagcgcaaggaccccagcgaggacaaggaggacatcgagagcaacctgctgcgccccaccggcgtggccctgcgcggcgcccacttctgcctgaaggtgttccgcgccgaggacctgccccagatggacgacgccgtgatggacaacgtgaagcagatcttcggcttcgagagcaacaagaagaacctggtggaccccttcgtggaggtgagcttcgccggcaagatgctgtgcagcaagatcctggagaagaccgccaacccccagtggaaccagaacatcaccctgcccgccatgttccccagcatgtgcgagaagatgcgcatccgcatcatcgactgggaccgcctgacccacaacgacatcgtggccaccacctacctgagcatgagcaagatcagcgcccccggcggcgagatcgaggaggagcccgccggcgccgtgaagcccagcaaggccagcgacctggacgactacctgggcttcctgcccaccttcggcccctgctacatcaacctgtacggcagcccccgcgagttcaccggcttccccgacccctacaccgagctgaacaccggcaagggcgagggcgtggcctaccgcggccgcctgctgctgagcctggagaccaagctggtggagcacagcgagcagaaggtggaggacctgcccgccgacgacatcctgcgcgtggagaagtacctgcgccgccgcaagtacagcctgttcgccgccttctacagcgccaccatgctgcaggacgtggacgacgccatccagttcgaggtgagcatcggcaactacggcaacaagttcgacatgacctgcctgcccctggccagcaccacccagtacagccgcgccgtgttcgacggctgccactactactacctgccctggggcaacgtgaagcccgtggtggtgctgagcagctactgggaggacatcagccaccgcatcgagacccagaaccagctgctgggcatcgccgaccgcctggaggccggcctggagcaggtgcacctggccctgaaggcccagtgcagcaccgaggacgtggacagcctggtggcccagctgaccgacgagctgatcgccggctgcagccagcccctgggcgacatccacgagacccccagcgccacccacctggaccagtacctgtaccagctgcgcacccaccacctgagccagatcaccgaggccgccctggccctgaagctgggccacagcgagctgcccgccgccctggagcaggccgaggactggctgctgcgcctgcgcgccctggccgaggagccccagaacagcctgcccgacatcgtgatctggatgctgcagggcgacaagcgcgtggcctaccagcgcgtgcccgcccaccaggtgctgttcagccgccgcggcgccaactactgcggcaagaactgcggcaagctgcagaccatcttcctgaagtaccccatggagaaggtgcccggcgcccgcatgcccgtgcagatccgcgtgaagctgtggttcggcctgagcgtggacgagaaggagttcaaccagttcgccgagggcaagctgagcgtgttcgccgagacctacgagaacgagaccaagctggccctggtgggcaactggggcaccaccggcctgacctaccccaagttcagcgacgtgaccggcaagatcaagctgcccaaggacagcttccgccccagcgccggctggacctgggccggcgactggttcgtgtgccccgagaagaccctgctgcacgacatggacgccggccacctgagcttcgtggaggaggtgttcgagaaccagacccgcctgcccggcggccagtggatctacatgagcgacaactacaccgacgtgaacggcgagaaggtgctgcccaaggacgacatcgagtgccccctgggctggaagtgggaggacgaggagtggagcaccgacctgaaccgcgccgtggacgagcagggctgggagtacagcatcaccatcccccccgagcgcaagcccaagcactgggtgcccgccgagaagatgtactacacccaccgccgccgccgctgggtgcgcctgcgccgccgcgacctgagccagatggaggccctgaagcgccaccgccaggccgaggccgagggcgagggctgggagtacgccagcctgttcggctggaagttccacctggagtaccgcaagaccgacgccttccgccgccgccgctggcgccgccgcatggagcccctggagaagaccggccccgccgccgtgttcgccctggagggcgccctgggcggcgtgatggacgacaagagcgaggacagcatgagcgtgagcaccctgagcttcggcgtgaaccgccccaccatcagctgcatcttcgactacggcaaccgctaccacctgcgctgctacatgtaccaggcccgcgacctggccgccatggacaaggacagcttcagcgacccctacgccatcgtgagcttcctgcaccagagccagaagaccgtggtggtgaagaacaccctgaaccccacctgggaccagaccctgatcttctacgagatcgagatcttcggcgagcccgccaccgtggccgagcagccccccagcatcgtggtggagctgtacgaccacgacacctacggcgccgacgagttcatgggccgctgcatctgccagcccagcctggagcgcatgccccgcctggcctggttccccctgacccgcggcagccagcccagcggcgagctgctggccagcttcgagctgatccagcgcgagaagcccgccatccaccacatccccggcttcgaggtgcaggagaccagccgcatcctggacgagagcgaggacaccgacctgccctacccccccccccagcgcgaggccaacatctacatggtgccccagaacatcaagcccgccctgcagcgcaccgccatcgagatcctggcctggggcctgcgcaacatgaagagctaccagctggccaacatcagcagccccagcctggtggtggagtgcggcggccagaccgtgcagagctgcgtgatccgcaacctgcgcaagaaccccaacttcgacatctgcaccctgttcatggaggtgatgctgccccgcgaggagctgtactgcccccccatcaccgtgaaggtgatcgacaaccgccagttcggccgccgccccgtggtgggccagtgcaccatccgcagcctggagagcttcctgtgcgacccctacagcgccgagagccccagcccccagggcggccccgacgacgtgagcctgctgagccccggcgaggacgtgctgatcgacatcgacgacaaggagcccctgatccccatccaggaggaggagttcatcgactggtggagcaagttcttcgccagcatcggcgagcgcgagaagtgcggcagctacctggagaaggacttcgacaccctgaaggtgtacgacacccagctggagaacgtggaggccttcgagggcctgagcgacttctgcaacaccttcaagctgtaccgcggcaagacccaggaggagaccgaggaccccagcgtgatcggcgagttcaagggcctgttcaagatctaccccctgcccgaggaccccgccatccccatgcccccccgccagttccaccagctggccgcccagggcccccaggagtgcctggtgcgcatctacatcgtgcgcgccttcggcctgcagcccaaggaccccaacggcaagtgcgacccctacatcaagatcagcatcggcaagaagagcgtgagcgaccaggacaactacatcccctgcaccctggagcccgtgttcggcaagatgttcgagctgacctgcaccctgcccctggagaaggacctgaagatcaccctgtacgactacgacctgctgagcaaggacgagaagatcggcgagaccgtggtggacctggagaaccgcctgctgagcaagttcggcgcccgctgcggcctgccccagacctactgcgtgagcggccccaaccagtggcgcgaccagctgcgccccagccagctgctgcacctgttctgccagcagcaccgcgtgaaggcccccgtgtaccgcaccgaccgcgtgatgttccaggacaaggagtacagcatcgaggagatcgaggccggccgcatccccaacccccacctgggccccgtggaggagcgcctggccctgcacgtgctgcagcagcagggcctggtgcccgagcacgtggagagccgccccctgtacagccccctgcagcccgacatcgagcagggcaagctgcagatgtgggtggacctgttccccaaggccctgggccgccccggcccccccttcaacatcaccccccgccgcgcccgccgcttcttcctgcgctgcatcatctggaacacccgcgacgtgatcctggacgacctgagcctgaccggcgagaagatgagcgacatctacgtgaagggctggatgatcggcttcgaggagcacaagcagaagaccgacgtgcactaccgcagcctgggcggcgagggcaacttcaactggcgcttcatcttccccttcgactacctgcccgccgagcaggtgtgcaccatcgccaagaaggacgccttctggcgcctggacaagaccgagagcaagatccccgcccgcgtggtgttccagatctgggacaacgacaagttcagcttcgacgacttcctgggcagcctgcagctggacctgaaccgcatgcccaagcccgccaagaccgccaagaagtgcagcctggaccagctggacgacgccttccaccccgagtggttcgtgagcctgttcgagcagaagaccgtgaagggctggtggccctgcgtggccgaggagggcgagaagaagatcctggccggcaagctggagatgaccctggagatcgtggccgagagcgagcacgaggagcgccccgccggccagggccgcgacgagcccaacatgaaccccaagctggaggacccccgccgccccgacaccagcttcctgtggttcaccagcccctacaagaccatgaagttcatcctgtggcgccgcttccgctgggccatcatcctgttcatcatcctgttcatcctgctgctgttcctggccatcttcatctacgccttccccaactacgccgccatgaagctggtgaagcccttcagc

SEQ ID NO: 138716 - DNA, 6243 bp, Artificial Sequence
  derived and/or modified sequence
atgctgagagtgttcatcctgtacgccgagaacgtgcacacccccgacaccgacatcagcgacgcctactgcagcgccgtgttcgccggcgtgaagaagagaaccaaggtgatcaagaacagcgtgaaccccgtgtggaacgagggcttcgagtgggacctgaagggcatccccctggaccagggcagcgagctgcacgtggtggtgaaggaccacgagaccatgggcagaaacagattcctgggcgaggccaaggtgcccctgagagaggtgctggccacccccagcctgagcgccagcttcaacgcccccctgctggacaccaagaagcagcccaccggcgccagcctggtgctgcaggtgagctacacccccctgcccggcgccgtgcccctgttccccccccccacccccctggagcccagccccaccctgcccgacctggacgtggtggccgacaccggcggcgaggaggacaccgaggaccagggcctgaccggcgacgaggccgagcccttcctggaccagagcggcggccccggcgcccccaccacccccagaaagctgcccagcagaccccccccccactaccccggcatcaagagaaagagaagcgcccccaccagcagaaagctgctgagcgacaagccccaggacttccagatcagagtgcaggtgatcgagggcagacagctgcccggcgtgaacatcaagcccgtggtgaaggtgaccgccgccggccagaccaagagaaccagaatccacaagggcaacagccccctgttcaacgagaccctgttcttcaacctgttcgacagccccggcgagctgttcgacgagcccatcttcatcaccgtggtggacagcagaagcctgagaaccgacgccctgctgggcgagttcagaatggacgtgggcaccatctacagagagcccagacacgcctacctgagaaagtggctgctgctgagcgaccccgacgacttcagcgccggcgccagaggctacctgaagaccagcctgtgcgtgctgggccccggcgacgaggcccccctggagagaaaggaccccagcgaggacaaggaggacatcgagagcaacctgctgagacccaccggcgtggccctgagaggcgcccacttctgcctgaaggtgttcagagccgaggacctgccccagatggacgacgccgtgatggacaacgtgaagcagatcttcggcttcgagagcaacaagaagaacctggtggaccccttcgtggaggtgagcttcgccggcaagatgctgtgcagcaagatcctggagaagaccgccaacccccagtggaaccagaacatcaccctgcccgccatgttccccagcatgtgcgagaagatgagaatcagaatcatcgactgggacagactgacccacaacgacatcgtggccaccacctacctgagcatgagcaagatcagcgcccccggcggcgagatcgaggaggagcccgccggcgccgtgaagcccagcaaggccagcgacctggacgactacctgggcttcctgcccaccttcggcccctgctacatcaacctgtacggcagccccagagagttcaccggcttccccgacccctacaccgagctgaacaccggcaagggcgagggcgtggcctacagaggcagactgctgctgagcctggagaccaagctggtggagcacagcgagcagaaggtggaggacctgcccgccgacgacatcctgagagtggagaagtacctgagaagaagaaagtacagcctgttcgccgccttctacagcgccaccatgctgcaggacgtggacgacgccatccagttcgaggtgagcatcggcaactacggcaacaagttcgacatgacctgcctgcccctggccagcaccacccagtacagcagagccgtgttcgacggctgccactactactacctgccctggggcaacgtgaagcccgtggtggtgctgagcagctactgggaggacatcagccacagaatcgagacccagaaccagctgctgggcatcgccgacagactggaggccggcctggagcaggtgcacctggccctgaaggcccagtgcagcaccgaggacgtggacagcctggtggcccagctgaccgacgagctgatcgccggctgcagccagcccctgggcgacatccacgagacccccagcgccacccacctggaccagtacctgtaccagctgagaacccaccacctgagccagatcaccgaggccgccctggccctgaagctgggccacagcgagctgcccgccgccctggagcaggccgaggactggctgctgagactgagagccctggccgaggagccccagaacagcctgcccgacatcgtgatctggatgctgcagggcgacaagagagtggcctaccagagagtgcccgcccaccaggtgctgttcagcagaagaggcgccaactactgcggcaagaactgcggcaagctgcagaccatcttcctgaagtaccccatggagaaggtgcccggcgccagaatgcccgtgcagatcagagtgaagctgtggttcggcctgagcgtggacgagaaggagttcaaccagttcgccgagggcaagctgagcgtgttcgccgagacctacgagaacgagaccaagctggccctggtgggcaactggggcaccaccggcctgacctaccccaagttcagcgacgtgaccggcaagatcaagctgcccaaggacagcttcagacccagcgccggctggacctgggccggcgactggttcgtgtgccccgagaagaccctgctgcacgacatggacgccggccacctgagcttcgtggaggaggtgttcgagaaccagaccagactgcccggcggccagtggatctacatgagcgacaactacaccgacgtgaacggcgagaaggtgctgcccaaggacgacatcgagtgccccctgggctggaagtgggaggacgaggagtggagcaccgacctgaacagagccgtggacgagcagggctgggagtacagcatcaccatcccccccgagagaaagcccaagcactgggtgcccgccgagaagatgtactacacccacagaagaagaagatgggtgagactgagaagaagagacctgagccagatggaggccctgaagagacacagacaggccgaggccgagggcgagggctgggagtacgccagcctgttcggctggaagttccacctggagtacagaaagaccgacgccttcagaagaagaagatggagaagaagaatggagcccctggagaagaccggccccgccgccgtgttcgccctggagggcgccctgggcggcgtgatggacgacaagagcgaggacagcatgagcgtgagcaccctgagcttcggcgtgaacagacccaccatcagctgcatcttcgactacggcaacagataccacctgagatgctacatgtaccaggccagagacctggccgccatggacaaggacagcttcagcgacccctacgccatcgtgagcttcctgcaccagagccagaagaccgtggtggtgaagaacaccctgaaccccacctgggaccagaccctgatcttctacgagatcgagatcttcggcgagcccgccaccgtggccgagcagccccccagcatcgtggtggagctgtacgaccacgacacctacggcgccgacgagttcatgggcagatgcatctgccagcccagcctggagagaatgcccagactggcctggttccccctgaccagaggcagccagcccagcggcgagctgctggccagcttcgagctgatccagagagagaagcccgccatccaccacatccccggcttcgaggtgcaggagaccagcagaatcctggacgagagcgaggacaccgacctgccctacccccccccccagagagaggccaacatctacatggtgccccagaacatcaagcccgccctgcagagaaccgccatcgagatcctggcctggggcctgagaaacatgaagagctaccagctggccaacatcagcagccccagcctggtggtggagtgcggcggccagaccgtgcagagctgcgtgatcagaaacctgagaaagaaccccaacttcgacatctgcaccctgttcatggaggtgatgctgcccagagaggagctgtactgcccccccatcaccgtgaaggtgatcgacaacagacagttcggcagaagacccgtggtgggccagtgcaccatcagaagcctggagagcttcctgtgcgacccctacagcgccgagagccccagcccccagggcggccccgacgacgtgagcctgctgagccccggcgaggacgtgctgatcgacatcgacgacaaggagcccctgatccccatccaggaggaggagttcatcgactggtggagcaagttcttcgccagcatcggcgagagagagaagtgcggcagctacctggagaaggacttcgacaccctgaaggtgtacgacacccagctggagaacgtggaggccttcgagggcctgagcgacttctgcaacaccttcaagctgtacagaggcaagacccaggaggagaccgaggaccccagcgtgatcggcgagttcaagggcctgttcaagatctaccccctgcccgaggaccccgccatccccatgccccccagacagttccaccagctggccgcccagggcccccaggagtgcctggtgagaatctacatcgtgagagccttcggcctgcagcccaaggaccccaacggcaagtgcgacccctacatcaagatcagcatcggcaagaagagcgtgagcgaccaggacaactacatcccctgcaccctggagcccgtgttcggcaagatgttcgagctgacctgcaccctgcccctggagaaggacctgaagatcaccctgtacgactacgacctgctgagcaaggacgagaagatcggcgagaccgtggtggacctggagaacagactgctgagcaagttcggcgccagatgcggcctgccccagacctactgcgtgagcggccccaaccagtggagagaccagctgagacccagccagctgctgcacctgttctgccagcagcacagagtgaaggcccccgtgtacagaaccgacagagtgatgttccaggacaaggagtacagcatcgaggagatcgaggccggcagaatccccaacccccacctgggccccgtggaggagagactggccctgcacgtgctgcagcagcagggcctggtgcccgagcacgtggagagcagacccctgtacagccccctgcagcccgacatcgagcagggcaagctgcagatgtgggtggacctgttccccaaggccctgggcagacccggcccccccttcaacatcacccccagaagagccagaagattcttcctgagatgcatcatctggaacaccagagacgtgatcctggacgacctgagcctgaccggcgagaagatgagcgacatctacgtgaagggctggatgatcggcttcgaggagcacaagcagaagaccgacgtgcactacagaagcctgggcggcgagggcaacttcaactggagattcatcttccccttcgactacctgcccgccgagcaggtgtgcaccatcgccaagaaggacgccttctggagactggacaagaccgagagcaagatccccgccagagtggtgttccagatctgggacaacgacaagttcagcttcgacgacttcctgggcagcctgcagctggacctgaacagaatgcccaagcccgccaagaccgccaagaagtgcagcctggaccagctggacgacgccttccaccccgagtggttcgtgagcctgttcgagcagaagaccgtgaagggctggtggccctgcgtggccgaggagggcgagaagaagatcctggccggcaagctggagatgaccctggagatcgtggccgagagcgagcacgaggagagacccgccggccagggcagagacgagcccaacatgaaccccaagctggaggaccccagaagacccgacaccagcttcctgtggttcaccagcccctacaagaccatgaagttcatcctgtggagaagattcagatgggccatcatcctgttcatcatcctgttcatcctgctgctgttcctggccatcttcatctacgccttccccaactacgccgccatgaagctggtgaagcccttcagctag

SEQ ID NO: 138717 - DNA, 6243 bp, Artificial Sequence
  derived and/or modified sequence
atgctcagagtctttatcttgtacgctgaaaacgtgcatacacccgatactgatattagtgacgcttattgctccgccgtgtttgccggcgtcaagaaacgaacgaaagttataaaaaacagcgttaatcctgtgtggaacgaaggattcgagtgggacttgaagggaattcccctggatcagggttctgaactccacgtggtggtgaaagaccatgagactatgggacggaaccgctttttgggggaggcaaaggtcccactcagagaagtcctagctaccccctctttatctgcaagctttaacgccccactgctagatacgaagaaacagcccacaggggcttctctcgtgctacaggtttcgtataccccactgccaggcgccgtccctctgttcccccctccaactcctctggaaccttcacctacactccccgacctggatgtggtagccgacaccggcggcgaggaagacacagaagaccaggggctgaccggcgacgaggccgagccatttcttgaccaaagcggaggccctggtgctccgacaactcccagaaagcttccctccagacctccacctcactaccccggtatcaagaggaagcggtccgcaccaacatctcgaaagctgttgagcgacaaaccacaggattttcaaattagagtgcaggtcattgagggccggcagctgcccggggtcaacatcaagcctgtcgtgaaagtgaccgctgctgggcagactaaacgaaccaggatccacaaaggaaatagccccctttttaacgagaccctcttttttaatctttttgactcgcctggcgagctgttcgacgaacccatatttattacggttgtggatagcaggtccttgcgtacagatgcattgttaggtgaattccgaatggacgtcggaacaatatatcgcgaaccgcgtcacgcctatcttagaaagtggttgctgttgtcagatcccgatgatttctccgcaggcgctcgtggatacctcaagacatcactgtgtgtcctcggaccaggggatgaagctcccttggaaaggaaagatccttctgaggacaaggaggacatcgagtccaacttgctgaggccaacaggtgttgcacttagaggcgctcatttctgcttgaaggtcttccgggctgaggatctgccacaaatggacgatgctgtcatggacaatgtaaaacagattttcggcttcgagagtaacaaaaagaatctggtggatccatttgtcgaggtgtcctttgctggcaagatgctgtgctctaagattctggagaaaaccgctaatccacagtggaatcagaacatcaccctaccggccatgttcccatccatgtgcgaaaagatgcgaatcaggatcattgattgggatcggttaacgcataacgacatcgttgcaactacatatttgagtatgtccaagataagtgcccccggcggagaaattgaggaagagccagcgggggccgtcaaaccttctaaggcttccgacctggacgactacttaggttttctgcctactttcggcccatgctatattaacctttatggcagcccgcgcgaatttaccggcttccccgatccatacactgagctgaacaccggcaagggcgagggcgttgcttataggggcagattactcttgagtctagaaactaagctggtggagcattcagagcagaaggttgaggacctaccagcagatgatattctcagagtggagaagtacctcagacggcgtaaatatagcctattcgccgccttttactcagcaaccatgctgcaagacgtggatgacgctatccagttcgaagtttcgattggtaactacggaaataagtttgacatgacctgcttgccattggcctctacaactcagtatagtcgggcggttttcgatggctgccactactactacttaccttggggaaatgtgaaaccagtggtagtcctatctagctattgggaggacatcagtcatagaatagagactcagaaccaactgctgggtattgcggatagactcgaggcaggcctggagcaggttcacctagctcttaaggcacaatgtagtactgaagatgtggacagtcttgtggcccagctgaccgacgaattaatcgccggatgctctcagcccctaggcgacattcatgagacgccgagcgccacccatctagaccagtatttgtaccaacttaggacgcatcacttgtcccagatcaccgaggctgccctggcattgaagttagggcactcagagctgccagctgccctggagcaggctgaggattggcttctccgccttagggctctggccgaggagccccagaacagcctccccgacatagtgatctggatgcttcagggtgacaagagggtagcttatcagcgggtgcccgctcaccaagtgctgttttcacgccgaggggccaattattgtgggaagaattgtggcaagctgcagactatcttcctgaaatatccgatggagaaagtgcctggcgctagaatgcctgtgcagatcagggtgaagctctggtttggtctaagcgtcgatgaaaaggagttcaatcagttcgccgaagggaagctgtcagtgttcgccgagacctacgagaacgaaacaaagctcgccctcgtcggcaactggggaaccacaggtctgacataccccaagttctctgacgtcaccgggaagattaaactgccaaaggatagtttcaggccttccgccggctggacctgggccggtgattggttcgtgtgcccagaaaagacccttctccacgatatggatgcgggacatttgtctttcgtcgaagaggtgttcgagaaccagaccaggttgcctggtggtcagtggatctacatgagtgacaattataccgatgtcaacggcgaaaaggttcttccgaaggacgatatagagtgtccactcggatggaagtgggaggacgaggagtggtcgaccgatctgaatagggctgttgatgagcagggttgggagtacagtatcaccatccctcccgagcgaaaacccaagcactgggtcccagcggaaaaaatgtattacactcatagacggcggagatgggtcagactccggcgaagagatctgagccagatggaggccttgaaaagacacaggcaggccgaagcagaaggcgaaggctgggagtacgcctcgctcttcggatggaaatttcacctggagtaccgtaagactgacgccttccgacgtcgccgatggagacggaggatggagcctctggaaaagactggccctgccgccgtcttcgctctcgagggcgcactgggaggagtaatggatgacaagagcgaggattcaatgtctgtcagtaccctcagttttggagtgaaccgaccaactatctcttgcattttcgattatggaaaccgctatcaccttagatgctacatgtaccaggccagggatctggccgccatggataaagacagcttcagcgacccttacgctatcgtgtcattcctccatcagtctcagaaaactgtggttgtgaagaacacactgaatccgacatgggaccaaactctgatcttctacgagattgaaatcttcggcgagccagcaaccgtggcagagcagccaccctcgattgtggttgagctctacgaccatgacacatacggagcggatgagttcatgggcaggtgcatttgccaaccttccttggagcgaatgccgcgattggcttggtttcctctgacaagagggagtcagccctcaggtgaactcctggcttcattcgagttaattcaacgggagaagccagccattcatcatattcccggattcgaggttcaagaaacctcaaggatcttggacgaatctgaggacacggatctaccttatccaccacctcaaagggaagccaatatttatatggtgcctcagaatattaagccggccctgcagaggactgcgatcgaaattctcgcgtggggcctgcgcaacatgaagtcataccagctcgcaaatattagtagccctagcttggtggtcgagtgcggcggacagaccgtccaatcttgtgtaatccgcaacctacgaaaaaaccctaactttgatatttgtacgctatttatggaagttatgcttcccagagaagaactttactgcccccctatcactgtgaaagtcatagacaatcgtcagttcggacgtagacccgtggtaggccagtgcaccatccggtcactcgagagcttcctatgtgacccctatagcgccgaatccccatccccccagggggggcccgacgatgtgagtctgctcagcccaggtgaggacgtgctcatcgatattgacgataaagagccccttattcccatccaggaggaggagttcatcgattggtggtcgaaatttttcgcttctatcggcgagcgcgaaaagtgcggaagttacctcgagaaggatttcgacacactgaaagtgtatgatacacagttagagaatgtagaagcatttgaaggcttaagcgacttttgcaataccttcaagctgtaccgcggcaaaacacaggaggaaacggaagacccatccgtgatcggcgaattcaaaggcttgttcaagatctaccctttgcccgaagatcctgccataccaatgcctcctagacagttccaccaactcgccgctcagggcccccaggaatgtctagtgaggatatatatcgtccgggcatttgggctgcagcctaaagacccaaacgggaagtgcgacccatatatcaagatctctatcggaaagaaaagtgtctcagaccaggacaactacataccctgcactcttgaacccgtattcgggaagatgttcgaacttacctgcaccttgcccctggaaaaggacctgaaaataactctgtacgactacgacctgctctccaaagatgaaaaaattggcgagaccgtagttgaccttgaaaaccggctgttgagcaaattcggagctagatgcggcctgccccaaacctactgtgtgtccggtccgaaccagtggcgcgaccagctaaggccgagtcaactgttgcatctcttctgccagcagcaccgtgtgaaagcacctgtgtaccgaactgaccgcgtcatgttccaggataaggaatacagcatcgaggaaatcgaggcaggccggatccccaacccacaccttggcccagtggaagaacggctcgctttgcacgtgttgcagcagcaggggttggtaccagagcacgttgagtcccgcccactatacagtcccctgcaaccggatattgagcagggcaagttgcagatgtgggtggatttgttccccaaggcactgggccggcccggccctcccttcaacattacgccgcggagggcgagacggttctttctccggtgcataatttggaacacgagggacgtgatcctggatgatttgtcactcaccggtgaaaagatgtccgacatttatgtaaagggatggatgatcgggttcgaggagcataaacaaaagactgatgtgcattatagatccctgggcggagagggcaacttcaactggcgctttatttttccattcgactatctgccagccgaacaggtttgcactatcgctaagaaggacgcattttggcgtttggacaagacggagagtaaaatccccgcaagagtggtgtttcaaatctgggacaatgacaaattcagctttgatgattttctagggtcactccagctcgacctaaaccggatgcctaaacctgctaaaaccgccaaaaagtgctctctggaccagctggatgacgctttccatcctgagtggttcgtcagcctgttcgagcagaaaactgtgaaagggtggtggccctgtgtggctgaagagggcgagaagaaaatacttgctggaaagctggaaatgactctcgaaatcgtagccgagagtgagcacgaggaacgccctgccggccaagggagggacgaacctaacatgaatcccaaactggaggacccacgacgaccggacacgtcatttctctggtttacatctccttataagaccatgaagttcatcctatggcgacgctttaggtgggcgatcatcctcttcataattctattcatactgctgcttttcctggcgatctttatttatgcatttcccaactatgctgcaatgaaactggtcaaaccctttagctag

SEQ ID NO: 138718 - DNA, 6243 bp, Artificial Sequence
  derived and/or modified sequence
atgctgcgggtcttcatcctgtatgcagaaaatgtgcacaccccagacacagacatcagtgatgcctactgcagcgctgtgtttgctggggtgaagaagaggaccaaggtgatcaagaacagcgtgaaccctgtgtggaatgaaggatttgagtgggacctgaagggcatccccctggaccagggcagcgagctgcacgtggtggtgaaggaccacgagaccatgggcaggaaccgcttcctgggggaggccaaggtgcccctgcgggaggtgctggccacccccagcctgagcgccagcttcaatgcccccctgctggacaccaagaagcagcccactggagccagcctggtgctgcaggtgtcctacacccccctgcctggagctgtgcccctcttccccccacccacccccctggagcccagccccaccctgcctgacctggatgtggtggccgacaccggcggggaggaggacacagaggaccagggcctgactggagatgaggccgagcccttcctggaccagagcggcggccctggggcccccaccacccccaggaagctgcccagccggcccccaccccactacccaggcatcaagaggaagaggtctgcccccaccagcaggaagctgctgagtgacaagccccaggacttccagatccgggtgcaggtgattgagggccggcagctgcccggggtgaacatcaagcctgtggtgaaggtgacagctgctggccagaccaagaggacccgcatccacaagggcaacagccccctcttcaatgagaccctcttcttcaacctgtttgacagccctggagagctgtttgatgagcccatcttcatcaccgtggtggacagccgcagcctgaggacagatgccctgctgggggagttcaggatggatgtgggcaccatctaccgggagcccaggcatgcctacctgaggaagtggctgctgctgagtgaccctgatgacttctctgctggggcccggggctacctgaagaccagcctgtgtgtgctgggccctggagatgaggcccccctggagaggaaggaccccagcgaggacaaggaggacatcgagagcaacctgctgcggcccaccggggtggccctgcggggggcccacttctgcctgaaggtgttccgggcagaggacctgccccagatggatgatgctgtgatggacaacgtgaagcagatcttcggctttgagagcaacaagaagaacctggtggacccctttgtggaggtgtcctttgctgggaagatgctgtgcagcaagatcctggagaagacagccaacccccagtggaaccagaacatcaccctgcctgccatgttccccagcatgtgtgagaagatgaggatccgcatcatcgactgggaccggctgacccacaatgacatcgtggccaccacctacctgtccatgagcaagatcagcgcccctggaggagaaattgaggaggagcctgctggagctgtgaagcccagcaaggccagtgacctggatgactacctgggcttcctgcccaccttcggcccctgctacatcaacctgtatggcagcccccgggagttcaccggcttcccagacccctacacagagctgaacacaggcaagggggagggcgtggcctaccggggccgcctgctgctgagcctggagaccaagctggtggagcacagcgagcagaaggtggaggacctgcctgcagatgacatcctgcgggtggagaagtacctgcggcggaggaagtacagcctgtttgctgccttctacagcgccaccatgctgcaggatgtggatgatgccatccagtttgaggtgtccatcggcaactacggcaacaagtttgacatgacctgcctgcccctggccagcaccacccagtacagcagagctgtgtttgatggctgccactactactacctgccctggggcaatgtgaagcctgtggtggtgctgagcagctactgggaggacatcagccaccgcatcgagacccagaaccagctgctgggcattgctgaccggctggaggccggcctggagcaggtgcacctggccctgaaggcccagtgcagcacagaagatgtggacagcctggtggcccagctgacagatgagctgattgctggctgcagccagcccctgggggacatccacgagacccccagcgccacccacctggaccagtacctgtaccagctgcggacccaccacctgagccagatcacagaggccgccctggccctgaagctgggccacagcgagctgcctgctgccctggagcaggccgaggactggctgctgcggctgcgggccctggccgaggagccccagaacagcctgcctgacatcgtcatctggatgctgcagggcgacaagagggtggcctaccagagggtgcctgcccaccaggtgctcttcagccggcggggggccaactactgtgggaagaactgtgggaagctgcagaccatcttcctgaagtaccccatggagaaggtgcctggggccaggatgcctgtgcagatccgggtgaagctgtggtttggcctgtctgtggatgagaaggagttcaaccagtttgctgagggcaagctgtctgtgtttgctgagacctatgaaaatgagaccaagctggccctggtgggcaactggggcaccaccggcctgacctaccccaagttcagtgatgtgacaggcaagatcaagctgcccaaggacagcttccggcccagcgctggctggacctgggccggggactggtttgtgtgcccagagaagaccctgctgcatgacatggatgctggccacctgagctttgtggaggaggtgtttgagaaccagacccggctgcccggcggccagtggatctacatgtctgacaactacacagatgtgaatggagagaaggtgctgcccaaggatgacattgaatgtcccctgggctggaagtgggaggatgaggagtggagcacagacctgaacagagctgtggatgagcagggctgggagtacagcatcaccatccccccagagaggaagcccaagcactgggtgcctgctgagaagatgtactacacccacagaagaagacgctgggtgcggctgcggcggcgggacctgagccagatggaggccctgaagaggcaccggcaggccgaggccgagggggagggctgggagtatgccagcctgtttggctggaagttccacctggagtacaggaagacagatgccttcagaagaagacgctggaggaggaggatggagcccctggagaagacaggccctgctgctgtgtttgccctggagggcgccctgggcggcgtgatggatgacaagtcagaagattccatgtctgtgtccaccctgagctttggagtgaaccggcccaccatcagctgcatctttgattatggcaaccgctaccacctgcgctgctacatgtaccaggcccgggacctggccgccatggacaaggacagcttcagtgacccctatgccatcgtgtccttcctgcaccagagccagaagacagtggtggtgaagaacaccctgaaccccacctgggaccagaccctcatcttctatgaaattgagatctttggagagcccgccaccgtggccgagcagcccccatccatcgtggtggagctgtatgaccatgacacctacggggctgatgagttcatgggccgctgcatctgccagcccagcctggagaggatgccccggctggcctggttccccctgacccggggcagccagcccagcggggagctgctggccagctttgagctgatccagcgggagaagccagccatccaccacatccctggctttgaggtgcaggagaccagccgcatcctggatgaaagtgaggacacagacctgccctaccccccaccccagcgggaggccaacatctacatggtgccccagaacatcaagccagccctgcagaggacagccatcgagatcctggcctggggcctgaggaacatgaagagctaccagctggccaacatcagcagccccagcctggtggtggagtgtggcggccagacagtgcagagctgtgtgatccggaacctgaggaagaaccccaactttgacatctgcaccctcttcatggaggtgatgctgccccgggaggagctgtactgcccccccatcaccgtgaaggtgattgacaaccggcagtttggaagaagacctgtggtgggccagtgcaccatccgcagcctggagagcttcctgtgtgacccctacagcgctgagagccccagcccccagggcggcccagatgatgtgtccctgctgagccctggagaagatgtgctgattgatattgatgacaaggagcccctcatccccatccaggaggaggagttcatcgactggtggagcaagttctttgccagcattggagagcgggagaagtgtggcagctacctggagaaggactttgacaccctgaaggtgtatgacacccagctggagaatgtggaggcctttgagggcctgagtgacttctgcaacaccttcaagctgtaccggggcaagacccaggaggagacagaggaccccagcgtcatcggggagttcaagggcctcttcaagatctaccccctgcctgaggaccctgccatccccatgccaccccggcagttccaccagctggccgcccagggcccccaggagtgcctggtgcgcatctacatcgtgcgggccttcggcctgcagcccaaggaccccaacgggaaatgtgacccctacatcaagatcagcatcggcaagaagtctgtgtctgaccaggacaactacatcccctgcaccctggagcctgtgtttgggaagatgtttgagctgacctgcaccctgcccctggagaaggacctgaagatcaccctgtatgactatgacctgctgagcaaggatgagaagattggagagaccgtggtggacctggagaaccggctgctgagcaagtttggagcccgctgtggcctgccccagacctactgtgtgtctggccccaaccagtggagggaccagctgcggcccagccagctgctgcacctgttctgccagcagcaccgggtgaaggcccctgtgtacagaacagacagagtgatgttccaggacaaggagtacagcattgaggagattgaagctggccgcatccccaacccccacctgggccctgtggaggagcggctggccctgcacgtgctgcagcagcagggcctggtgcctgagcacgtggagagccggcccctgtacagccccctgcagcctgacatcgagcagggcaagctgcagatgtgggtggacctcttccccaaggccctgggccggcccggcccccccttcaacatcaccccccggcgggcccggcgcttcttcctgcgctgcatcatctggaacaccagagatgtgatcctggatgacctgagcctgactggagagaagatgtctgacatctacgtgaagggctggatgattggatttgaggagcacaagcagaagacagatgtgcactaccgcagcctgggcggggagggcaacttcaactggaggttcatcttcccctttgactacctgcctgctgagcaggtgtgcaccatcgccaagaaggatgccttctggaggctggacaagacagagagcaagatcccagcccgggtggtgttccagatctgggacaatgacaagttctcctttgatgacttcctgggcagcctgcagctggacctgaacaggatgcccaagccagccaagacagccaagaagtgcagcctggaccagctggatgatgccttccaccctgagtggtttgtgtccctgtttgagcagaagacagtgaagggctggtggccctgtgtggccgaggagggggagaagaagatcctggccggcaagctggagatgaccctggagatcgtggccgagagcgagcacgaggagaggcctgctggccagggcagagatgagcccaacatgaaccccaagctggaggaccccaggaggccagacaccagcttcctgtggttcaccagcccctacaagaccatgaagttcatcctgtggaggcgcttccgctgggccatcatcctcttcatcatcctcttcatcctgctgctcttcctggccatcttcatctatgccttccccaactatgctgccatgaagctggtgaagcccttctcctag

SEQ ID NO: 138719 - DNA, 6796 bp, Artificial Sequence
  derived and/or modified sequence
gggtggaagatgagcagaagcccctgttctcggaacgccggctgacaagcggggtgagcgcagccggggcggggacccagcctagcccactggagcagccgggggtggcccgttcccctttaagagcaactgctctaagccaggagccagagattcgagccggcctcgcccagccagccctctccagcgaggggacccacaagcggcgcctcggccctcccgacctttccgagccctctttgcgccctgggcgcacggggccctacacgcgccaagcatgctgagggtcttcatcctctatgccgagaacgtccacacacccgacaccgacatcagcgatgcctactgctccgcggtgtttgcaggggtgaagaagagaaccaaagtcatcaagaacagcgtgaaccctgtatggaatgagggatttgaatgggacctcaagggcatccccctggaccagggctctgagcttcatgtggtggtcaaagaccatgagacgatggggaggaacaggttcctgggggaagccaaggtcccactccgagaggtcctcgccacccctagtctgtccgccagcttcaatgcccccctgctggacaccaagaagcagcccacaggggcctcgctggtcctgcaggtgtcctacacaccgctgcctggagctgtgcccctgttcccgccccctactcctctggagccctccccgactctgcctgacctggatgtagtggcagacacaggaggagaggaagacacagaggaccagggactcactggagatgaggcggagccattcctggatcaaagcggaggcccgggggctcccaccaccccaaggaaactaccttcacgtcctccgccccactaccccgggatcaaaagaaagcgaagtgcgcctacatctagaaagctgctgtcagacaaaccgcaggatttccagatcagggtccaggtgatcgaggggcgccagctgccgggggtgaacatcaagcctgtggtcaaggttaccgctgcagggcagaccaagcggacgcggatccacaagggaaacagcccactcttcaatgagactcttttcttcaacttgtttgactctcctggggagctgtttgatgagcccatctttatcacggtggtagactctcgttctctcaggacagatgctctcctcggggagttccggatggacgtgggcaccatttacagagagccccggcacgcctatctcaggaagtggctgctgctctcagaccctgatgacttctctgctggggccagaggctacctgaaaacaagcctttgtgtgctggggcctggggacgaagcgcctctggagagaaaagacccctctgaagacaaggaggacattgaaagcaacctgctccggcccacaggcgtagccctgcgaggagcccacttctgcctgaaggtcttccgggccgaggacttgccgcagatggacgatgccgtgatggacaacgtgaaacagatctttggcttcgagagtaacaagaagaacttggtggacccctttgtggaggtcagctttgcggggaaaatgctgtgcagcaagatcttggagaagacggccaaccctcagtggaaccagaacatcacactgcctgccatgtttccctccatgtgcgaaaaaatgaggattcgtatcatagactgggaccgcctgactcacaatgacatcgtggctaccacctacctgagtatgtcgaaaatctctgcccctggaggagaaatagaagaggagcctgcaggtgctgtcaagccttcgaaagcctcagacttggatgactacctgggcttcctccccacttttgggccctgctacatcaacctctatggcagtcccagagagttcacaggcttcccagacccctacacagagctcaacacaggcaagggggaaggtgtggcttatcgtggccggcttctgctctccctggagaccaagctggtggagcacagtgaacagaaggtggaggaccttcctgcggatgacatcctccgggtggagaagtaccttaggaggcgcaagtactccctgtttgcggccttctactcagccaccatgctgcaggatgtggatgatgccatccagtttgaggtcagcatcgggaactacgggaacaagttcgacatgacctgcctgccgctggcctccaccactcagtacagccgtgcagtctttgacgggtgccactactactacctaccctggggtaacgtgaaacctgtggtggtgctgtcatcctactgggaggacatcagccatagaatcgagactcagaaccagctgcttgggattgctgaccggctggaagctggcctggagcaggtccacctggccctgaaggcgcagtgctccacggaggacgtggactcgctggtggctcagctgacggatgagctcatcgcaggctgcagccagcctctgggtgacatccatgagacaccctctgccacccacctggaccagtacctgtaccagctgcgcacccatcacctgagccaaatcactgaggctgccctggccctgaagctcggccacagtgagctccctgcagctctggagcaggcggaggactggctcctgcgtctgcgtgccctggcagaggagccccagaacagcctgccggacatcgtcatctggatgctgcagggagacaagcgtgtggcataccagcgggtgcccgcccaccaagtcctcttctcccggcggggtgccaactactgtggcaagaattgtgggaagctacagacaatctttctgaaatatccgatggagaaggtgcctggcgcccggatgccagtgcagatacgggtcaagctgtggtttgggctctcagtggatgagaaggagttcaaccagtttgctgaggggaagctgtctgtctttgctgaaacctatgagaacgagactaagttggcccttgttgggaactggggcacaacgggcctcacctaccccaagttttctgacgtcacgggcaagatcaagctacccaaggacagcttccgcccctcggccggctggacctgggctggagattggttcgtgtgtccggagaagactctgctccatgacatggacgccggtcacctgagcttcgtggaagaggtgtttgagaaccagacccggcttcccggaggccagtggatctacatgagtgacaactacaccgatgtgaacggggagaaggtgcttcccaaggatgacattgagtgcccactgggctggaagtgggaagatgaggaatggtccacagacctcaaccgggctgtcgatgagcaaggctgggagtatagcatcaccatccccccggagcggaagccgaagcactgggtccctgctgagaagatgtactacacacaccgacggcggcgctgggtgcgcctgcgcaggagggatctcagccaaatggaagcactgaaaaggcacaggcaggcggaggcggagggcgagggctgggagtacgcctctctttttggctggaagttccacctcgagtaccgcaagacagatgccttccgccgccgccgctggcgccgtcgcatggagccactggagaagacggggcctgcagctgtgtttgcccttgagggggccctgggcggcgtgatggatgacaagagtgaagattccatgtccgtctccaccttgagcttcggtgtgaacagacccacgatttcctgcatattcgactatgggaaccgctaccatctacgctgctacatgtaccaggcccgggacctggctgcgatggacaaggactctttttctgatccctatgccatcgtctccttcctgcaccagagccagaagacggtggtggtgaagaacacccttaaccccacctgggaccagacgctcatcttctacgagatcgagatctttggcgagccggccacagttgctgagcaaccgcccagcattgtggtggagctgtacgaccatgacacttatggtgcagacgagtttatgggtcgctgcatctgtcaaccgagtctggaacggatgccacggctggcctggttcccactgacgaggggcagccagccgtcgggggagctgctggcctcttttgagctcatccagagagagaagccggccatccaccatattcctggttttgaggtgcaggagacatcaaggatcctggatgagtctgaggacacagacctgccctacccaccaccccagagggaggccaacatctacatggttcctcagaacatcaagccagcgctccagcgtaccgccatcgagatcctggcatggggcctgcggaacatgaagagttaccagctggccaacatctcctcccccagcctcgtggtagagtgtgggggccagacggtgcagtcctgtgtcatcaggaacctccggaagaaccccaactttgacatctgcaccctcttcatggaagtgatgctgcccagggaggagctctactgcccccccatcaccgtcaaggtcatcgataaccgccagtttggccgccggcctgtggtgggccagtgtaccatccgctccctggagagcttcctgtgtgacccctactcggcggagagtccatccccacagggtggcccagacgatgtgagcctactcagtcctggggaagacgtgctcatcgacattgatgacaaggagcccctcatccccatccaggaggaagagttcatcgattggtggagcaaattctttgcctccataggggagagggaaaagtgcggctcctacctggagaaggattttgacaccctgaaggtctatgacacacagctggagaatgtggaggcctttgagggcctgtctgacttttgtaacaccttcaagctgtaccggggcaagacgcaggaggagacagaagatccatctgtgattggtgaatttaagggcctcttcaaaatttatcccctcccagaagacccagccatccccatgcccccaagacagttccaccagctggccgcccagggaccccaggagtgcttggtccgtatctacattgtccgagcatttggcctgcagcccaaggaccccaatggaaagtgtgatccttacatcaagatctccatagggaagaaatcagtgagtgaccaggataactacatcccctgcacgctggagcccgtatttggaaagatgttcgagctgacctgcactctgcctctggagaaggacctaaagatcactctctatgactatgacctcctctccaaggacgaaaagatcggtgagacggtcgtcgacctggagaacaggctgctgtccaagtttggggctcgctgtggactcccacagacctactgtgtctctggaccgaaccagtggcgggaccagctccgcccctcccagctcctccacctcttctgccagcagcatagagtcaaggcacctgtgtaccggacagaccgtgtaatgtttcaggataaagaatattccattgaagagatagaggctggcaggatcccaaacccacacctgggcccagtggaggagcgtctggctctgcatgtgcttcagcagcagggcctggtcccggagcacgtggagtcacggcccctctacagccccctgcagccagacatcgagcaggggaagctgcagatgtgggtcgacctatttccgaaggccctggggcggcctggacctcccttcaacatcaccccacggagagccagaaggtttttcctgcgttgtattatctggaataccagagatgtgatcctggatgacctgagcctcacgggggagaagatgagcgacatttatgtgaaaggttggatgattggctttgaagaacacaagcaaaagacagacgtgcattatcgttccctgggaggtgaaggcaacttcaactggaggttcattttccccttcgactacctgccagctgagcaagtctgtaccattgccaagaaggatgccttctggaggctggacaagactgagagcaaaatcccagcacgagtggtgttccagatctgggacaatgacaagttctcctttgatgattttctgggctccctgcagctcgatctcaaccgcatgcccaagccagccaagacagccaagaagtgctccttggaccagctggatgatgctttccacccagaatggtttgtgtccctttttgagcagaaaacagtgaagggctggtggccctgtgtagcagaagagggtgagaagaaaatactggcgggcaagctggaaatgaccttggagattgtagcagagagtgagcatgaggagcggcctgctggccagggccgggatgagcccaacatgaaccctaagcttgaggacccaaggcgccccgacacctccttcctgtggtttacctccccatacaagaccatgaagttcatcctgtggcggcgtttccggtgggccatcatcctcttcatcatcctcttcatcctgctgctgttcctggccatcttcatctacgccttcccgaactatgctgccatgaagctggtgaagcccttcagctgaggactctcctgccctgtagaaggggccgtggggtcccctccagcatgggactggcctgcctcctccgcccagctcggcgagctcctccagacctcctaggcctgattgtcctgccagggtgggcagacagacagatggaccggcccacactcccagagttgctaacatggagctctgagatcaccccacttccatcatttccttctcccccaacccaacgcttttttggatcagctcagacatatttcagtataaaacagttggaaccacacagca

SEQ ID NO: 138720 - DNA, 6243 bp, Artificial Sequence
  derived and/or modified sequence
atgctgcgggtgttcatcctgtacgccgagaacgtgcacacccccgatacagacatttctgatgcctattgtagcgccgtgtttgccggagtgaagaagaggacaaaggttatcaaaaactccgtgaatccggtctggaatgagggcttcgagtgggatctgaaaggtatccccttggatcagggcagcgagttacacgttgtcgtcaaggatcacgaaactatggggcgcaaccggttcctcggcgaggcaaaagtgccactgcgcgaggtgctggccactccttctttgtctgcaagcttcaacgcacctcttctggatacaaagaaacagcccaccggggcaagtctggtactccaggtgtcctacaccccactgcccggggctgtgcccctgtttccccctccaactcctttggaacccagccccacattgcccgacctggatgttgtggctgacactggcggagaggaagatactgaggaccagggcctaaccggcgatgaggctgaaccctttctcgaccagtctggcggccctggtgcccccacaacgccccgtaagttgccgtcccgacctcccccgcattatcccggaataaagcggaaaaggtccgctccgacctcaaggaaactcttgtctgataagccccaagacttccagatccgcgtacaggtgatcgagggaagacagcttccaggtgttaacatcaaacctgtggtgaaggtaaccgccgcgggacaaacgaagcggacacgaatccacaagggcaactcccctctgtttaatgagacacttttcttcaatctgttcgatagtcccggcgagcttttcgatgagcctatttttataaccgtcgttgatagtcggtctctccgcaccgacgcacttcttggagaattcagaatggacgtgggaacaatctatcgggaacctagacacgcttatttaagaaagtggctgctactgagcgatcctgacgacttcagtgctggcgcaagagggtatctaaagacttccctctgcgtgcttgggccaggagatgaggcacctctggagaggaaggatccaagcgaggacaaggaagacattgagtcgaatctgctacggccgaccggtgtggctttgcggggcgctcacttctgtctgaaggtgttcagagccgaagacctccctcagatggacgacgccgttatggacaacgttaaacagattttcggttttgagagtaacaagaaaaatttggttgaccccttcgtggaagtgtcatttgcaggtaagatgctgtgtagcaagatcctcgagaaaaccgcaaacccccagtggaaccagaacataacactgcccgctatgttccccagcatgtgcgagaaaatgcggattcgtattatcgattgggatcgcctcactcacaatgacatcgtcgcaaccacgtacctgtcaatgtcaaaaatctccgccccaggcggagagattgaggaggaacccgccggagccgtgaagccttcgaaggccagcgatttggacgattatttgggcttcctccccacgtttgggccctgttacatcaatctctacggaagcccaagggagttcaccggatttcctgatccctacaccgagctaaatacaggtaaaggagaaggggtagcctaccgtggccgacttctcttgtccctggagaccaagttagtagaacacagtgagcaaaaggtagaggatttgcccgctgacgacattctgcgggtggaaaaatatctccgcagaagaaagtattccttattcgccgccttttactccgcgaccatgcttcaggatgtggatgatgcgatccagttcgaagttagcattggtaattatggcaacaagttcgatatgacatgtctgcccctggcttcaacaacacagtattccagggccgtctttgacgggtgccattactactacctgccttggggcaatgtgaagccagtggtggtgctgtcaagctactgggaggacatctctcaccgcattgaaacacaaaatcagctgctgggaatagcagatcggcttgaggccggactagagcaggttcacttggccttgaaggcccagtgcagtacggaggacgtagattcactggtggctcagctgaccgatgagctgatagctggatgttcccagccccttggagacatccatgaaaccccatctgctacacatctggatcagtacttgtatcaacttcggactcatcacctgagccagatcactgaggctgcactggccctcaaactggggcacagcgagctacccgcggccctggaacaggctgaggactggctactgaggctgcgggcactggctgaggagccgcagaactcactgcctgacatcgtaatctggatgttgcagggggataaaagggtggcctaccaacgggttccagcccatcaagttctgttctccagacgcggcgctaattattgcggcaagaactgtggtaagctgcagacaatattcctgaaatatccaatggagaaggtacccggggcaaggatgcccgtacagattagagtgaagctctggttcggtctctccgtagatgagaaagaatttaaccagttcgcagagggaaaactatccgtcttcgccgaaacatatgaaaacgagacaaagcttgcgctcgtcggtaactggggcacaacagggttaacataccctaaatttagcgatgtgactgggaaaatcaaattacccaaggactccttccgcccgtctgccggttggacctgggctggcgactggttcgtgtgccccgaaaaaaccctgctgcacgatatggacgccgggcacctatcattcgtcgaggaagtctttgagaatcaaactagactccctggcggccaatggatctacatgagcgataattataccgacgttaatggcgaaaaagtcctccctaaggacgatatcgagtgccctcttgggtggaaatgggaggatgaagagtggtccactgacctaaacagagccgtcgatgagcagggctgggaatacagcatcactatccctcctgagaggaaacctaagcactgggtgcccgccgaaaagatgtactatacccacagacgcagaagatgggtgcgcctgagaaggcgcgacctcagccagatggaagccttgaagcgccaccgccaggcggaagccgaaggagaggggtgggaatacgcttcgttatttgggtggaagttccacctggaatatcggaagacagacgcgttcaggcggcgacgctggcgtcgacggatggagccactcgagaaaacagggcctgccgccgtcttcgccctggaaggagccttaggaggtgtaatggatgataagtccgaggatagtatgagcgtatctacccttagcttcggcgtgaatcgaccaacaattagctgcatcttcgactacggcaaccggtaccatctccgctgttatatgtaccaggcaagagacttggccgccatggacaaggattcttttagtgacccttacgccattgtctctttcctacaccagtcccagaaaacagtcgtagttaaaaacaccctgaatccgacttgggatcagaccttgatcttttacgagatagagatttttggcgaacccgccacagtggccgagcagccgcccagcatagtagtcgaattatacgaccacgacacctacggtgcagatgaatttatggggaggtgtatctgccagcccagtttggagaggatgcctaggctggcctggttccccctgacacggggatcccagccttccggagaattgctggcttcattcgaactcatccagagagagaagccggcaatccatcatattccaggattcgaagttcaggagacaagccgcattctggacgagagtgaggacacagacctgccttatccccccccccagagagaggctaacatctatatggtgcctcagaacatcaaaccagctttgcagcgcacagcgatcgagatactggcatggggtctccgaaacatgaaatcctaccagctggccaatataagttctcctagcctggtggtggagtgcgggggccagacggtgcagtcctgcgtgataagaaacttacgcaaaaatcccaacttcgatatatgtacactgtttatggaagtcatgttgccacgggaagagctttattgcccccctatcacagttaaggtaatcgataacaggcagtttggaaggcgccctgtagttggacagtgcacaatccggtcactggaatccttcctgtgtgacccatatagcgctgaaagtccaagcccccagggtgggcctgacgacgtaagcttactcagccctggtgaagatgtgctgattgatatcgatgacaaggagccccttattcctatccaagaggaagaatttatcgactggtggagtaaattttttgcgtcaataggagagagggagaagtgtgggagctatctggagaaggactttgacacactgaaggtctacgatacccagctggagaatgtcgaggctttcgaaggactgagcgatttctgcaacacattcaagctgtatagaggaaaaactcaggaagagacagaggaccccagcgtcattggtgaattcaagggactgtttaaaatatacccccttccagaggaccccgcgatacctatgccaccccggcaatttcaccagctggctgcccagggtccccaggaatgcctcgtgcggatctacatcgtgcgggcatttgggttacaacctaaagatccaaacggcaagtgtgatccgtatattaaaatctccatcgggaagaaaagcgtctcagatcaagacaactacatcccttgtacgttggagccagtctttggcaaaatgttcgagcttacatgcactcttcccctggaaaaggaccttaagattaccctgtacgattacgatctcctgtcgaaagacgagaaaattggagagaccgttgttgaccttgaaaaccgacttctgagcaagttcggcgcccgctgcggcctgccacagacatattgtgtctctggtcccaaccaatggcgtgaccagcttaggcccagtcagctcctgcacttgttttgtcagcaacaccgggtgaaagctcccgtatatcggacggaccgcgtgatgttccaagataaagaatacagtattgaggaaatcgaagccggacgaattcctaatccacatctcggacccgttgaggagaggctggctctccacgttctgcagcagcaaggactagtacctgagcacgtggagtcccgacccctgtactcaccgctgcagcctgatattgaacaaggaaaactacagatgtgggttgatctcttccctaaagcactgggccgacccggtccaccgtttaacataactccacgcagagcacgcaggttcttcttgcgctgcatcatctggaacactagggacgtgattcttgatgatctctctctcactggtgagaaaatgagcgacatctacgtgaagggctggatgattggatttgaggaacacaaacagaaaactgatgtccactacagatccctgggcggtgaggggaattttaactggagatttatattccccttcgattacctccccgccgaacaggtatgcactattgccaaaaaagatgcattttggcggctggacaagactgagtccaagattccagctcgtgtcgtctttcagatttgggacaatgataaattctcgttcgacgatttcctggggtctctgcaattggatctgaaccggatgcccaaaccagccaagacagctaaaaagtgctcattggaccaactggatgatgcattccatcccgagtggttcgtcagtttgtttgaacagaaaacagttaagggatggtggccgtgtgtggccgaagaaggggaaaagaaaatcttggccggcaagctggagatgaccctcgaaattgtggccgagtcagaacacgaggagcggccagcaggacaaggccgggacgagcctaatatgaaccctaaacttgaggatcccagacgccccgacactagcttcctgtggtttactagcccctataaaacgatgaagttcattctatggaggcggtttcgctgggccatcatcctattcatcattctgttcatcctgctgttgttcctcgccattttcatttacgccttccccaattatgccgctatgaaactggtcaagccgttcagctag

SEQ ID NO: 138721 - DNA, 6242 bp, Artificial Sequence
  derived and/or modified sequence
atgttacgcgtctttatactgtacgccgagaacgtgcacactcccgacaccgacatctcagatgcctattgtagtgctgtgttcgccggagttaagaaaagaacaaaggtgatcaaaaatagtgtcaatccagtgtggaatgagggctttgagtgggacctgaagggcataccattggaccaagggtctgagctccacgtggttgtgaaggaccacgagaccatgggtcgcaatagattccttggcgaagccaaagttcccctccgcgaagttttggcgacaccttcactgtctgcttcattcaacgcacccctcctggacacaaaaaagcagcctacgggggcaagtctggtgcttcaggtctcctatacccctctccccggagctgtccccctttttcctcccccaactcctctggagccttcccccactctccctgacctggacgtagtcgcagacacgggcggagaagaagatacagaggaccaaggactcactggcgatgaagctgagcctttcctcgatcagagcggcggacccggagccccaaccacaccccgtaagctgccttcaagacccccaccacactatcccggtatcaaacggaaaagatcagcacctacttcaaggaaattgttgtcagacaagccacaggactttcagatcagagtacaagtcatcgagggtcggcagttacccggagtaaatatcaaacccgtggtgaaggtcaccgccgcagggcagacaaagagaacgaggatccacaagggaaattcccctctcttcaatgaaacccttttcttcaaccttttcgattcacccggtgaactcttcgacgaacccatatttatcactgtcgtggattcgcgctcgctgagaactgatgcactgttaggggaatttagaatggacgtgggaaccatctaccgagagcccagacatgcgtatctgaggaaatggctgcttttgtccgaccctgacgatttttctgcgggagcaaggggctacctcaagacaagtctttgtgtgctgggtccaggcgacgaagcgccactggaacggaaggacccctcggaggataaggaagacattgagagcaatcttttacgccctacaggcgtggcactgcggggagcccatttctgcctgaaggtgtttcgcgctgaggaccttcctcagatggatgatgccgtaatggacaacgtcaaacagatttttggctttgagagcaataaaaagaacctggtcgacccattcgttgaagtgtctttcgccggtaagatgctctgctcaaagattttggaaaaaactgccaatccccagtggaatcaaaatatcaccctgcctgctatgttcccttctatgtgcgaaaagatgaggattcgcataattgactgggataggctgacgcataatgacatcgtggccaccacttatctctctatgtccaagatctctgcccctgggggagaaatagaggaagaacccgcaggagccgtcaagccttccaaagcttctgatttggacgattacctgggctttttgccaacatttggaccatgctatataaacctctatggctccccgagggagtttacgggcttccccgatccatacactgagctgaataccgggaaaggcgagggagtagcgtaccggggacgattgcttctgtcccttgaaacaaagttagtggagcactccgagcagaaggtggaggatctccccgcagacgacattctgcgggtggagaaatacctgagaagaaggaaatatagtctcttcgccgctttttatagtgctacaatgctccaggacgtcgacgatgctattcagttcgaggtctctatcggaaattacggcaataagttcgacatgacgtgcctccccctggcttccactacccaatattcgagagccgtgttcgacggctgccactactattaccttccatggggtaacgtgaagccagtcgtggtgctgtcgtcttattgggaggatatctctcaccgcattgagacccagaatcagctgctcggtattgccgatcgcttggaggcaggtttagagcaggtgcacctagcactcaaggctcaatgtagcaccgaggacgtcgactccttggtagctcagctgaccgacgagctgatcgctggatgttcacagccgctaggcgacattcatgaaactcccagcgcaacacacctagaccagtatctgtatcagctgagaacccaccatctttctcaaataaccgaggccgctctcgcgctgaaacttggacatagcgagcttcccgctgctctggaacaggctgaggattggttgctgcgcttacgcgcacttgctgaggaaccccagaattccctcccggatattgtgatctggatgctgcaaggcgataagcgggttgcctatcagagagtccccgcacaccaagtgctcttctcgcgcagaggagcaaattactgtgggaagaattgtggcaaactgcaaacgatcttcctcaagtaccccatggaaaaggttccgggtgcacggatgccagtgcagatcagagttaaactgtggtttgggctgtcggtggatgaaaaagaattcaatcaattcgccgaaggaaagttgtctgtcttcgccgaaacatatgagaacgagacaaagctggccttggtcggtaattggggcaccacagggctgacctacccaaaattctctgacgtcacaggtaagattaaactgccaaaggactccttccggccatcggccggatggacttgggcgggagactggttcgtatgccccgaaaagacactgctgcacgacatggatgctggccacttgagctttgtggaggaagtttttgagaatcagaccagactcccagggggacaatggatctatatgagtgacaattatactgacgtgaatggcgagaaagtgctaccgaaggacgacattgagtgtccgctagggtggaaatgggaggacgaggagtggtcgacagacctcaatcgcgctgtcgacgagcagggttgggagtacagcatcactataccacccgaacgcaagcccaaacactgggttccagcagagaagatgtactatactcatagacggaggcgttgggttcgccttaggcgcagagatctgagccagatggaggctctcaaacgacaccggcaggccgaggctgagggggagggctgggagtatgcttctctgttcggatggaaattccatctggagtatcgcaaaaccgatgcctttcgccgacggagatggagacgtaggatggagcccctcgaaaaaaccggccctgccgctgtgtttgctctggagggagccctcggcggagtgatggacgataaatccgaagactcgatgtcggtgtcaactctcagtttcggcgttaaccggccaaccatatcctgcatctttgactatgggaataggtaccatcttcgatgttacatgtatcaggctagggatctggccgctatggacaaggattcgttttccgatccatatgccatcgtgtcgttcctacaccagtcccaaaaaaccgtcgtggttaagaataccctgaacccaacgtgggaccaaacactgatcttttacgagatagagattttcggcgaacctgccacggttgcagagcagccacccagtattgttgtagaactgtacgaccacgacacctacggtgccgacgaattcatggggcgttgcatctgtcagcccagtctcgaaaggatgcctagactcgcttggttcccgcttacgcggggaagccagccctccggagagctgctggccagctttgagcttatacagagggagaagccggctatccatcacatccctggatttgaggtccaggaaacttcacgtatcctggacgagtccgaagataccgatttgccttacccacctccacaaagagaggcaaacatttatatggtgcctcaaaacattaaacctgcactgcagcggacagcaattgagattttggcctggggtcttaggaatatgaagagttatcagctggcaaatattagctccccttccctggtagtggagtgtgggggacagacggtgcagtcatgcgtgatcagaaacctacgtaaaaatcccaattttgatatctgtacactgtttatggaggtaatgctgccaagagaggagctgtattgcccaccgattacggtgaaggtcatcgacaacaggcagtttgggcgaagaccagttgtgggccaatgcaccattaggtctctggagtccttcctatgcgacccgtattctgctgaaagccctagtccacaaggcggtcctgacgacgtgtccctcctctcgcccggagaggacgtgctcatcgacattgatgataaggagcccctcattccaattcaggaagaagaattcattgactggtggtcgaagttcttcgcctcaataggggagagagagaaatgtggctcttatctggagaaagatttcgatacgctaaaggtttatgacactcagctcgaaaatgttgaggcttttgagggcttgtctgacttttgtaatacgttcaagttataccgtggcaagacacaggaagaaacagaagacccatctgtgatcggagagttcaagggcctgttcaaaatttatcctctccccgaggaccccgcaataccgatgcctccccgacagtttcaccaacttgccgctcagggcccacaggagtgccttgtgagaatatatattgttagagccttcggtctgcagccaaaagaccccaatggcaagtgcgatccttacattaaaatcagcatcggcaaaaagtccgtatcagatcaggacaattacataccttgcactctcgaacccgtgtttgggaaaatgtttgagctcacctgcacccttcctctagaaaaggatctgaaaattacactgtatgactatgatctgctgtcaaaggatgagaaaatcggggagaccgtcgtggatctcgagaaccggctcttgagcaaattcggagctagatgtggactgcctcagacatactgcgtgtcggggccaaatcagtggcgggatcaattgagaccgtcacagttactgcacctgttttgccaacagcaccgagtgaaggctccagtatatcgcactgacagggtgatgttccaggataaagaatactccatagaggaaatcgaagcaggtcggatcccaaaccctcacctggggccagtggaagaaaggcttgccttgcacgttctacaacagcagggcctcgtgccagaacacgtggaaagtaggccactttattcacctctccagcccgacattgagcagggaaaacttcagatgtgggtagatttattcccaaaagcacttggcaggcctgggccacctttcaacatcacaccacggcgagcgcgacgctttttccttcgctgcatcatttggaatactagagatgtgattctggatgatctgtccctgacgggggagaagatgtctgatatctatgtaaagggttggatgattggattcgaggaacacaagcagaagaccgacgtgcactacagatcacttgggggagagggaaatttcaactggcggttcattttcccgttcgattaccttcctgccgagcaagtttgcactatcgcaaaaaaggacgcattctggaggctcgataagactgagagcaaaatccccgctagggtagttttccagatctgggacaatgacaagttttcattcgatgatttcctcggttcactccagctggacctgaaccgaatgcctaagccagcaaagactgccaagaaatgcagcttggaccagctggatgatgccttccaccctgagtggttcgtatctctgttcgaacagaagactgtaaaaggctggtggccctgcgtcgctgaggaaggggaaaagaagatactggcagggaaactggaaatgaccttagagatagtcgcagagtcggagcatgaagagcgacctgccggacaggggagagatgagccaaatatgaaccccaaacttgaggatccgcgtcgacctgacacctctttcctgtggtttacttccccttataaaacaatgaagttcatcctttggcggaggttcagatgggccataatcctgttcattattctgttcattctcctgctgttcctggctattttcatttatgcctttccaaactatgctgcaatgaagctggttaagcctttcagcta

SEQ ID NO: 138722 - DNA, 6243 bp, Artificial Sequence
  derived and/or modified sequence
atgctgcgggtgttcatcctctatgcagaaaatgtgcacacacccgatacagacatttctgatgcatattgtagtgcggtgttcgccggggtgaagaaaagaaccaaagttatcaaaaattccgtaaacccagtctggaacgaaggatttgagtgggacttaaagggcattccgcttgaccaaggcagcgagctgcacgtcgtcgtcaaggatcatgagacaatgggtcgaaatcgattcctgggagaggcgaaagtcccactgagggaggtgttggctaccccaagtctgtccgctagctttaacgcaccactccttgataccaaaaagcagcccactggagcttcattggtgctccaggtgagttatacccctctccccggcgcagtgcccctatttccaccaccaacccctctggagccctctcccacattgccagatctggacgtggtagctgacactggcggggaggaggatactgaggatcagggcctgacaggcgacgaggccgagccttttctcgaccaatcaggtggtcccggcgcgcccaccacacctcgtaagctgccttcacgtcctcctccacactacccagggatcaagagaaagcgctcggcacccacgtctagaaagctcctgtccgacaaaccccaggactttcagatacgtgtacaagtgattgaaggcaggcaactgcctggcgtcaatattaaaccagtcgtgaaggtgacagcggctggccagaccaaaagaactagaattcacaagggcaactcccccctatttaatgagaccttgttctttaatctcttcgactctccaggtgagctgttcgatgagcccattttcatcaccgtcgttgattctcggtctttacgtacagacgcgttgctgggcgagtttcgcatggatgttggcactatttatagggagcccaggcacgcatacctcaggaaatggcttcttctctccgacccggacgacttttcagcaggagctcgcgggtatctaaagacttccctgtgcgtgttggggccaggagacgaggcacccctagaaaggaaggatccatccgaagacaaggaggacatcgagtctaacctcctgcggccaactggtgtcgcccttaggggtgcccatttctgcctcaaggtctttagggctgaagatctgccacagatggacgatgcggtgatggataacgtgaaacaaattttcggcttcgaatccaataaaaaaaatcttgtggacccctttgtggaggtgtctttcgccggtaagatgctatgctcaaagatcctggaaaaaaccgccaatccacagtggaatcagaatatcacgttaccagcaatgttcccatctatgtgcgagaaaatgcgaattcgcatcatcgattgggatagactgacccataatgatattgtggccaccacctatctttcaatgagcaaaatttctgccccaggaggcgaaatcgaggaggaaccggcaggggcagtgaaaccatcgaaagccagtgatttagacgattacttaggcttccttcctactttcggcccttgttatatcaatttatatgggtccccgagggagtttactggtttccctgatccctacacggaacttaacactggaaagggtgaaggcgtggcataccgtggcagactgctcctgtctctggaaacgaagttggtggaacattccgagcaaaaggtggaggacttgcccgcggatgatattcttagggtggaaaaatacttgagacgcagaaagtacagtttgttcgcggctttctacagcgcaacaatgttacaagacgtggacgacgccattcagttcgaggtaagcataggtaattacgggaacaaattcgatatgacctgcctcccgctggccagcacgacccaatacagcagagccgtgtttgacggctgccactactattatcttccttggggcaatgtcaagccagtggttgtactgagctcctactgggaggatatcagtcaccgaatcgagacacagaatcagctgctgggaatagcagatcgcctagaagctgggcttgagcaggtgcatctcgcccttaaggcacagtgcagcactgaagatgtcgatagcctggtggcacagctgaccgacgaactaatcgccggttgcagtcaacctttgggcgacattcatgaaacacctagtgcgacgcacctggaccagtacctgtaccagctgcgaacgcatcacctgtcccagatcacagaagcagctctggcactcaagcttggtcattcagagctccctgcggcgctggaacaggcagaggattggctgctgcgcctgcgagcattggctgaggaaccccaaaatagcctgcctgacatagttatctggatgttgcagggtgacaagcgcgtggcctatcaacgcgtgcccgcacatcaagtgctgttttccaggcgcggggcgaactattgcggcaagaattgcggcaaactacagaccatctttttaaaatatccaatggaaaaggtgccgggggcgcggatgcccgttcagattcgcgtgaagctctggtttggcctgtctgtggacgagaaggaatttaatcaatttgccgagggaaagctgtctgtatttgccgagacctatgaaaacgagaccaaactggccctcgtgggtaattggggcacaaccgggctgacgtatccaaaattcagcgatgttaccggaaaaataaagctacctaaagattcgttcagaccctccgccggttggacttgggccggagactggtttgtgtgccccgaaaaaactctgctgcatgatatggatgccgggcatctttccttcgtagaagaggtgttcgaaaatcaaacgcggctccccggggggcagtggatatatatgtcagacaattatacagacgtgaacggtgagaaagtgctgccaaaggatgacatcgaatgtccactcggatggaagtgggaagacgaagagtggtccaccgacctgaaccgggctgtagatgaacagggctgggagtactcaattaccatcccaccagagcggaagccaaagcattgggtcccagccgaaaagatgtattatacccatcggcgcaggagatgggtgaggctgagacggagggacctgagccagatggaggctttgaaaagacaccggcaggctgaggctgagggcgagggatgggaatacgcgtccctatttggctggaaattccatcttgaataccggaagaccgatgcgttccgcagacggaggtggagaaggcggatggaaccgttagagaaaacaggccctgcggccgtctttgcccttgagggcgcactgggcggcgtcatggacgacaaatcagaagatagcatgagtgtcagtaccctgagttttggtgtgaacaggccaaccatctcatgtatcttcgactacggaaaccggtatcatctcaggtgttacatgtaccaggcacgagatctggcagccatggacaaagattcatttagtgacccctacgcaatcgtctcgttcctacaccaatcccagaaaacggttgtagtcaagaatacactaaaccccacatgggatcagaccttgattttctacgagatagaaatctttggtgagcctgcaaccgtggctgaacagccaccaagcattgtggttgaactctatgatcatgacacctatggagctgacgaattcatggggcggtgcatatgtcagccctccctggagagaatgccaagattggcctggttcccactcacccgcggcagccagcccagcggggaactcctggcgagttttgagctaatccagcgcgagaaacctgccattcatcacatacctggatttgaagtgcaagagactagccgaatccttgacgaatccgaggatactgatcttccctatccaccacctcaaagggaggcgaacatttatatggttccacagaacatcaagcctgcactccagagaactgctatcgaaatcctcgcctggggactgcgcaacatgaagtcctaccaactggctaacatttcttctccttcactggtcgtcgaatgcggcggtcagacagtccagagctgtgtcatcagaaatctgagaaaaaatcctaactttgacatctgtacactcttcatggaagtgatgctgcctcgcgaagagttgtattgtccccccattaccgtgaaggtgatcgacaatcgccagttcggacgcaggcccgtagttggtcagtgcacaattcggtctctcgagagtttcctctgcgacccatactctgccgaatccccgtcccctcaaggcggccccgatgacgttagcctgttgagccctggcgaagatgtcctaattgatattgacgataaggaacctctgatacctattcaagaggaggagttcattgactggtggagtaagttcttcgcctcaattggagagcgggaaaaatgcggcagctatcttgaaaaggacttcgataccctgaaggtatatgacacacagctcgaaaacgtcgaggcattcgagggcctgtctgacttctgtaatacattcaagttatataggggtaagactcaggaggagacggaagacccctcggtcatcggtgaatttaaaggcctctttaaaatctatcccctccctgaggacccagccatccctatgccacctcgccagtttcaccagctggccgcacagggcccccaggaatgtctcgtgcggatctacatcgtacgcgcctttggcctacaaccgaaggacccaaacgggaaatgtgacccatacataaagattagtattggcaaaaagtctgtcagcgaccaagataactacataccctgtaccctggagcctgtattcgggaagatgtttgagttaacatgcacactgcccttagaaaaagatctcaaaattactctctacgattatgacctgctctctaaggacgagaaaataggagaaacagtcgtggatctggagaacagactgttgagcaagttcggcgctagatgtgggttgccccagacctattgcgtctccgggcccaaccaatggcgcgatcaattgaggcccagccagttattacatctgttctgtcagcagcaccgggtgaaggcccccgtataccgaactgacagagtgatgtttcaggataaagagtactcaattgaagaaatcgaggctggtaggatccccaaccctcatctcggacccgtagaagagaggctggctttacacgttctgcagcagcagggattggtcccggagcacgttgagagtagacctctatacagcccactccagccagacatcgagcagggaaaactccagatgtgggtggaccttttccctaaagccctcggccgcccaggccccccgttcaacatcaccccacgaagggctcggcgattttttctcaggtgcatcatctggaacactcgggacgtcattcttgatgatctgagcctgaccggcgaaaagatgtccgatatctatgtcaaaggctggatgattggctttgaggaacacaagcagaaaactgatgttcactatcggtctctgggcggcgaaggaaatttcaattggcggttcatcttcccgtttgattacctccctgccgagcaggtctgtaccatagcaaagaaagatgccttctggcgtctagacaagacagagagtaagatccccgcaagagttgtgtttcagatatgggacaacgacaaattttcctttgacgacttcttagggtccctccagctggatctaaatcgtatgccaaagcccgcgaagactgccaaaaagtgtagtctggaccagctcgacgatgccttccaccccgaatggtttgtgagcctctttgagcagaagacagtgaagggttggtggccctgtgttgcagaagaaggcgagaagaaaatactggcaggcaaactggaaatgacactggaaatcgtggccgaatcagaacacgaagagcgacctgctggacaagggcgagatgaacccaatatgaaccccaagctggaagatccacgcagacctgatacctcatttctgtggtttacttctccttataagactatgaaattcatcctgtggcgaagatttagatgggcaatcatcctcttcatcatcctgtttatcttactgctgttccttgctatctttatttacgctttccctaattacgctgccatgaaattagtcaaacccttcagctag

SEQ ID NO: 138723 - DNA, 6243 bp, Artificial Sequence
  derived and/or modified sequence
atgctgcgtgtgtttatcctgtatgccgaaaacgtgcacacaccagacacggacatctctgacgcatactgttcagcagttttcgctggggtgaagaagcgcaccaaggttatcaaaaacagcgtgaatccagtgtggaacgaaggatttgaatgggatctaaagggaatccccctagaccaaggaagtgaactgcatgttgtcgtcaaggaccatgagaccatgggtagaaatcggttcctgggagaagccaaggtccctctccgcgaagttctcgctaccccctctctgagtgctagctttaacgcccccctgctagacaccaagaagcaaccaactggcgcatcacttgttttgcaggtgagctacacaccccttccaggggctgtcccactcttcccacccccgacccctctagaaccctctcccaccctcccagatcttgatgtcgtggccgacacgggcggggaagaagataccgaagaccaaggccttactggagatgaggctgaacccttcttagaccaaagcggtgggcccggagcccctacaacgcctcgcaaactgccaagcagacccccacctcactacccaggtattaagcgcaagcgatccgcaccaacctcccgcaagttgctttccgataagccccaagattttcagatcagagtgcaggtaatcgagggccgccagctaccaggcgttaacatcaaacccgtcgttaaggtgaccgcagccgggcagacaaaacgcacacgaatccataagggcaactcacccctgtttaacgagaccctgttctttaacctttttgactctcctggagaactttttgacgagccaatcttcatcactgtagtggacagcaggtccctgagaactgacgctctgctaggggaatttcgtatggatgttggaacaatttatagagagcccagacacgcatacctccgcaagtggctgttgctcagcgaccccgacgacttttccgctggcgcaagggggtacctgaagactagcctttgtgtacttggacctggtgacgaggcacccctcgagcgtaaagatccttccgaagacaaagaggacatagagtcgaatctgctgagacccacaggagttgctctcaggggggctcacttctgtctgaaagtgtttagagctgaagatttaccgcagatggacgacgccgtcatggacaacgttaaacagatttttggcttcgagtcaaataagaagaatttggtcgatccgttcgtggaggtctcgtttgccggaaagatgctatgctcaaagatactggaaaaaacagctaaccctcagtggaatcaaaatatcactttaccggctatgttcccttcaatgtgtgaaaaaatgcgaatacggataatcgattgggatagacttacccacaatgatatcgtcgctacaacctatttatcaatgtccaagatatctgcgcccggaggggagatcgaggaggagcctgccggcgccgttaaaccaagtaaagccagcgatttggatgattaccttgggtttctgcctaccttcgggccatgttatatcaacttgtatggttcccctagagaattcacaggtttccctgatccatatactgagctgaacacaggcaaaggcgaaggtgtcgcttacagaggccggctgctgctctccctggaaactaagttagtagagcatagtgagcaaaaagtcgaagacttgccagccgatgatatcctgcgagtggagaaatacctaagacggagaaaatattccctgtttgccgccttctatagcgctacgatgttacaggacgtagacgacgcaattcaattcgaagtgagtattggcaactatggaaataagtttgatatgacctgcctaccactcgcctcaacgacacagtactccagggccgttttcgacggatgtcattattattatctcccctggggaaacgttaaaccagtcgttgtgctttctagttattgggaagatatctcccacagaatcgaaactcaaaatcagctgctggggatcgccgatcgccttgaagccggcctcgaacaggtccatctggcactcaaagcccagtgtagcaccgaggacgtggattcgctggtggcccagctgactgatgaactgatagccggttgcagccaacctctgggcgacattcatgaaaccccatctgccacacacttggaccagtatttataccaattaaggacacaccacctctcccagattaccgaagctgccctggccctgaaattaggccatagcgagctcccagctgccttagaacaggccgaagactggctcttgagactccgggccctcgccgaggagccacagaacagcctgccagacattgtgatatggatgctacaaggagataagcgggtggcttaccaacgagttccagctcaccaagtgttgtttagtaggcgaggcgccaattactgtggaaagaactgtggaaagctccaaacaatcttcttgaaatatcccatggagaaagtgcctggtgctaggatgccggttcaaataagggtgaaactttggtttgggttgtcagtcgacgaaaaggaattcaaccaatttgccgaaggtaagctttcagtgtttgcagagacctacgagaatgagaccaaacttgctctagttggaaattggggtactacaggcctgacataccccaaatttagcgatgtgacaggaaaaatcaaactacctaaagacagctttcgccccagcgctggttggacatgggccggcgattggtttgtgtgcccagagaagaccctgctccatgatatggacgcagggcacctcagctttgtcgaagaagtgttcgagaatcagaccagattacccggaggacaatggatctacatgtcagataactatacggatgtcaatggcgaaaaggttttaccaaaagatgacattgagtgcccactgggatggaagtgggaggacgaggaatggtctactgatctcaatagagctgtggacgagcaaggttgggagtacagcattacaatcccccccgaacggaagccgaagcattgggtaccagcagagaagatgtactatacccaccggaggcggcggtgggtcaggcttagacgcagggatctgagccagatggaagcactaaaaaggcaccgtcaagccgaggcagagggagaaggatgggagtatgcgagcctgttcggctggaagtttcacctggagtataggaaaacagatgcgttcagacgacggagatggcggagacggatggaaccccttgaaaagaccggacccgcagcagtttttgctctcgagggtgccctgggaggcgtcatggacgacaagagcgaggatagcatgagcgtaagcaccctgagtttcggagttaaccggcccaccatctcttgcatttttgactacggcaataggtaccacctgagatgttatatgtaccaggctcgagacttagcagccatggataaagattccttctccgacccatatgccatcgtctcctttctccaccaatcgcagaagaccgtggtcgtgaagaataccctcaacccaacctgggatcagacgttgatcttttacgaaattgagatattcggggaaccagccactgtagcggaacaacctccttctatcgttgtggaattatacgatcatgacacttatggcgccgatgaatttatgggacgctgtatttgccagccctctttagaaagaatgcctagactagcatggtttcctcttaccaggggtagccaaccctccggcgaacttctggcctcttttgagctgattcagcgggagaagccggccatacatcacatcccaggctttgaagttcaggagaccagcagaattctggacgaaagtgaagacacagacctaccttaccccccacctcaaagagaggccaatatctacatggtgccacaaaacattaagcctgctctgcagcggaccgctattgagatactagcgtggggcctccgtaatatgaagagctatcaacttgcaaatatctcctcccccagcttagtcgtcgaatgcggaggccaaactgtgcagtcctgcgtgatccggaacctcaggaaaaaccctaacttcgatatttgcacattgttcatggaagttatgctgcctcgagaagaactgtattgtccccctattacagttaaagtgatcgacaacagacagttcggtaggaggccagtggtaggccagtgtaccatacgcagccttgaatcattcctctgtgacccttactccgccgagtctcccagccctcagggcggccccgacgacgtgagcctgctaagtcctggtgaagatgtattgatcgatatcgatgacaaagaaccactcatccctatccaggaggaagaattcatcgattggtggtccaaattcttcgcctcaatcggagagcgcgaaaaatgtgggagctaccttgaaaaagattttgatactctcaaagtgtatgatacacagctagagaacgtggaggctttcgagggactttcagatttttgtaacacgttcaagctgtatcgcggaaagactcaggaagagactgaagaccccagcgtcattggcgagttcaaagggctgtttaaaatttaccctttgcccgaggacccagctatacctatgccccctagacagttccaccaattagccgcacagggcccgcaagagtgcctagtaagaatatacatcgtgagagccttcggactacagccaaaagaccccaacggaaagtgtgacccctacattaagatctccataggaaagaaatctgtatccgaccaagacaactatattccctgcactctggagcccgtcttcggcaaaatgttcgaactcacctgtaccctccctttggaaaaagatctgaagatcactctctatgactatgatttgctctcaaaggatgagaaaatcggagagacggtggttgatcttgaaaatcgcttgctctcaaagtttggagcacgctgcggactaccccagacatactgcgtcagcggcccaaatcaatggcgggaccaattgcgaccctcacagctccttcacctgttttgccagcaacacagagtcaaggctccagtgtatcgtaccgacagggttatgtttcaggataaggaatattcaattgaagaaattgaagctggccgcattccaaacccccatctcggtccggtcgaagaacgattagcactccatgtcctccaacaacaaggcctggtgcccgaacatgtagaatctcgacccctctacagtccacttcaacctgatatagaacagggcaaacttcagatgtgggttgacctgtttccgaaggccctcggccggcctggacctccttttaacataaccccaagacgagcccgccggttctttctacgttgtatcatttggaacacaagggacgtgatattggacgacctgtccttaactggagagaagatgagtgatatttacgtgaaaggatggatgatcggattcgaggaacataaacagaaaactgacgtgcattatcgcagtttagggggtgaaggcaactttaactggcgctttatatttccttttgactatctgcccgctgagcaagtatgtacaatagccaaaaaggatgccttctggaggctggacaaaaccgaatctaaaattcccgcgcgggtggtgtttcaaatatgggataatgacaaattctcattcgatgattttctaggatctttgcagctcgatctgaaccgaatgcctaaacctgcgaaaacggcaaaaaaatgtagtttggaccagcttgatgacgcctttcacccagagtggtttgttagtctgttcgagcagaagactgtgaaagggtggtggccttgtgttgccgaagaaggtgagaaaaagatcctcgctggcaaactggaaatgacattagaaatcgtggccgagtccgaacacgaagagagaccagctggtcagggcagagatgagccaaacatgaacccaaaacttgaagatccaagaagaccggatacgtcgtttctctggtttaccagcccctacaagaccatgaagtttattttgtggcgtcgctttagatgggccataattcttttcatcattcttttcatcctgttacttttccttgcaatctttatctacgcattccccaattacgcagccatgaagctcgtgaaaccattctcctag

SEQ ID NO: 138724 - RNA, 6243 nt, Artificial Sequence
  derived and/or modified sequence
augcugcggguguucauccucuaugcagaaaaugugcacacacccgauacagacauuucugaugcauauuguagugcgguguucgccggggugaagaaaagaaccaaaguuaucaaaaauuccguaaacccagucuggaacgaaggauuugagugggacuuaaagggcauuccgcuugaccaaggcagcgagcugcacgucgucgucaaggaucaugagacaaugggucgaaaucgauuccugggagaggcgaaagucccacugagggagguguuggcuaccccaagucuguccgcuagcuuuaacgcaccacuccuugauaccaaaaagcagcccacuggagcuucauuggugcuccaggugaguuauaccccucuccccggcgcagugccccuauuuccaccaccaaccccucuggagcccucucccacauugccagaucuggacgugguagcugacacuggcggggaggaggauacugaggaucagggccugacaggcgacgaggccgagccuuuucucgaccaaucagguggucccggcgcgcccaccacaccucguaagcugccuucacguccuccuccacacuacccagggaucaagagaaagcgcucggcacccacgucuagaaagcuccuguccgacaaaccccaggacuuucagauacguguacaagugauugaaggcaggcaacugccuggcgucaauauuaaaccagucgugaaggugacagcggcuggccagaccaaaagaacuagaauucacaagggcaacuccccccuauuuaaugagaccuuguucuuuaaucucuucgacucuccaggugagcuguucgaugagcccauuuucaucaccgucguugauucucggucuuuacguacagacgcguugcugggcgaguuucgcauggauguuggcacuauuuauagggagcccaggcacgcauaccucaggaaauggcuucuucucuccgacccggacgacuuuucagcaggagcucgcggguaucuaaagacuucccugugcguguuggggccaggagacgaggcaccccuagaaaggaaggauccauccgaagacaaggaggacaucgagucuaaccuccugcggccaacuggugucgcccuuaggggugcccauuucugccucaaggucuuuagggcugaagaucugccacagauggacgaugcggugauggauaacgugaaacaaauuuucggcuucgaauccaauaaaaaaaaucuuguggaccccuuuguggaggugucuuucgccgguaagaugcuaugcucaaagauccuggaaaaaaccgccaauccacaguggaaucagaauaucacguuaccagcaauguucccaucuaugugcgagaaaaugcgaauucgcaucaucgauugggauagacugacccauaaugauauuguggccaccaccuaucuuucaaugagcaaaauuucugccccaggaggcgaaaucgaggaggaaccggcaggggcagugaaaccaucgaaagccagugauuuagacgauuacuuaggcuuccuuccuacuuucggcccuuguuauaucaauuuauauggguccccgagggaguuuacugguuucccugaucccuacacggaacuuaacacuggaaagggugaaggcguggcauaccguggcagacugcuccugucucuggaaacgaaguugguggaacauuccgagcaaaagguggaggacuugcccgcggaugauauucuuaggguggaaaaauacuugagacgcagaaaguacaguuuguucgcggcuuucuacagcgcaacaauguuacaagacguggacgacgccauucaguucgagguaagcauagguaauuacgggaacaaauucgauaugaccugccucccgcuggccagcacgacccaauacagcagagccguguuugacggcugccacuacuauuaucuuccuuggggcaaugucaagccagugguuguacugagcuccuacugggaggauaucagucaccgaaucgagacacagaaucagcugcugggaauagcagaucgccuagaagcugggcuugagcaggugcaucucgcccuuaaggcacagugcagcacugaagaugucgauagccugguggcacagcugaccgacgaacuaaucgccgguugcagucaaccuuugggcgacauucaugaaacaccuagugcgacgcaccuggaccaguaccuguaccagcugcgaacgcaucaccugucccagaucacagaagcagcucuggcacucaagcuuggucauucagagcucccugcggcgcuggaacaggcagaggauuggcugcugcgccugcgagcauuggcugaggaaccccaaaauagccugccugacauaguuaucuggauguugcagggugacaagcgcguggccuaucaacgcgugcccgcacaucaagugcuguuuuccaggcgcggggcgaacuauugcggcaagaauugcggcaaacuacagaccaucuuuuuaaaauauccaauggaaaaggugccgggggcgcggaugcccguucagauucgcgugaagcucugguuuggccugucuguggacgagaaggaauuuaaucaauuugccgagggaaagcugucuguauuugccgagaccuaugaaaacgagaccaaacuggcccucguggguaauuggggcacaaccgggcugacguauccaaaauucagcgauguuaccggaaaaauaaagcuaccuaaagauucguucagacccuccgccgguuggacuugggccggagacugguuugugugccccgaaaaaacucugcugcaugauauggaugccgggcaucuuuccuucguagaagagguguucgaaaaucaaacgcggcuccccggggggcaguggauauauaugucagacaauuauacagacgugaacggugagaaagugcugccaaaggaugacaucgaauguccacucggauggaagugggaagacgaagagugguccaccgaccugaaccgggcuguagaugaacagggcugggaguacucaauuaccaucccaccagagcggaagccaaagcauugggucccagccgaaaagauguauuauacccaucggcgcaggagaugggugaggcugagacggagggaccugagccagauggaggcuuugaaaagacaccggcaggcugaggcugagggcgagggaugggaauacgcgucccuauuuggcuggaaauuccaucuugaauaccggaagaccgaugcguuccgcagacggagguggagaaggcggauggaaccguuagagaaaacaggcccugcggccgucuuugcccuugagggcgcacugggcggcgucauggacgacaaaucagaagauagcaugagugucaguacccugaguuuuggugugaacaggccaaccaucucauguaucuucgacuacggaaaccgguaucaucucagguguuacauguaccaggcacgagaucuggcagccauggacaaagauucauuuagugaccccuacgcaaucgucucguuccuacaccaaucccagaaaacgguuguagucaagaauacacuaaaccccacaugggaucagaccuugauuuucuacgagauagaaaucuuuggugagccugcaaccguggcugaacagccaccaagcauugugguugaacucuaugaucaugacaccuauggagcugacgaauucauggggcggugcauaugucagcccucccuggagagaaugccaagauuggccugguucccacucacccgcggcagccagcccagcggggaacuccuggcgaguuuugagcuaauccagcgcgagaaaccugccauucaucacauaccuggauuugaagugcaagagacuagccgaauccuugacgaauccgaggauacugaucuucccuauccaccaccucaaagggaggcgaacauuuauaugguuccacagaacaucaagccugcacuccagagaacugcuaucgaaauccucgccuggggacugcgcaacaugaaguccuaccaacuggcuaacauuucuucuccuucacuggucgucgaaugcggcggucagacaguccagagcugugucaucagaaaucugagaaaaaauccuaacuuugacaucuguacacucuucauggaagugaugcugccucgcgaagaguuguauuguccccccauuaccgugaaggugaucgacaaucgccaguucggacgcaggcccguaguuggucagugcacaauucggucucucgagaguuuccucugcgacccauacucugccgaauccccguccccucaaggcggccccgaugacguuagccuguugagcccuggcgaagauguccuaauugauauugacgauaaggaaccucugauaccuauucaagaggaggaguucauugacugguggaguaaguucuucgccucaauuggagagcgggaaaaaugcggcagcuaucuugaaaaggacuucgauacccugaagguauaugacacacagcucgaaaacgucgaggcauucgagggccugucugacuucuguaauacauucaaguuauauagggguaagacucaggaggagacggaagaccccucggucaucggugaauuuaaaggccucuuuaaaaucuauccccucccugaggacccagccaucccuaugccaccucgccaguuucaccagcuggccgcacagggcccccaggaaugucucgugcggaucuacaucguacgcgccuuuggccuacaaccgaaggacccaaacgggaaaugugacccauacauaaagauuaguauuggcaaaaagucugucagcgaccaagauaacuacauacccuguacccuggagccuguauucgggaagauguuugaguuaacaugcacacugcccuuagaaaaagaucucaaaauuacucucuacgauuaugaccugcucucuaaggacgagaaaauaggagaaacagucguggaucuggagaacagacuguugagcaaguucggcgcuagauguggguugccccagaccuauugcgucuccgggcccaaccaauggcgcgaucaauugaggcccagccaguuauuacaucuguucugucagcagcaccgggugaaggcccccguauaccgaacugacagagugauguuucaggauaaagaguacucaauugaagaaaucgaggcugguaggauccccaacccucaucucggacccguagaagagaggcuggcuuuacacguucugcagcagcagggauuggucccggagcacguugagaguagaccucuauacagcccacuccagccagacaucgagcagggaaaacuccagauguggguggaccuuuucccuaaagcccucggccgcccaggccccccguucaacaucaccccacgaagggcucggcgauuuuuucucaggugcaucaucuggaacacucgggacgucauucuugaugaucugagccugaccggcgaaaagauguccgauaucuaugucaaaggcuggaugauuggcuuugaggaacacaagcagaaaacugauguucacuaucggucucugggcggcgaaggaaauuucaauuggcgguucaucuucccguuugauuaccucccugccgagcaggucuguaccauagcaaagaaagaugccuucuggcgucuagacaagacagagaguaagauccccgcaagaguuguguuucagauaugggacaacgacaaauuuuccuuugacgacuucuuagggucccuccagcuggaucuaaaucguaugccaaagcccgcgaagacugccaaaaaguguagucuggaccagcucgacgaugccuuccaccccgaaugguuugugagccucuuugagcagaagacagugaaggguugguggcccuguguugcagaagaaggcgagaagaaaauacuggcaggcaaacuggaaaugacacuggaaaucguggccgaaucagaacacgaagagcgaccugcuggacaagggcgagaugaacccaauaugaaccccaagcuggaagauccacgcagaccugauaccucauuucugugguuuacuucuccuuauaagacuaugaaauucauccuguggcgaagauuuagaugggcaaucauccucuucaucauccuguuuaucuuacugcuguuccuugcuaucuuuauuuacgcuuucccuaauuacgcugccaugaaauuagucaaacccuucagcuag

SEQ ID NO: 138725 - RNA, 6243 nt, Artificial Sequence
  derived and/or modified sequence
augcugcguguguuuauccuguaugccgaaaacgugcacacaccagacacggacaucucugacgcauacuguucagcaguuuucgcuggggugaagaagcgcaccaagguuaucaaaaacagcgugaauccaguguggaacgaaggauuugaaugggaucuaaagggaaucccccuagaccaaggaagugaacugcauguugucgucaaggaccaugagaccauggguagaaaucgguuccugggagaagccaaggucccucuccgcgaaguucucgcuacccccucucugagugcuagcuuuaacgccccccugcuagacaccaagaagcaaccaacuggcgcaucacuuguuuugcaggugagcuacacaccccuuccaggggcugucccacucuucccacccccgaccccucuagaacccucucccacccucccagaucuugaugucguggccgacacgggcggggaagaagauaccgaagaccaaggccuuacuggagaugaggcugaacccuucuuagaccaaagcggugggcccggagccccuacaacgccucgcaaacugccaagcagacccccaccucacuacccagguauuaagcgcaagcgauccgcaccaaccucccgcaaguugcuuuccgauaagccccaagauuuucagaucagagugcagguaaucgagggccgccagcuaccaggcguuaacaucaaacccgucguuaaggugaccgcagccgggcagacaaaacgcacacgaauccauaagggcaacucaccccuguuuaacgagacccuguucuuuaaccuuuuugacucuccuggagaacuuuuugacgagccaaucuucaucacuguaguggacagcaggucccugagaacugacgcucugcuaggggaauuucguauggauguuggaacaauuuauagagagcccagacacgcauaccuccgcaaguggcuguugcucagcgaccccgacgacuuuuccgcuggcgcaaggggguaccugaagacuagccuuuguguacuuggaccuggugacgaggcaccccucgagcguaaagauccuuccgaagacaaagaggacauagagucgaaucugcugagacccacaggaguugcucucaggggggcucacuucugucugaaaguguuuagagcugaagauuuaccgcagauggacgacgccgucauggacaacguuaaacagauuuuuggcuucgagucaaauaagaagaauuuggucgauccguucguggaggucucguuugccggaaagaugcuaugcucaaagauacuggaaaaaacagcuaacccucaguggaaucaaaauaucacuuuaccggcuauguucccuucaaugugugaaaaaaugcgaauacggauaaucgauugggauagacuuacccacaaugauaucgucgcuacaaccuauuuaucaauguccaagauaucugcgcccggaggggagaucgaggaggagccugccggcgccguuaaaccaaguaaagccagcgauuuggaugauuaccuuggguuucugccuaccuucgggccauguuauaucaacuuguaugguuccccuagagaauucacagguuucccugauccauauacugagcugaacacaggcaaaggcgaaggugucgcuuacagaggccggcugcugcucucccuggaaacuaaguuaguagagcauagugagcaaaaagucgaagacuugccagccgaugauauccugcgaguggagaaauaccuaagacggagaaaauauucccuguuugccgccuucuauagcgcuacgauguuacaggacguagacgacgcaauucaauucgaagugaguauuggcaacuauggaaauaaguuugauaugaccugccuaccacucgccucaacgacacaguacuccagggccguuuucgacggaugucauuauuauuaucuccccuggggaaacguuaaaccagucguugugcuuucuaguuauugggaagauaucucccacagaaucgaaacucaaaaucagcugcuggggaucgccgaucgccuugaagccggccucgaacagguccaucuggcacucaaagcccaguguagcaccgaggacguggauucgcugguggcccagcugacugaugaacugauagccgguugcagccaaccucugggcgacauucaugaaaccccaucugccacacacuuggaccaguauuuauaccaauuaaggacacaccaccucucccagauuaccgaagcugcccuggcccugaaauuaggccauagcgagcucccagcugccuuagaacaggccgaagacuggcucuugagacuccgggcccucgccgaggagccacagaacagccugccagacauugugauauggaugcuacaaggagauaagcggguggcuuaccaacgaguuccagcucaccaaguguuguuuaguaggcgaggcgccaauuacuguggaaagaacuguggaaagcuccaaacaaucuucuugaaauaucccauggagaaagugccuggugcuaggaugccgguucaaauaagggugaaacuuugguuuggguugucagucgacgaaaaggaauucaaccaauuugccgaagguaagcuuucaguguuugcagagaccuacgagaaugagaccaaacuugcucuaguuggaaauugggguacuacaggccugacauaccccaaauuuagcgaugugacaggaaaaaucaaacuaccuaaagacagcuuucgccccagcgcugguuggacaugggccggcgauugguuugugugcccagagaagacccugcuccaugauauggacgcagggcaccucagcuuugucgaagaaguguucgagaaucagaccagauuacccggaggacaauggaucuacaugucagauaacuauacggaugucaauggcgaaaagguuuuaccaaaagaugacauugagugcccacugggauggaagugggaggacgaggaauggucuacugaucucaauagagcuguggacgagcaagguugggaguacagcauuacaaucccccccgaacggaagccgaagcauuggguaccagcagagaagauguacuauacccaccggaggcggcggugggucaggcuuagacgcagggaucugagccagauggaagcacuaaaaaggcaccgucaagccgaggcagagggagaaggaugggaguaugcgagccuguucggcuggaaguuucaccuggaguauaggaaaacagaugcguucagacgacggagauggcggagacggauggaaccccuugaaaagaccggacccgcagcaguuuuugcucucgagggugcccugggaggcgucauggacgacaagagcgaggauagcaugagcguaagcacccugaguuucggaguuaaccggcccaccaucucuugcauuuuugacuacggcaauagguaccaccugagauguuauauguaccaggcucgagacuuagcagccauggauaaagauuccuucuccgacccauaugccaucgucuccuuucuccaccaaucgcagaagaccguggucgugaagaauacccucaacccaaccugggaucagacguugaucuuuuacgaaauugagauauucggggaaccagccacuguagcggaacaaccuccuucuaucguuguggaauuauacgaucaugacacuuauggcgccgaugaauuuaugggacgcuguauuugccagcccucuuuagaaagaaugccuagacuagcaugguuuccucuuaccagggguagccaacccuccggcgaacuucuggccucuuuugagcugauucagcgggagaagccggccauacaucacaucccaggcuuugaaguucaggagaccagcagaauucuggacgaaagugaagacacagaccuaccuuaccccccaccucaaagagaggccaauaucuacauggugccacaaaacauuaagccugcucugcagcggaccgcuauugagauacuagcguggggccuccguaauaugaagagcuaucaacuugcaaauaucuccucccccagcuuagucgucgaaugcggaggccaaacugugcaguccugcgugauccggaaccucaggaaaaacccuaacuucgauauuugcacauuguucauggaaguuaugcugccucgagaagaacuguauugucccccuauuacaguuaaagugaucgacaacagacaguucgguaggaggccagugguaggccaguguaccauacgcagccuugaaucauuccucugugacccuuacuccgccgagucucccagcccucagggcggccccgacgacgugagccugcuaaguccuggugaagauguauugaucgauaucgaugacaaagaaccacucaucccuauccaggaggaagaauucaucgauuggugguccaaauucuucgccucaaucggagagcgcgaaaaaugugggagcuaccuugaaaaagauuuugauacucucaaaguguaugauacacagcuagagaacguggaggcuuucgagggacuuucagauuuuuguaacacguucaagcuguaucgcggaaagacucaggaagagacugaagaccccagcgucauuggcgaguucaaagggcuguuuaaaauuuacccuuugcccgaggacccagcuauaccuaugcccccuagacaguuccaccaauuagccgcacagggcccgcaagagugccuaguaagaauauacaucgugagagccuucggacuacagccaaaagaccccaacggaaagugugaccccuacauuaagaucuccauaggaaagaaaucuguauccgaccaagacaacuauauucccugcacucuggagcccgucuucggcaaaauguucgaacucaccuguacccucccuuuggaaaaagaucugaagaucacucucuaugacuaugauuugcucucaaaggaugagaaaaucggagagacggugguugaucuugaaaaucgcuugcucucaaaguuuggagcacgcugcggacuaccccagacauacugcgucagcggcccaaaucaauggcgggaccaauugcgacccucacagcuccuucaccuguuuugccagcaacacagagucaaggcuccaguguaucguaccgacaggguuauguuucaggauaaggaauauucaauugaagaaauugaagcuggccgcauuccaaacccccaucucgguccggucgaagaacgauuagcacuccauguccuccaacaacaaggccuggugcccgaacauguagaaucucgaccccucuacaguccacuucaaccugauauagaacagggcaaacuucagauguggguugaccuguuuccgaaggcccucggccggccuggaccuccuuuuaacauaaccccaagacgagcccgccgguucuuucuacguuguaucauuuggaacacaagggacgugauauuggacgaccuguccuuaacuggagagaagaugagugauauuuacgugaaaggauggaugaucggauucgaggaacauaaacagaaaacugacgugcauuaucgcaguuuagggggugaaggcaacuuuaacuggcgcuuuauauuuccuuuugacuaucugcccgcugagcaaguauguacaauagccaaaaaggaugccuucuggaggcuggacaaaaccgaaucuaaaauucccgcgcgggugguguuucaaauaugggauaaugacaaauucucauucgaugauuuucuaggaucuuugcagcucgaucugaaccgaaugccuaaaccugcgaaaacggcaaaaaaauguaguuuggaccagcuugaugacgccuuucacccagagugguuuguuagucuguucgagcagaagacugugaaagggugguggccuuguguugccgaagaaggugagaaaaagauccucgcuggcaaacuggaaaugacauuagaaaucguggccgaguccgaacacgaagagagaccagcuggucagggcagagaugagccaaacaugaacccaaaacuugaagauccaagaagaccggauacgucguuucucugguuuaccagccccuacaagaccaugaaguuuauuuuguggcgucgcuuuagaugggccauaauucuuuucaucauucuuuucauccuguuacuuuuccuugcaaucuuuaucuacgcauuccccaauuacgcagccaugaagcucgugaaaccauucuccuag

SEQ ID NO: 138726 - protein, 3830 aa, Artificial Sequence
  derived and/or modified sequence
MAFVATQGATVVDQTTLMKKYLQFVAALTDVNTPDETKLKMMQEVSENFENVTSSPQYSTFLEHIIPRFLTFLQDGEVQFLQEKPAQQLRKLVLEIIHRIPTNEHLRPHTKNVLSVMFRFLETENEENVLICLRIIIELHKQFRPPITQEIHHFLDFVKQIYKELPKVVNRYFENPQVIPENTVPPPEMVGMITTIAVKVNPEREDSETRTHSIIPRGSLSLKVLAELPIIVVLMYQLYKLNIHNVVAEFVPLIMNTIAIQVSAQARQHKLYNKELYADFIAAQIKTLSFLAYIIRIYQELVTKYSQQMVKGMLQLLSNCPAETAHLRKELLIAAKHILTTELRNQFIPCMDKLFDESILIGSGYTARETLRPLAYSTLADLVHHVRQHLPLSDLSLAVQLFAKNIDDESLPSSIQTMSCKLLLNLVDCIRSKSEQESGNGRDVLMRMLEVFVLKFHTIARYQLSAIFKKCKPQSELGAVEAALPGVPTAPAAPGPAPSPAPVPAPPPPPPPPPPATPVTPAPVPPFEKQGEKDKEDKQTFQVTDCRSLVKTLVCGVKTITWGITSCKAPGEAQFIPNKQLQPKETQIYIKLVKYAMQALDIYQVQIAGNGQTYIRVANCQTVRMKEEKEVLEHFAGVFTMMNPLTFKEIFQTTVPYMVERISKNYALQIVANSFLANPTTSALFATILVEYLLDRLPEMGSNVELSNLYLKLFKLVFGSVSLFAAENEQMLKPHLHKIVNSSMELAQTAKEPYNYFLLLRALFRSIGGGSHDLLYQEFLPLLPNLLQGLNMLQSGLHKQHMKDLFVELCLTVPVRLSSLLPYLPMLMDPLVSALNGSQTLVSQGLRTLELCVDNLQPDFLYDHIQPVRAELMQALWRTLRNPADSISHVAYRVLGKFGGSNRKMLKESQKLHYVVTEVQGPSITVEFSDCKASLQLPMEKAIETALDCLKSANTEPYYRRQAWEVIKCFLVAMMSLEDNKHALYQLLAHPNFTEKTIPNVIISHRYKAQDTPARKTFEQALTGAFMSAVIKDLRPSALPFVASLIRHYTMVAVAQQCGPFLLPCYQVGSQPSTAMFHSEENGSKGMDPLVLIDAIAICMAYEEKELCKIGEVALAVIFDVASIILGSKERACQLPLFSYIVERLCACCYEQAWYAKLGGVVSIKFLMERLPLTWVLQNQQTFLKALLFVMMDLTGEVSNGAVAMAKTTLEQLLMRCATPLKDEERAEEIVAAQEKSFHHVTHDLVREVTSPNSTVRKQAMHSLQVLAQVTGKSVTVIMEPHKEVLQDMVPPKKHLLRHQPANAQIGLMEGNTFCTTLQPRLFTMDLNVVEHKVFYTELLNLCEAEDSALTKLPCYKSLPSLVPLRIAALNALAACNYLPQSREKIIAALFKALNSTNSELQEAGEACMRKFLEGATIEVDQIHTHMRPLLMMLGDYRSLTLNVVNRLTSVTRLFPNSFNDKFCDQMMQHLRKWMEVVVITHKGGQRSDGNEMKICSAIINLFHLIPAAPQTLVKPLLEVVMKTERAMLIEAGSPFREPLIKFLTRHPSQTVELFMMEATLNDPQWSRMFMSFLKHKDARPLRDVLAANPNRFITLLLPGGAQTAVRPGSPSTSTMRLDLQFQAIKIISIIVKNDDSWLASQHSLVSQLRRVWVSENFQERHRKENMAATNWKEPKLLAYCLLNYCKRNYGDIELLFQLLRAFTGRFLCNMTFLKEYMEEEIPKNYSIAQKRALFFRFVDFNDPNFGDELKAKVLQHILNPAFLYSFEKGEGEQLLGPPNPEGDNPESITSVFITKVLDPEKQADMLDSLRIYLLQYATLLVEHAPHHIHDNNKNRNSKLRRLMTFAWPCLLSKACVDPACKYSGHLLLAHIIAKFAIHKKIVLQVFHSLLKAHAMEARAIVRQAMAILTPAVPARMEDGHQMLTHWTRKIIVEEGHTVPQLVHILHLIVQHFKVYYPVRHHLVQHMVSAMQRLGFTPSVTIEQRRLAVDLSEVVIKWELQRIKDQQPDSDMDPNSSGEGVNSVSSSIKRGLSVDSAQEVKRFRTATGAISAVFGRSQSLPGADSLLAKPIDKQHTDTVVNFLIRVACQVNDNTNTAGSPGEVLSRRCVNLLKTALRPDMWPKSELKLQWFDKLLMTVEQPNQVNYGNICTGLEVLSFLLTVLQSPAILSSFKPLQRGIAACMTCGNTKVLRAVHSLLSRLMSIFPTEPSTSSVASKYEELECLYAAVGKVIYEGLTNYEKATNANPSQLFGTLMILKSACSNNPSYIDRLISVFMRSLQKMVREHLNPQAASGSTEATSGTSELVMLSLELVKTRLAVMSMEMRKNFIQAILTSLIEKSPDAKILRAVVKIVEEWVKNNSPMAANQTPTLREKSILLVKMMTYIEKRFPEDLELNAQFLDLVNYVYRDETLSGSELTAKLEPAFLSGLRCAQPLIRAKFFEVFDNSMKRRVYERLLYVTCSQNWEAMGNHFWIKQCIELLLAVCEKSTPIGTSCQGAMLPSITNVINLADSHDRAAFAMVTHVKQEPRERENSESKEEDVEIDIELAPGDQTSTPKTKELSEKDIGNQLHMLTNRHDKFLDTLREVKTGALLSAFVQLCHISTTLAEKTWVQLFPRLWKILSDRQQHALAGEISPFLCSGSHQVQRDCQPSALNCFVEAMSQCVPPIPIRPCVLKYLGKTHNLWFRSTLMLEHQAFEKGLSLQIKPKQTTEFYEQESITPPQQEILDSLAELYSLLQEEDMWAGLWQKRCKYSETATAIAYEQHGFFEQAQESYEKAMDKAKKEHERSNASPAIFPEYQLWEDHWIRCSKELNQWEALTEYGQSKGHINPYLVLECAWRVSNWTAMKEALVQVEVSCPKEMAWKVNMYRGYLAICHPEEQQLSFIERLVEMASSLAIREWRRLPHVVSHVHTPLLQAAQQIIELQEAAQINAGLQPTNLGRNNSLHDMKTVVKTWRNRLPIVSDDLSHWSSIFMWRQHHYQAIVTAYENSSQHDPSSNNAMLGVHASASAIIQYGKIARKQGLVNVALDILSRIHTIPTVPIVDCFQKIRQQVKCYLQLAGVMGKNECMQGLEVIESTNLKYFTKEMTAEFYALKGMFLAQINKSEEANKAFSAAVQMHDVLVKAWAMWGDYLENIFVKERQLHLGVSAITCYLHACRHQNESKSRKYLAKVLWLLSFDDDKNTLADAVDKYCIGVPPIQWLAWIPQLLTCLVGSEGKLLLNLISQVGRVYPQAVYFPIRTLYLTLKIEQRERYKSDPGPIRATAPMWRCSRIMHMQRELHPTLLSSLEGIVDQMVWFRENWHEEVLRQLQQGLAKCYSVAFEKSGAVSDAKITPHTLNFVKKLVSTFGVGLENVSNVSTMFSSAASESLARRAQATAQDPVFQKLKGQFTTDFDFSVPGSMKLHNLISKLKKWIKILEAKTKQLPKFFLIEEKCRFLSNFSAQTAEVEIPGEFLMPKPTHYYIKIARFMPRVEIVQKHNTAARRLYIRGHNGKIYPYLVMNDACLTESRREERVLQLLRLLNPCLEKRKETTKRHLFFTVPRVVAVSPQMRLVEDNPSSLSLVEIYKQRCAKKGIEHDNPISRYYDRLATVQARGTQASHQVLRDILKEVQSNMVPRSMLKEWALHTFPNATDYWTFRKMFTIQLALIGFAEFVLHLNRLNPEMLQIAQDTGKLNVAYFRFDINDATGDLDANRPVPFRLTPNISEFLTTIGVSGPLTASMIAVARCFAQPNFKVDGILKTVLRDEIIAWHKKTQEDTSSPLSAAGQPENMDSQQLVSLVQKAVTAIMTRLHNLAQFEGGESKVNTLVAAANSLDNLCRMDPAWHPWL

SEQ ID NO: 138727 - protein, 71 aa, Artificial Sequence
  derived and/or modified sequence
MAFVATQGATVVDQTTLMKKYLQFVAALTDVNTPDETKLKMMQEVSENFENVTSSPQYSTFLEHIIPRFLT

SEQ ID NO: 138728 - DNA, 11493 bp, Artificial Sequence
  derived and/or modified sequence
atggccttcgtggccacccagggcgccaccgtggtggaccagaccaccctgatgaagaagtacctgcagttcgtggccgccctgaccgacgtgaacacccccgacgagaccaagctgaagatgatgcaggaggtgagcgagaacttcgagaacgtgaccagcagcccccagtacagcaccttcctggagcacatcatccccagattcctgaccttcctgcaggacggcgaggtgcagttcctgcaggagaagcccgcccagcagctgagaaagctggtgctggagatcatccacagaatccccaccaacgagcacctgagaccccacaccaagaacgtgctgagcgtgatgttcagattcctggagaccgagaacgaggagaacgtgctgatctgcctgagaatcatcatcgagctgcacaagcagttcagaccccccatcacccaggagatccaccacttcctggacttcgtgaagcagatctacaaggagctgcccaaggtggtgaacagatacttcgagaacccccaggtgatccccgagaacaccgtgcccccccccgagatggtgggcatgatcaccaccatcgccgtgaaggtgaaccccgagagagaggacagcgagaccagaacccacagcatcatccccagaggcagcctgagcctgaaggtgctggccgagctgcccatcatcgtggtgctgatgtaccagctgtacaagctgaacatccacaacgtggtggccgagttcgtgcccctgatcatgaacaccatcgccatccaggtgagcgcccaggccagacagcacaagctgtacaacaaggagctgtacgccgacttcatcgccgcccagatcaagaccctgagcttcctggcctacatcatcagaatctaccaggagctggtgaccaagtacagccagcagatggtgaagggcatgctgcagctgctgagcaactgccccgccgagaccgcccacctgagaaaggagctgctgatcgccgccaagcacatcctgaccaccgagctgagaaaccagttcatcccctgcatggacaagctgttcgacgagagcatcctgatcggcagcggctacaccgccagagagaccctgagacccctggcctacagcaccctggccgacctggtgcaccacgtgagacagcacctgcccctgagcgacctgagcctggccgtgcagctgttcgccaagaacatcgacgacgagagcctgcccagcagcatccagaccatgagctgcaagctgctgctgaacctggtggactgcatcagaagcaagagcgagcaggagagcggcaacggcagagacgtgctgatgagaatgctggaggtgttcgtgctgaagttccacaccatcgccagataccagctgagcgccatcttcaagaagtgcaagccccagagcgagctgggcgccgtggaggccgccctgcccggcgtgcccaccgcccccgccgcccccggccccgcccccagccccgcccccgtgcccgccccccccccccccccccccccccccccccccgccacccccgtgacccccgcccccgtgccccccttcgagaagcagggcgagaaggacaaggaggacaagcagaccttccaggtgaccgactgcagaagcctggtgaagaccctggtgtgcggcgtgaagaccatcacctggggcatcaccagctgcaaggcccccggcgaggcccagttcatccccaacaagcagctgcagcccaaggagacccagatctacatcaagctggtgaagtacgccatgcaggccctggacatctaccaggtgcagatcgccggcaacggccagacctacatcagagtggccaactgccagaccgtgagaatgaaggaggagaaggaggtgctggagcacttcgccggcgtgttcaccatgatgaaccccctgaccttcaaggagatcttccagaccaccgtgccctacatggtggagagaatcagcaagaactacgccctgcagatcgtggccaacagcttcctggccaaccccaccaccagcgccctgttcgccaccatcctggtggagtacctgctggacagactgcccgagatgggcagcaacgtggagctgagcaacctgtacctgaagctgttcaagctggtgttcggcagcgtgagcctgttcgccgccgagaacgagcagatgctgaagccccacctgcacaagatcgtgaacagcagcatggagctggcccagaccgccaaggagccctacaactacttcctgctgctgagagccctgttcagaagcatcggcggcggcagccacgacctgctgtaccaggagttcctgcccctgctgcccaacctgctgcagggcctgaacatgctgcagagcggcctgcacaagcagcacatgaaggacctgttcgtggagctgtgcctgaccgtgcccgtgagactgagcagcctgctgccctacctgcccatgctgatggaccccctggtgagcgccctgaacggcagccagaccctggtgagccagggcctgagaaccctggagctgtgcgtggacaacctgcagcccgacttcctgtacgaccacatccagcccgtgagagccgagctgatgcaggccctgtggagaaccctgagaaaccccgccgacagcatcagccacgtggcctacagagtgctgggcaagttcggcggcagcaacagaaagatgctgaaggagagccagaagctgcactacgtggtgaccgaggtgcagggccccagcatcaccgtggagttcagcgactgcaaggccagcctgcagctgcccatggagaaggccatcgagaccgccctggactgcctgaagagcgccaacaccgagccctactacagaagacaggcctgggaggtgatcaagtgcttcctggtggccatgatgagcctggaggacaacaagcacgccctgtaccagctgctggcccaccccaacttcaccgagaagaccatccccaacgtgatcatcagccacagatacaaggcccaggacacccccgccagaaagaccttcgagcaggccctgaccggcgccttcatgagcgccgtgatcaaggacctgagacccagcgccctgcccttcgtggccagcctgatcagacactacaccatggtggccgtggcccagcagtgcggccccttcctgctgccctgctaccaggtgggcagccagcccagcaccgccatgttccacagcgaggagaacggcagcaagggcatggaccccctggtgctgatcgacgccatcgccatctgcatggcctacgaggagaaggagctgtgcaagatcggcgaggtggccctggccgtgatcttcgacgtggccagcatcatcctgggcagcaaggagagagcctgccagctgcccctgttcagctacatcgtggagagactgtgcgcctgctgctacgagcaggcctggtacgccaagctgggcggcgtggtgagcatcaagttcctgatggagagactgcccctgacctgggtgctgcagaaccagcagaccttcctgaaggccctgctgttcgtgatgatggacctgaccggcgaggtgagcaacggcgccgtggccatggccaagaccaccctggagcagctgctgatgagatgcgccacccccctgaaggacgaggagagagccgaggagatcgtggccgcccaggagaagagcttccaccacgtgacccacgacctggtgagagaggtgaccagccccaacagcaccgtgagaaagcaggccatgcacagcctgcaggtgctggcccaggtgaccggcaagagcgtgaccgtgatcatggagccccacaaggaggtgctgcaggacatggtgccccccaagaagcacctgctgagacaccagcccgccaacgcccagatcggcctgatggagggcaacaccttctgcaccaccctgcagcccagactgttcaccatggacctgaacgtggtggagcacaaggtgttctacaccgagctgctgaacctgtgcgaggccgaggacagcgccctgaccaagctgccctgctacaagagcctgcccagcctggtgcccctgagaatcgccgccctgaacgccctggccgcctgcaactacctgccccagagcagagagaagatcatcgccgccctgttcaaggccctgaacagcaccaacagcgagctgcaggaggccggcgaggcctgcatgagaaagttcctggagggcgccaccatcgaggtggaccagatccacacccacatgagacccctgctgatgatgctgggcgactacagaagcctgaccctgaacgtggtgaacagactgaccagcgtgaccagactgttccccaacagcttcaacgacaagttctgcgaccagatgatgcagcacctgagaaagtggatggaggtggtggtgatcacccacaagggcggccagagaagcgacggcaacgagatgaagatctgcagcgccatcatcaacctgttccacctgatccccgccgccccccagaccctggtgaagcccctgctggaggtggtgatgaagaccgagagagccatgctgatcgaggccggcagccccttcagagagcccctgatcaagttcctgaccagacaccccagccagaccgtggagctgttcatgatggaggccaccctgaacgacccccagtggagcagaatgttcatgagcttcctgaagcacaaggacgccagacccctgagagacgtgctggccgccaaccccaacagattcatcaccctgctgctgcccggcggcgcccagaccgccgtgagacccggcagccccagcaccagcaccatgagactggacctgcagttccaggccatcaagatcatcagcatcatcgtgaagaacgacgacagctggctggccagccagcacagcctggtgagccagctgagaagagtgtgggtgagcgagaacttccaggagagacacagaaaggagaacatggccgccaccaactggaaggagcccaagctgctggcctactgcctgctgaactactgcaagagaaactacggcgacatcgagctgctgttccagctgctgagagccttcaccggcagattcctgtgcaacatgaccttcctgaaggagtacatggaggaggagatccccaagaactacagcatcgcccagaagagagccctgttcttcagattcgtggacttcaacgaccccaacttcggcgacgagctgaaggccaaggtgctgcagcacatcctgaaccccgccttcctgtacagcttcgagaagggcgagggcgagcagctgctgggcccccccaaccccgagggcgacaaccccgagagcatcaccagcgtgttcatcaccaaggtgctggaccccgagaagcaggccgacatgctggacagcctgagaatctacctgctgcagtacgccaccctgctggtggagcacgccccccaccacatccacgacaacaacaagaacagaaacagcaagctgagaagactgatgaccttcgcctggccctgcctgctgagcaaggcctgcgtggaccccgcctgcaagtacagcggccacctgctgctggcccacatcatcgccaagttcgccatccacaagaagatcgtgctgcaggtgttccacagcctgctgaaggcccacgccatggaggccagagccatcgtgagacaggccatggccatcctgacccccgccgtgcccgccagaatggaggacggccaccagatgctgacccactggaccagaaagatcatcgtggaggagggccacaccgtgccccagctggtgcacatcctgcacctgatcgtgcagcacttcaaggtgtactaccccgtgagacaccacctggtgcagcacatggtgagcgccatgcagagactgggcttcacccccagcgtgaccatcgagcagagaagactggccgtggacctgagcgaggtggtgatcaagtgggagctgcagagaatcaaggaccagcagcccgacagcgacatggaccccaacagcagcggcgagggcgtgaacagcgtgagcagcagcatcaagagaggcctgagcgtggacagcgcccaggaggtgaagagattcagaaccgccaccggcgccatcagcgccgtgttcggcagaagccagagcctgcccggcgccgacagcctgctggccaagcccatcgacaagcagcacaccgacaccgtggtgaacttcctgatcagagtggcctgccaggtgaacgacaacaccaacaccgccggcagccccggcgaggtgctgagcagaagatgcgtgaacctgctgaagaccgccctgagacccgacatgtggcccaagagcgagctgaagctgcagtggttcgacaagctgctgatgaccgtggagcagcccaaccaggtgaactacggcaacatctgcaccggcctggaggtgctgagcttcctgctgaccgtgctgcagagccccgccatcctgagcagcttcaagcccctgcagagaggcatcgccgcctgcatgacctgcggcaacaccaaggtgctgagagccgtgcacagcctgctgagcagactgatgagcatcttccccaccgagcccagcaccagcagcgtggccagcaagtacgaggagctggagtgcctgtacgccgccgtgggcaaggtgatctacgagggcctgaccaactacgagaaggccaccaacgccaaccccagccagctgttcggcaccctgatgatcctgaagagcgcctgcagcaacaaccccagctacatcgacagactgatcagcgtgttcatgagaagcctgcagaagatggtgagagagcacctgaacccccaggccgccagcggcagcaccgaggccaccagcggcaccagcgagctggtgatgctgagcctggagctggtgaagaccagactggccgtgatgagcatggagatgagaaagaacttcatccaggccatcctgaccagcctgatcgagaagagccccgacgccaagatcctgagagccgtggtgaagatcgtggaggagtgggtgaagaacaacagccccatggccgccaaccagacccccaccctgagagagaagagcatcctgctggtgaagatgatgacctacatcgagaagagattccccgaggacctggagctgaacgcccagttcctggacctggtgaactacgtgtacagagacgagaccctgagcggcagcgagctgaccgccaagctggagcccgccttcctgagcggcctgagatgcgcccagcccctgatcagagccaagttcttcgaggtgttcgacaacagcatgaagagaagagtgtacgagagactgctgtacgtgacctgcagccagaactgggaggccatgggcaaccacttctggatcaagcagtgcatcgagctgctgctggccgtgtgcgagaagagcacccccatcggcaccagctgccagggcgccatgctgcccagcatcaccaacgtgatcaacctggccgacagccacgacagagccgccttcgccatggtgacccacgtgaagcaggagcccagagagagagagaacagcgagagcaaggaggaggacgtggagatcgacatcgagctggcccccggcgaccagaccagcacccccaagaccaaggagctgagcgagaaggacatcggcaaccagctgcacatgctgaccaacagacacgacaagttcctggacaccctgagagaggtgaagaccggcgccctgctgagcgccttcgtgcagctgtgccacatcagcaccaccctggccgagaagacctgggtgcagctgttccccagactgtggaagatcctgagcgacagacagcagcacgccctggccggcgagatcagccccttcctgtgcagcggcagccaccaggtgcagagagactgccagcccagcgccctgaactgcttcgtggaggccatgagccagtgcgtgccccccatccccatcagaccctgcgtgctgaagtacctgggcaagacccacaacctgtggttcagaagcaccctgatgctggagcaccaggccttcgagaagggcctgagcctgcagatcaagcccaagcagaccaccgagttctacgagcaggagagcatcacccccccccagcaggagatcctggacagcctggccgagctgtacagcctgctgcaggaggaggacatgtgggccggcctgtggcagaagagatgcaagtacagcgagaccgccaccgccatcgcctacgagcagcacggcttcttcgagcaggcccaggagagctacgagaaggccatggacaaggccaagaaggagcacgagagaagcaacgccagccccgccatcttccccgagtaccagctgtgggaggaccactggatcagatgcagcaaggagctgaaccagtgggaggccctgaccgagtacggccagagcaagggccacatcaacccctacctggtgctggagtgcgcctggagagtgagcaactggaccgccatgaaggaggccctggtgcaggtggaggtgagctgccccaaggagatggcctggaaggtgaacatgtacagaggctacctggccatctgccaccccgaggagcagcagctgagcttcatcgagagactggtggagatggccagcagcctggccatcagagagtggagaagactgccccacgtggtgagccacgtgcacacccccctgctgcaggccgcccagcagatcatcgagctgcaggaggccgcccagatcaacgccggcctgcagcccaccaacctgggcagaaacaacagcctgcacgacatgaagaccgtggtgaagacctggagaaacagactgcccatcgtgagcgacgacctgagccactggagcagcatcttcatgtggagacagcaccactaccaggccatcgtgaccgcctacgagaacagcagccagcacgaccccagcagcaacaacgccatgctgggcgtgcacgccagcgccagcgccatcatccagtacggcaagatcgccagaaagcagggcctggtgaacgtggccctggacatcctgagcagaatccacaccatccccaccgtgcccatcgtggactgcttccagaagatcagacagcaggtgaagtgctacctgcagctggccggcgtgatgggcaagaacgagtgcatgcagggcctggaggtgatcgagagcaccaacctgaagtacttcaccaaggagatgaccgccgagttctacgccctgaagggcatgttcctggcccagatcaacaagagcgaggaggccaacaaggccttcagcgccgccgtgcagatgcacgacgtgctggtgaaggcctgggccatgtggggcgactacctggagaacatcttcgtgaaggagagacagctgcacctgggcgtgagcgccatcacctgctacctgcacgcctgcagacaccagaacgagagcaagagcagaaagtacctggccaaggtgctgtggctgctgagcttcgacgacgacaagaacaccctggccgacgccgtggacaagtactgcatcggcgtgccccccatccagtggctggcctggatcccccagctgctgacctgcctggtgggcagcgagggcaagctgctgctgaacctgatcagccaggtgggcagagtgtacccccaggccgtgtacttccccatcagaaccctgtacctgaccctgaagatcgagcagagagagagatacaagagcgaccccggccccatcagagccaccgcccccatgtggagatgcagcagaatcatgcacatgcagagagagctgcaccccaccctgctgagcagcctggagggcatcgtggaccagatggtgtggttcagagagaactggcacgaggaggtgctgagacagctgcagcagggcctggccaagtgctacagcgtggccttcgagaagagcggcgccgtgagcgacgccaagatcaccccccacaccctgaacttcgtgaagaagctggtgagcaccttcggcgtgggcctggagaacgtgagcaacgtgagcaccatgttcagcagcgccgccagcgagagcctggccagaagagcccaggccaccgcccaggaccccgtgttccagaagctgaagggccagttcaccaccgacttcgacttcagcgtgcccggcagcatgaagctgcacaacctgatcagcaagctgaagaagtggatcaagatcctggaggccaagaccaagcagctgcccaagttcttcctgatcgaggagaagtgcagattcctgagcaacttcagcgcccagaccgccgaggtggagatccccggcgagttcctgatgcccaagcccacccactactacatcaagatcgccagattcatgcccagagtggagatcgtgcagaagcacaacaccgccgccagaagactgtacatcagaggccacaacggcaagatctacccctacctggtgatgaacgacgcctgcctgaccgagagcagaagagaggagagagtgctgcagctgctgagactgctgaacccctgcctggagaagagaaaggagaccaccaagagacacctgttcttcaccgtgcccagagtggtggccgtgagcccccagatgagactggtggaggacaaccccagcagcctgagcctggtggagatctacaagcagagatgcgccaagaagggcatcgagcacgacaaccccatcagcagatactacgacagactggccaccgtgcaggccagaggcacccaggccagccaccaggtgctgagagacatcctgaaggaggtgcagagcaacatggtgcccagaagcatgctgaaggagtgggccctgcacaccttccccaacgccaccgactactggaccttcagaaagatgttcaccatccagctggccctgatcggcttcgccgagttcgtgctgcacctgaacagactgaaccccgagatgctgcagatcgcccaggacaccggcaagctgaacgtggcctacttcagattcgacatcaacgacgccaccggcgacctggacgccaacagacccgtgcccttcagactgacccccaacatcagcgagttcctgaccaccatcggcgtgagcggccccctgaccgccagcatgatcgccgtggccagatgcttcgcccagcccaacttcaaggtggacggcatcctgaagaccgtgctgagagacgagatcatcgcctggcacaagaagacccaggaggacaccagcagccccctgagcgccgccggccagcccgagaacatggacagccagcagctggtgagcctggtgcagaaggccgtgaccgccatcatgaccagactgcacaacctggcccagttcgagggcggcgagagcaaggtgaacaccctggtggccgccgccaacagcctggacaacctgtgcagaatggaccccgcctggcacccctggctgtag

SEQ ID NO: 138729 - DNA, 216 bp, Artificial Sequence
  derived and/or modified sequence
atggccttcgtggccacccagggcgccaccgtggtggaccagaccaccctgatgaagaagtacctgcagttcgtggccgccctgaccgacgtgaacacccccgacgagaccaagctgaagatgatgcaggaggtgagcgagaacttcgagaacgtgaccagcagcccccagtacagcaccttcctggagcacatcatccccagattcctgacctag

SEQ ID NO: 138730 - DNA, 11493 bp, Artificial Sequence
  derived and/or modified sequence
atggcctttgtggctactcagggggcaactgtggtagaccaaactacattgatgaagaagtacttacagttcgtggcagccctgaccgacgtgaatacccctgacgaaacaaagctcaaaatgatgcaagaggtgtctgaaaactttgagaacgtcacctcttcaccacaatattctacatttctcgagcatatcattcccaggttcctgacgtttctccaagacggggaggtgcagttcttgcaagagaagccggcacagcagctgcgtaaactagttctggaaatcatccaccggatacccacaaacgaacacctccgtccacacaccaaaaacgttctgtccgtcatgttccggttcctagaaacggaaaacgaggagaacgttctcatttgtttacgcattatcatagaactgcacaagcaattcagacctccgatcacacaggagatccatcacttcttagactttgtaaagcagatttacaaagaactgcctaaggtcgtcaatagatatttcgagaacccacaggtcattccggagaacacggtgccacctcctgaaatggtcggaatgataaccaccatcgccgtcaaagtaaatcccgagcgcgaagactctgaaacccgtacccactctataatcccacgtggatctttgtctctcaaagtgctcgctgagctgcccatcatcgttgtactcatgtaccagctgtacaagcttaacatccataacgttgtcgctgagttcgtgcctcttatcatgaacaccatcgccatccaggtctctgcccaagctcgccaacacaagctctataacaaagaactttatgcagacttcatcgccgctcagattaagactctgtcctttttggcttatatcatccggatctatcaggagctggtcactaagtacagccaacagatggtcaagggaatgcttcagctgcttagtaattgccctgcggagacagcccacctgcgaaaggaactcctgatagcggctaagcatatcctgaccacggagcttaggaatcagtttataccttgtatggacaaattgttcgacgaatccatactcatcgggtctgggtacactgctcgagagacactgaggcctctggcttatagcacactcgctgatcttgtccaccatgtccgccagcaccttcccctatcagatctgagtcttgcagtgcaacttttcgctaaaaatatcgacgatgaaagcctacctagttctatacagacaatgtcatgcaagctccttttgaacctagttgactgtatacggtccaaatccgagcaggaaagcggaaatggacgagatgttctcatgcgtatgctcgaagtgttcgtcctgaaattccataccattgcccggtaccaactctccgccatcttcaagaagtgcaaaccccaaagcgagctgggagctgttgaagccgctttgccaggagtccctaccgccccagccgcaccaggcccagccccctctccggcccctgtaccagccccacccccacctccacctccgccaccacccgccaccccagttacccctgctcccgtgcccccttttgagaaacagggcgagaaagacaaagaggataagcagaccttccaagtcaccgactgcaggagtcttgtgaaaacacttgtctgtggggtgaaaactatcacttggggaatcactagctgcaaggcccctggagaagctcaattcattccgaacaagcagttacagccaaaagagacccagatatatattaagttagtgaaatacgcaatgcaggcattggatatctatcaggttcagattgcaggtaacgggcaaacctacattcgggttgcaaactgccagacagtgagaatgaaagaggaaaaggaagtgttggaacactttgcaggggtgttcaccatgatgaaccccctgacctttaaagagattttccagactacagtgccatatatggtcgagaggatatccaaaaactatgcactacagatagtagccaatagctttcttgccaaccctaccacctcagcactcttcgcgaccattctcgttgagtatctcctggaccgcctgcccgagatgggctcgaatgtggaactgtccaatctttacttgaagctctttaaactggttttcggctccgtgtcattgttcgcagctgaaaatgagcagatgctcaaacctcatcttcacaaaattgttaactccagtatggagctcgcccaaaccgcaaaggagccttataattatttcttgctcctgcgggcattgttcagatcaatcggcggaggttcacatgacttgctgtatcaggaattcctacctctgctgccaaacctgctgcagggcttgaatatgctgcagagtggcttgcataagcagcatatgaaagacttgtttgtggaactgtgcctcacagtgcctgtgagactgtcctccctgttgccctacctgcctatgttgatggatcccttggtaagcgccctcaatggttcccagacactagtttcccagggcctgaggactctagagctctgcgtggacaatctgcagcctgacttcttatacgaccacatccagccagtccgcgccgaacttatgcaggccttgtggcgtacacttcggaaccctgcggacagcatctcacatgtggcttatagggtgttgggaaagtttggcggaagtaatcgaaaaatgttaaaggagtcccagaagctgcattacgtggtaaccgaggtgcagggtccttccatcaccgtggaattctccgattgtaaggcctcgctacaattacctatggagaaggcaatcgagaccgctttggactgcttaaagtctgccaatactgaaccttattaccggcggcaagcttgggaggtgatcaagtgtttccttgttgctatgatgagcctagaggataacaagcacgctctataccagctcctcgctcaccccaacttcaccgaaaagactataccaaacgtgatcatctctcaccgctacaaggcacaagatacacccgctcgtaagacctttgaacaggcactgaccggcgctttcatgtcggccgtgattaaggatctccgaccctcagcattgccattcgtggcctcacttatccggcactatacaatggttgccgtggcgcagcagtgcggcccgttccttctgccatgctaccaggtcgggtcccagccaagtactgccatgttccactccgaggagaatggaagcaaggggatggacccgctcgtgctcattgatgcaatcgcaatttgcatggcctacgaggaaaaggaactgtgtaaaatcggggaagtcgccctagccgtgatttttgatgtcgctagcattattctcggttcaaaggagcgcgcttgccagctccctttattttcctacatcgttgagagactatgcgcttgttgctacgaacaggcctggtacgctaagttagggggagtggtcagcattaaatttctcatggagcggctacctctcacatgggtgctgcaaaaccagcagacttttcttaaggccctgctcttcgttatgatggacttgacaggcgaggtgtccaatggcgctgtagccatggctaaaactaccctggagcagctgttgatgcggtgcgctacgccacttaaagacgaagaaagggcggaagagattgttgcagctcaagagaaatccttccaccatgtcacccacgacctcgtcagggaggttacgagccccaattctaccgtacggaagcaggcaatgcattcactacaggtcctcgcccaggtcaccggcaagtctgtgacagttatcatggagccccataaagaggtgctacaagacatggtgccccctaaaaaacacctgcttcggcaccaacccgccaacgcacagattggactaatggaggggaacaccttttgcaccaccctccagccacggttgtttaccatggatctcaatgtagtggaacacaaggtgttttacaccgagctcctgaatctttgtgaagctgaggacagcgcactgacaaaactcccgtgttacaagtctcttccatccctcgtgcctctacgaatagcagccctgaatgccctggcagcctgtaattatctcccccagtcccgcgaaaagatcattgccgcactgtttaaagccctgaactccaccaatagtgaattgcaagaagcaggggaagcctgcatgcgcaagtttctcgagggcgcaacgatagaagtcgatcaaattcacacgcacatgagacccctgttgatgatgctaggagactaccggagcctcacgctgaatgtggtcaatcggctgaccagcgtcactcgcctctttcccaacagcttcaatgataagttttgcgaccagatgatgcagcacctgcgtaaatggatggaagtagtggtaataacccataaaggcgggcagaggtctgacggcaatgaaatgaagatctgcagcgccatcatcaatctgttccatctgattcccgccgctccgcagaccctggttaagccgcttttagaggtggttatgaagacagaacgtgcaatgttgatcgaagctggatccccgtttcgcgaaccactcattaagtttctcacgcgccatcccagtcagacagtggaactgtttatgatggaggccacgctgaacgatccccaatggagtcggatgtttatgtcatttttgaaacacaaggacgctagaccactcagagacgtcctggcagctaatcccaatcggttcatcaccttacttctgccaggtggagctcagactgcggtgcggccaggatctccatcaacctcgaccatgagactggacctccagttccaagcaatcaaaatcatcagtataatcgtcaaaaacgatgactcctggctggccagccaacacagcctggttagccagctgaggagggtgtgggtgtctgagaattttcaggaacgccatcggaaggaaaatatggcagctacaaattggaaagagccaaagctgttagcctactgccttctgaattattgcaagcggaactatggtgatattgaacttttatttcagctcctccgagcattcaccggtagatttctctgcaatatgacgttcctgaaggagtatatggaagaggaaatcccaaagaattactctatagcccagaaaagggcactcttctttcggttcgtcgactttaacgatcccaatttcggggacgagctgaaggcaaaggttctgcaacacattcttaaccctgctttcctgtacagctttgaaaaaggggaaggcgagcagctcctcggaccacctaaccccgagggcgataatccggagtccattactagtgttttcataacaaaggtacttgaccccgaaaagcaggctgacatgctggacagcttgagaatttacctgctccaatatgccaccctcctggtcgaacacgccccacaccatatccacgataataataagaatcgcaattctaagctgaggcgacttatgacttttgcgtggccttgtctcctgtccaaggcctgtgtggatcctgcatgtaaatattccggacacctattactggcacacatcattgccaaatttgcaattcacaagaagatagtcctccaggtgttccattccctgctgaaagcccacgccatggaggctagagccatcgttcggcaggccatggctattctgacgcctgcggttccggcacgtatggaggacggacatcagatgctcacgcactggacacgcaagatcatagttgaggagggccatactgtgccgcagctggtccacatccttcatctaattgtgcaacactttaaggtgtattaccctgtacgacatcacttagtacagcacatggtgagtgcgatgcagaggctaggttttaccccaagcgttactatcgagcaacgccggttagcagtggatctcagtgaggtcgtgattaagtgggagctgcagcgcataaaggatcaacagcctgatagcgacatggatcctaactcatccggagagggcgttaattcagtctcctccagcataaaacggggtttgtccgtggattctgctcaggaagtgaaacggtttagaacggcaacaggtgccatttcagctgttttcggtcgctctcagtcccttcccggggccgacagtctacttgccaagcccattgacaaacagcatacagatactgttgtcaatttcttaatcagagtggcttgtcaagtgaacgacaacacaaatacagcaggatcaccaggggaagtgctcagccggcgatgcgtgaacctcctcaaaacagcactgcggcccgacatgtggcctaaaagcgaactaaagctgcagtggtttgacaagctactaatgaccgtggaacagcccaaccaggtcaattatgggaacatctgcaccggtctggaggttctaagttttcttcttaccgtgctgcagagcccagcaatcctgtcttcattcaaaccacttcagcgtgggatcgccgcctgtatgacttgtggtaacacaaaagtgctgagagctgtacacagtctgttatcgcgattaatgtccatcttccctactgagccctctacttcctcagtggcttccaagtacgaggagctggaatgtctgtatgcagccgtcggaaaagtcatatatgaaggtcttacaaattacgagaaagcaaccaacgctaacccttcgcagctatttggaactcttatgatacttaaatcggcctgtagcaataacccgagctacattgatcggctgatctcagtctttatgcgctccttgcagaagatggtaagagagcacttgaaccctcaggctgccagcggatcaacagaagctacatcaggaacttctgagctggtcatgctcagcttggaacttgtgaaaacaaggctggctgtcatgtccatggagatgagaaagaattttatccaagcaatccttacatctctgatagagaaaagtcctgacgctaaaattctgagagcggtagtcaaaatcgtggaagagtgggttaagaacaattctccaatggccgccaatcagacgcctaccctgcgcgagaagagcatcctgctggtgaagatgatgacttacattgaaaaacggttcccggaggacctggagttaaatgcccagttccttgatctggtaaattatgtctacagggacgagaccctctctggaagcgaactgacggccaagctcgagccggcctttcttagcggtttgagatgtgcccagccactcattagggccaagttttttgaggtttttgataattcaatgaagaggagagtatacgaacgacttctatacgtaacttgcagccaaaattgggaggcgatgggcaaccatttctggattaaacagtgtattgaactcctacttgccgtatgcgagaagagtacccccattggtacctcatgtcagggcgctatgctgccctccattacaaacgttattaacttggcagactcccacgacagggctgcatttgccatggtgacccatgtgaaacaggagcctcgtgaacgagagaactccgaatccaaagaggaagatgtggaaatcgatattgagctcgcgccaggtgatcagacgtccacacctaaaacaaaagagctctcagagaaagacatcggcaatcagctccacatgctgactaataggcacgacaagttcttagacacattgcgagaggtgaaaaccggggcactgctcagcgccttcgtccagctgtgccacatttcaaccacactcgccgaaaagacttgggtccagttgtttccaagactttggaagatcctgtcagacaggcaacagcatgccctcgcgggtgagatcagcccgttcctgtgttccgggtcgcatcaagttcaaagagactgtcaaccaagtgcattaaattgtttcgttgaggcaatgagccaatgcgttccacccatcccaatacgcccttgcgtattgaaatatctgggaaaaacccacaatttgtggtttcgctctaccttaatgttggaacatcaggccttcgagaagggattgagcctgcaaataaagcccaaacagactactgaattctatgagcaggaatccatcaccccgccccagcaggagattctggacagcctggcagagctatacagtctgctgcaggaggaggatatgtgggccggactatggcagaagcgctgcaagtactctgaaactgccactgctattgcatacgagcagcatggcttcttcgagcaggcacaggagtcctacgagaaagcaatggacaaagccaaaaaggaacatgagcgctccaatgcctctcctgctatattccctgagtatcagctctgggaagatcactggatacggtgttcaaaagaactcaaccagtgggaagctctcaccgagtatggtcagagcaagggtcacatcaatccctacctggttctcgaatgcgcctggcgcgtgtcgaactggaccgcaatgaaagaggcactcgtgcaggtggaagtgagttgcccaaaggagatggcgtggaaagtcaatatgtaccgcggctacctggccatttgccatccagaagagcagcaattatcttttattgaaaggttggttgagatggcatcctctctcgccatccgagagtggagaaggctccctcatgtcgtgtcacacgtgcatacccctctgctgcaggccgctcaacaaataatagagctgcaggaagcggctcagattaacgcaggcctccagccaacgaatctggggagaaacaactctctacatgatatgaagacggtggtaaaaacgtggcggaataggctccctatcgtgagtgatgatttgtcgcattggagtagcatcttcatgtggcggcagcatcactaccaggcaatcgtgaccgcatacgaaaattccagccaacacgatccctccagcaataatgcgatgcttggcgtccatgctagtgcaagcgctattatccaatatggcaaaattgcgagaaagcaggggcttgtgaacgtggcccttgatatcctgtcgcgcatccatacaatccccactgtaccaatcgtggattgtttccagaagatcaggcagcaggtgaagtgttaccttcaactggctggcgttatgggcaagaacgaatgcatgcaagggctagaggtgattgagagcacgaaccttaaatactttaccaaagagatgactgccgaattttatgcgctgaaggggatgtttctggcccaaattaacaagtctgaggaggccaataaggctttttctgccgccgtgcagatgcatgatgtattggtgaaggcatgggccatgtggggtgactaccttgagaacattttcgttaaggagaggcaactgcatctgggagtcagtgctattacgtgctacttacacgcatgccgccatcagaatgaatccaaaagccgcaagtatctggccaaagtgctgtggctcttgtcatttgatgatgacaagaataccctcgccgatgcagttgataagtattgcattggagttcctccaattcaatggctggcgtggattcctcaactgctgacatgcctggtggggtcggagggaaaactattactgaatctgatatctcaggtaggcagagtctacccccaggctgtttatttcccaatacggaccctgtaccttaccttaaaaattgagcagcgcgagcgatataagagcgaccccggccccatccgcgccactgctcccatgtggcgctgcagccgaatcatgcacatgcaacgcgagctgcacccgactctcctgagtagccttgaaggaatagtggaccagatggtgtggttcagagaaaactggcacgaagaggtgttgcgccagctccagcagggcctagctaaatgctactccgtggcgttcgagaaatccggagccgtgtctgacgccaagatcactcctcatacgctaaactttgtcaagaaacttgtgtccacgttcggcgtgggcctcgagaatgtaagtaacgttagtactatgtttagtagcgctgctagcgagtctctggcacgtagggcccaggcgaccgcacaggatccagtgtttcagaagctgaaagggcaatttacgacggatttcgatttctctgtgccaggatcaatgaagctgcataacctgatcagtaagctgaagaagtggatcaagattttagaggccaaaaccaaacaactccctaagtttttcctcattgaagaaaaatgccgattcctatctaacttttcagctcaaaccgcagaggtcgaaattcctggggagtttctcatgccgaaacccactcactattatattaagatcgcacgattcatgccacgagtagaaatcgtgcagaagcataacaccgccgcccggagattatatattaggggacacaacggcaagatctatccttatttggtcatgaatgacgcgtgtttgaccgaaagtcgtcgagaggaacgcgtgctgcagctgttgcgcttactgaacccatgcctggagaaaagaaaagagacaaccaagagacacctgttctttaccgtgcccagagtagtcgcagtctcccctcagatgagactcgtcgaggataatccctcctccctctcacttgtcgaaatctataagcagagatgtgctaaaaaaggaatagaacacgacaatccaataagtaggtactacgacagactggcaacagttcaggcaaggggcacacaagcttctcaccaggtgctgagggatattctgaaagaagtgcagtcaaacatggtcccgcgaagtatgctcaaggagtgggctcttcatacatttcccaatgctacagattactggacgttccggaaaatgttcaccatccagctcgccctgattggctttgccgagtttgtcttgcatctgaatcggttgaaccccgagatgttgcaaatagcccaagacaccggcaagctcaatgttgcctattttcggttcgatatcaatgacgccaccggagatcttgacgcaaataggccagtcccgttccgacttacccccaacatttccgagttcctgacgacgattggggtgtccggcccactgacagctagtatgatcgctgtggcccggtgcttcgctcagccaaattttaaggtggatggtattctaaagactgtgttgagggatgagatcatcgcctggcacaagaagactcaggaggacacttcctcgccgctgagtgccgcgggccaacctgagaacatggacagccagcagctcgtgagccttgtccagaaggccgtcaccgccataatgacaaggctccacaatctcgcacagttcgaagggggcgagagcaaggtgaatactttagtcgccgcagctaacagtctggacaatttatgccgaatggaccccgcatggcacccctggctgtag

SEQ ID NO: 138731 - DNA, 216 bp, Artificial Sequence
  derived and/or modified sequence
atggcattcgtcgctacccaaggtgcaaccgttgttgatcagaccacactgatgaagaaatacctccagttcgtcgccgcactgacagacgtgaataccccagatgaaacgaaacttaagatgatgcaggaagtctcggagaattttgagaacgtgacgtcgtctccacagtatagtaccttcctggagcatattatcccccgcttcctcacctag

SEQ ID NO: 138732 - DNA, 11493 bp, Artificial Sequence
  derived and/or modified sequence
atggcctttgtggccacccagggcgccaccgtggtggaccagaccaccctgatgaagaagtacctgcagtttgtggccgccctgacagatgtgaacaccccagatgagaccaagctgaagatgatgcaggaggtgtctgaaaattttgaaaatgtgaccagcagcccccagtacagcaccttcctggagcacatcatcccccgcttcctgaccttcctgcaggatggagaggtgcagttcctgcaggagaagccagcccagcagctgaggaagctggtgctggagatcatccaccgcatccccaccaatgagcacctgcggccccacaccaagaatgtgctgtctgtgatgttccgcttcctggagacagaaaatgaagaaaatgtgctgatctgcctgcgcatcatcatcgagctgcacaagcagttccggccccccatcacccaggagatccaccacttcctggactttgtgaagcagatctacaaggagctgcccaaggtggtgaaccgctactttgagaacccccaggtgatcccagaaaatacagtgcccccacctgagatggtgggcatgatcaccaccatcgctgtgaaggtgaaccctgagagagaagattctgagaccaggacccacagcatcatcccccggggcagcctgagcctgaaggtgctggccgagctgcccatcatcgtggtgctgatgtaccagctgtacaagctgaacatccacaacgtggtggccgagtttgtgcccctcatcatgaacaccatcgccatccaggtgtctgcccaggcccggcagcacaagctgtacaacaaggagctgtatgctgacttcatcgccgcccagatcaagaccctgtccttcctggcctacatcatccgcatctaccaggagctggtgaccaagtacagccagcagatggtgaagggcatgctgcagctgctgagcaactgcccagctgagacagcccacctgaggaaggagctgctgattgctgccaagcacatcctgaccacagagctgaggaaccagttcatcccctgcatggacaagctgtttgatgagagcatcctgattggcagcggctacacagcccgggagaccctgcggcccctggcctacagcaccctggccgacctggtgcaccacgtgcggcagcacctgcccctgagtgacctgagcctggccgtgcagctgtttgccaagaacattgatgatgagagcctgcccagcagcatccagaccatgagctgcaagctgctgctgaacctggtggactgcatccgcagcaagtctgagcaggagagcggaaatggaagagatgtgctgatgaggatgctggaggtgtttgtgctgaagttccacaccatcgcccgctaccagctgagcgccatcttcaagaagtgcaagccccagagcgagctgggcgctgtggaggccgccctgcccggggtgcccacagccccagctgcccctggccctgcccccagccctgcccctgtgcctgcccctcctcctcctcctcctcctcctcctccagccacccctgtgaccccagcccctgtgcccccatttgagaagcagggcgagaaggacaaggaggacaagcagaccttccaggtgacagactgccgcagcctggtgaagaccctggtgtgtggggtgaagaccatcacctggggcatcaccagctgcaaggcccctggagaggcccagttcatccccaacaagcagctgcagcccaaggagacccagatctacatcaagctggtgaagtatgccatgcaggccctggacatctaccaggtgcagattgctggaaatggccagacctacatccgggtggccaactgccagacagtgaggatgaaggaggagaaggaggtgctggagcactttgctggggtcttcaccatgatgaaccccctgaccttcaaggagatcttccagaccaccgtgccctacatggtggagcgcatcagcaagaactatgccctgcagatcgtggccaacagcttcctggccaaccccaccaccagcgccctgtttgccaccatcctggtggagtacctgctggaccggctgcctgagatgggcagcaatgtggagctgagcaacctgtacctgaagctgttcaagctggtgtttggatctgtgtccctgtttgctgctgaaaatgagcagatgctgaagccccacctgcacaagatcgtgaacagctccatggagctggcccagacagccaaggagccctacaactacttcctgctgctgcgggccctcttccgcagcattggaggcggcagccatgacctgctgtaccaggagttcctgcccctgctgcccaacctgctgcagggcctgaacatgctgcagagcggcctgcacaagcagcacatgaaggacctgtttgtggagctgtgcctgactgtgcctgtgcggctgagcagcctgctgccctacctgcccatgctgatggaccccctggtgtctgccctgaatggcagccagaccctggtgtcccagggcctgcggaccctggagctgtgtgtggacaacctgcagcctgacttcctgtatgaccacatccagcctgtgcgggcagagctgatgcaggccctgtggaggaccctgagaaatcctgctgacagcatcagccacgtggcctacagagtgctgggcaagtttggaggcagcaacaggaagatgctgaaggagagccagaagctgcactacgtggtgacagaggtgcagggccccagcatcaccgtggagttcagtgactgcaaggccagcctgcagctgcccatggagaaggccattgaaacagccctggactgcctgaagagcgccaacacagagccctactaccgccggcaggcctgggaggtgatcaagtgcttcctggtggccatgatgagcctggaggacaacaagcacgccctgtaccagctgctggcccaccccaacttcacagagaagaccatccccaacgtcatcatcagccaccgctacaaggcccaggacaccccagccaggaagacctttgagcaggccctgactggagccttcatgtctgctgtgatcaaggacctgcggcccagcgccctgccctttgtggccagcctcatccgccactacaccatggtggccgtggcccagcagtgtggccccttcctgctgccctgctaccaggtgggcagccagcccagcacagccatgttccacagtgaagaaaatggcagcaagggcatggaccccctggtgctgattgatgccatcgccatctgcatggcctatgaggagaaggagctgtgcaagatcggggaggtggccctggccgtcatctttgatgtggccagcatcatcctgggcagcaaggagcgggcctgccagctgcccctcttctcctacatcgtggagcggctgtgtgcctgctgctatgagcaggcctggtacgccaagctgggcggcgtggtgtccatcaagttcctgatggagcggctgcccctgacctgggtgctgcagaaccagcagaccttcctgaaggccctgctgtttgtgatgatggacctgactggagaggtgtccaatggagctgtggccatggccaagaccaccctggagcagctgctgatgagatgtgccacccccctgaaggatgaggagagagctgaggagatcgtggccgcccaggagaagagcttccaccacgtgacccatgacctggtgcgggaggtgaccagccccaacagcacagtgaggaagcaggccatgcacagcctgcaggtgctggcccaggtgacaggcaagtctgtgaccgtcatcatggagccccacaaggaggtgctgcaggacatggtgccccccaagaagcacctgctgcggcaccagcctgccaatgcccagatcggcctgatggagggcaacaccttctgcaccaccctgcagcccaggctcttcaccatggacctgaatgtggtggagcacaaggtgttctacacagagctgctgaacctgtgtgaggccgaggacagcgccctgaccaagctgccctgctacaagagcctgcccagcctggtgcccctgagaattgctgccctgaatgccctggccgcctgcaactacctgccccagagccgggagaagatcatcgccgccctcttcaaggccctgaacagcaccaacagcgagctgcaggaggccggggaggcctgcatgaggaagttcctggagggcgccaccatcgaggtggaccagatccacacccacatgaggcccctgctgatgatgctgggggactaccgcagcctgaccctgaatgtggtgaaccggctgacctctgtgaccaggctcttccccaacagcttcaatgacaagttctgtgaccagatgatgcagcacctgaggaagtggatggaggtggtggtgatcacccacaagggcggccagaggagtgatggaaatgagatgaagatctgcagcgccatcatcaacctcttccacctgatcccagctgccccccagaccctggtgaagcccctgctggaggtggtgatgaagacagagcgggccatgctgattgaggccggcagccccttccgggagcccctcatcaagttcctgaccaggcaccccagccagacagtggagctgttcatgatggaggccaccctgaatgacccccagtggagcaggatgttcatgtccttcctgaagcacaaggatgcccggcccctgagagatgtgctggccgccaaccccaaccgcttcatcaccctgctgctgcctggaggagcccagacagctgtgcggcccggcagccccagcaccagcaccatgaggctggacctgcagttccaggccatcaagatcatcagcatcatcgtgaagaatgatgacagctggctggccagccagcacagcctggtgtcccagctgcggcgggtgtgggtgtctgagaacttccaggagcggcacaggaaagaaaacatggccgccaccaactggaaggagcccaagctgctggcctactgcctgctgaactactgcaagaggaactacggggacatcgagctgctcttccagctgctgcgggccttcaccggccgcttcctgtgcaacatgaccttcctgaaggagtacatggaggaggagatccccaagaactacagcatcgcccagaagagggccctcttcttccgctttgtggacttcaatgaccccaactttggagatgagctgaaggccaaggtgctgcagcacatcctgaacccagccttcctgtacagctttgagaagggggagggggagcagctgctgggcccccccaaccctgagggggacaaccctgagagcatcacctctgtgttcatcaccaaggtgctggaccctgagaagcaggccgacatgctggacagcctgcgcatctacctgctgcagtatgccaccctgctggtggagcacgccccccaccacatccatgacaacaacaagaacagaaacagcaagctgcggcggctgatgacctttgcctggccctgcctgctgagcaaggcctgtgtggaccctgcctgcaagtacagcggccacctgctgctggcccacatcatcgccaagtttgccatccacaagaagatcgtgctgcaggtgttccacagcctgctgaaggcccacgccatggaggcccgggccatcgtgcggcaggccatggccatcctgaccccagctgtgcctgccaggatggaggatggccaccagatgctgacccactggaccaggaagatcatcgtggaggagggccacacagtgccccagctggtgcacatcctgcacctgattgtgcagcacttcaaggtgtactaccctgtgcgccaccacctggtgcagcacatggtgtctgccatgcagaggctgggcttcaccccatctgtgaccatcgagcagaggcggctggccgtggacctgtctgaggtggtgatcaagtgggagctgcagaggatcaaggaccagcagcctgacagcgacatggaccccaacagcagtggagagggcgtgaacagcgtgagcagcagcatcaagaggggcctgtctgtggacagcgcccaggaggtgaagcgcttcagaacagccactggagccatctctgctgtgtttggccgcagccagagcctgcctggagctgacagcctgctggccaagcccatcgacaagcagcacacagacacagtggtgaacttcctgatccgggtggcctgccaggtgaatgacaacaccaacacagctggcagccctggagaggtgctgagccgccgctgtgtgaacctgctgaagacagccctgcggccagacatgtggcccaagtctgagctgaagctgcagtggtttgacaagctgctgatgacagtggagcagcccaaccaggtgaactacggcaacatctgcaccggcctggaggtgctgtccttcctgctgactgtgctgcagagccctgccatcctgagcagcttcaagcccctgcagaggggcattgctgcctgcatgacctgtggcaacaccaaggtgctgcgggctgtgcacagcctgctgagccggctgatgagcatcttccccacagagcccagcaccagctctgtggccagcaaatatgaggagctggagtgcctgtatgctgctgtgggcaaggtgatctatgagggcctgaccaactatgagaaggccaccaatgccaaccccagccagctgtttggcaccctgatgatcctgaagagcgcctgcagcaacaaccccagctacatcgacaggctcatctctgtgttcatgaggagcctgcagaagatggtgcgggagcacctgaacccccaggccgccagcggcagcacagaggccaccagcggcaccagcgagctggtgatgctgagcctggagctggtgaagacccggctggccgtgatgtccatggagatgaggaagaacttcatccaggccatcctgaccagcctgattgagaagagcccagatgccaagatcctgcgggctgtggtgaagatcgtggaggagtgggtgaagaacaacagccccatggccgccaaccagacccccaccctgcgggagaagagcatcctgctggtgaagatgatgacctacatcgagaagcgcttccctgaggacctggagctgaatgcccagttcctggacctggtgaactacgtgtacagagatgagaccctgagcggcagcgagctgacagccaagctggagcccgccttcctgagcggcctgcgctgtgcccagcccctcatccgggccaagttctttgaggtgtttgacaacagcatgaagagaagagtgtatgagcggctgctgtatgtgacctgcagccagaactgggaggccatgggcaaccacttctggatcaagcagtgcatcgagctgctgctggccgtgtgtgagaagagcacccccatcggcaccagctgccagggcgccatgctgcccagcatcaccaacgtcatcaacctggccgacagccatgaccgggccgcctttgccatggtgacccacgtgaagcaggagccccgggagcgggagaacagcgagagcaaggaggaggatgtggagattgatattgagctggcccctggggaccagaccagcacccccaagaccaaggagctgtctgagaaggacatcggcaaccagctgcacatgctgaccaacagacatgacaagttcctggacaccctgcgggaggtgaagacaggagccctgctgagcgcctttgtgcagctgtgccacatcagcaccaccctggccgagaagacctgggtgcagctgttcccccggctgtggaagatcctgagtgaccggcagcagcacgccctggccggggagatcagccccttcctgtgcagcggcagccaccaggtgcagagggactgccagcccagcgccctgaactgctttgtggaggccatgagccagtgtgtgccccccatccccatccggccctgtgtgctgaagtacctgggcaagacccacaacctgtggttccgcagcaccctgatgctggagcaccaggcctttgagaagggcctgagcctgcagatcaagcccaagcagaccacagagttctatgagcaggagagcatcaccccaccccagcaggagatcctggacagcctggccgagctgtacagcctgctgcaggaggaggacatgtgggccggcctgtggcagaagcgctgcaagtacagcgagacagccacagccatcgcctatgagcagcacggcttctttgagcaggcccaggagagctatgagaaggccatggacaaggccaagaaggagcacgagaggagcaatgccagccctgccatcttccctgagtaccagctgtgggaggaccactggatccgctgcagcaaggagctgaaccagtgggaggccctgacagaatatggccagagcaagggccacatcaacccctacctggtgctggagtgtgcctggagggtgagcaactggacagccatgaaggaggccctggtgcaggtggaggtgtcctgccccaaggagatggcctggaaggtgaacatgtaccggggctacctggccatctgccaccctgaggagcagcagctgtccttcatcgagcggctggtggagatggccagcagcctggccatccgggagtggaggcggctgccccacgtggtgagccacgtgcacacccccctgctgcaggccgcccagcagatcatcgagctgcaggaggccgcccagatcaatgccggcctgcagcccaccaacctgggcaggaacaacagcctgcatgacatgaagacagtggtgaagacctggaggaaccggctgcccatcgtgtctgatgacctgagccactggagcagcatcttcatgtggaggcagcaccactaccaggccatcgtgacagcctatgagaacagcagccagcacgaccccagcagcaacaatgccatgctgggcgtgcacgccagcgccagcgccatcatccagtatggcaagatcgccaggaagcagggcctggtgaatgtggccctggacatcctgagccgcatccacaccatccccaccgtgcccatcgtggactgcttccagaagatccggcagcaggtgaagtgctacctgcagctggccggcgtgatgggcaagaatgaatgcatgcagggcctggaggtgattgagagcaccaacctgaagtacttcaccaaggagatgacagctgagttctacgccctgaagggcatgttcctggcccagatcaacaagtctgaggaggccaacaaggccttctctgctgctgtgcagatgcatgatgtgctggtgaaggcctgggccatgtggggagactacctggagaacatctttgtgaaggagcggcagctgcacctgggcgtgtctgccatcacctgctacctgcacgcctgccgccaccagaatgaaagcaagagcaggaagtacctggccaaggtgctgtggctgctgagctttgatgatgacaagaacaccctggctgatgctgtggacaagtactgcattggagtgccccccatccagtggctggcctggatcccccagctgctgacctgcctggtgggcagcgagggcaagctgctgctgaacctgatcagccaggtgggccgggtgtacccccaggccgtgtacttccccatccgcaccctgtacctgaccctgaagattgagcagcgggagcgctacaagagtgaccccggccccatccgggccacagcccccatgtggcgctgcagccgcatcatgcacatgcagcgggagctgcaccccaccctgctgagcagcctggagggcatcgtggaccagatggtgtggttccgggagaactggcatgaggaggtgctgcggcagctgcagcagggcctggccaagtgctacagcgtggcctttgagaagagcggggctgtgtctgatgccaagatcaccccccacaccctgaactttgtgaagaagctggtgtccacctttggagtgggcctggagaatgtgtccaatgtgtccaccatgttcagcagcgctgccagcgagagcctggcccggcgggcccaggccacagcccaggaccccgtcttccagaagctgaagggccagttcaccacagactttgacttctctgtgcccggctccatgaagctgcacaacctgatcagcaagctgaagaagtggatcaagatcctggaggccaagaccaagcagctgcccaagttcttcctgattgaggagaagtgccgcttcctgagcaacttcagcgcccagacagctgaggtggagatccctggagagttcctgatgcccaagcccacccactactacatcaagatcgcccgcttcatgccccgggtggagatcgtgcagaagcacaacacagctgcccggcggctgtacatccggggccacaacgggaagatctacccctacctggtgatgaatgatgcctgcctgacagagagcagaagagaggagcgggtgctgcagctgctgcggctgctgaacccctgcctggagaagaggaaggagaccaccaagaggcacctgttcttcaccgtgccccgggtggtggccgtgagcccccagatgaggctggtggaggacaaccccagcagcctgagcctggtggagatctacaagcagagatgtgccaagaagggcattgaacatgacaaccccatcagccgctactatgaccggctggccaccgtgcaggcccggggcacccaggccagccaccaggtgctgcgggacatcctgaaggaggtgcagagcaacatggtgcccaggtccatgctgaaggagtgggccctgcacaccttccccaatgccacagactactggaccttcaggaagatgttcaccatccagctggccctgattggatttgctgagtttgtgctgcacctgaaccggctgaaccctgagatgctgcagatcgcccaggacaccgggaagctgaatgtggcctacttccgctttgacatcaatgatgccactggagacctggatgccaacagacctgtgcccttccggctgacccccaacatcagcgagttcctgaccaccatcggcgtgtctggccccctgacagcctccatgattgctgtggcccgctgctttgcccagcccaacttcaaggtggatggcatcctgaagacagtgctgagagatgagatcatcgcctggcacaagaagacccaggaggacaccagcagccccctgtctgctgctggccagcctgagaacatggacagccagcagctggtgtccctggtgcagaaggctgtgacagccatcatgacccggctgcacaacctggcccagtttgaaggaggagagagcaaggtgaacaccctggtggccgccgccaacagcctggacaacctgtgcaggatggaccctgcctggcacccctggctgtag

SEQ ID NO: 138733 - DNA, 216 bp, Artificial Sequence
  derived and/or modified sequence
atggcctttgtggccacccagggcgccaccgtggtggaccagaccaccctgatgaagaagtacctgcagtttgtggccgccctgacagatgtgaacaccccagatgagaccaagctgaagatgatgcaggaggtgtctgaaaattttgaaaatgtgaccagcagcccccagtacagcaccttcctggagcacatcatcccccgcttcctgacctag

SEQ ID NO: 138734 - DNA, 11493 bp, Artificial Sequence
  derived and/or modified sequence
atggccttcgtggccacccagggcgccaccgtggtggaccagaccaccctgatgaagaaatacctgcaattcgttgctgctttgacagatgttaacacccccgacgaaacaaagcttaagatgatgcaggaggtgtcagaaaactttgaaaatgtgacatcaagtccccaatactcgaccttcctcgaacacattattcctaggttcttaacctttctccaggacggcgaggtgcagttcctccaggaaaaacctgctcagcagctgaggaaactagtgctggagatcatacaccggatcccaaccaatgagcacctgaggccccacaccaaaaacgtccttagcgtgatgttcagattcctggaaacagagaatgaagaaaatgtgctgatttgcttacgcattattatcgagctccacaaacagttccggcctcctattacacaggagattcaccacttcctggattttgtaaagcagatctataaggaactccctaaagtcgtgaacagatactttgaaaatccccaggtgatccctgagaatacagttccaccacctgagatggtggggatgatcacgaccatcgcagtgaaagttaatccagagcgggaagactctgagactaggacccattctataatccctcgagggtctttgtcactcaaggtgctcgccgagttacccattattgttgtactgatgtatcagctgtataagcttaacatccataatgtcgtggccgaattcgtgccgctgattatgaacacaattgcaatacaagtgagcgcccaggcacgtcaacacaagttgtataacaaggagctttacgccgatttcatcgcagcgcaaatcaagaccttgagttttctggcctacattataagaatttatcaggagctggtcaccaaatacagtcagcaaatggtgaaaggaatgttacagctgctatcgaactgccccgcagaaaccgcacatctccggaaagagttgctgatagcagccaagcacattctcaccactgagctcagaaaccagttcattccatgtatggataagctgttcgatgaatcgatactgatcgggtccgggtacactgcccgcgaaaccctgagaccccttgcctacagcacactcgccgacttggtgcatcacgttcgacagcacttgcccctcagcgacttatccctggctgtccagctgtttgctaagaacatcgatgacgagtcccttcccagtagcatccagaccatgagttgcaagctactgttgaatctcgtggactgtatccgttcgaagtcagaacaggaaagcgggaatggaagagacgtacttatgagaatgctggaggtgtttgtgctcaagtttcacaccatcgcacggtaccaattgtctgctatctttaaaaagtgcaagccgcagtccgagcttggtgcggtcgaggccgctctgcctggcgtgccaaccgctcctgctgcccctggccccgcaccctctcctgctcccgtcccagccccccctccaccccctcccccacccccacctgctacgcccgtcaccccggctcctgtccccccatttgaaaaacaaggtgagaaggacaaggaagataaacagacctttcaagttacagactgcagatccttagtaaagaccctcgtgtgcggggtgaagacaattacctgggggataacgtcatgcaaggcccccggcgaagcgcagtttatcccaaataagcagcttcagcccaaggagacacagatctacattaagctggtgaaatacgctatgcaagcgttagatatttatcaggtgcagatcgctggcaatggacagacttatataagggtagccaattgtcagacagtgcgcatgaaagaagagaaggaggttcttgagcacttcgctggcgtttttacaatgatgaacccgctcacctttaaggagatctttcagacaaccgttccttacatggtggaaagaattagtaagaactatgccctccagatcgtagccaattctttccttgccaacccaacaacatctgcgttgtttgcaactatcttggtagaatatttactggaccggctgcccgagatggggagcaacgtggaactgagtaacctttacttaaaactgtttaagttggttttcgggagtgtttccctttttgctgcagaaaacgagcaaatgctaaagccccacctgcacaaaatcgttaacagttcgatggagctggcccagactgccaaggagccatataactacttcctgctgctgcgagcccttttccgtagcatcgggggcggatcccatgatctgttgtatcaggagtttctgcccctgctgcccaatctgctacagggcctgaacatgttgcagtctgggctgcacaagcaacatatgaaggacttgttcgtagagttatgtctgaccgtgcctgtgcgactgtcaagccttctgccttacctgccaatgctgatggatcctttggtctcagcgttgaacgggtcacagaccttggtaagccagggcttaaggacgcttgagttatgtgtggataatttacaaccagatttcctctacgatcatattcagccagtgcgcgctgagctgatgcaggcgctctggcgaaccctgcggaacccggcagacagcataagccatgtcgcctatcgcgttttaggaaagtttggcggaagcaatcgaaagatgttgaaagaatcccagaagttgcattatgtcgtgacggaggtccaaggaccttccatcacagtggagttctccgactgtaaggcctctctccagctacccatggagaaggccatcgaaactgcactagactgtctcaagagcgctaacactgaaccctattacaggcggcaagcgtgggaggtaatcaagtgtttcctcgtggccatgatgagtctggaggataacaaacatgcgctgtaccagctgctggctcaccctaactttactgagaaaactattcctaatgtcattatctctcacagatacaaagctcaagatactcccgccaggaagacgtttgagcaggctctgaccggtgccttcatgagcgctgtgataaaagatctgcgccctagcgcactgccttttgtggccagtttgatccggcactacacaatggtcgcggtggctcaacagtgtggaccctttctgcttccttgttaccaagtggggagtcagcctagtactgcaatgttccacagcgaagaaaatgggtctaagggaatggaccccctggtgttaatcgatgcaattgcaatatgcatggcttatgaggaaaaggaactttgtaagatcggcgaggttgcgttggccgttatcttcgacgtggcaagcattatcctgggttctaaagagcgcgcctgtcaactgcctttgtttagctacatcgtggaacgcctctgcgcatgctgttacgagcaggcatggtatgctaagctcggcggggtggtgagtatcaagtttctaatggaacggcttccactgacatgggtactgcagaaccagcagacctttttgaaggctctcctatttgtcatgatggatctcaccggagaggtctccaatggcgctgtagccatggccaagaccacactggaacaattgctgatgcggtgtgccacccctctcaaagacgaggagcgggccgaagagattgtagccgctcaggaaaagtctttccaccacgtgacccatgacctggtcagagaagtgacttcccccaactctactgtaaggaaacaggcaatgcattccctgcaggttctcgcacaggtgaccggcaagtctgtgaccgtgatcatggagccccacaaggaagtccttcaggacatggtgcccccaaagaaacacttactgaggcatcagcccgcgaacgcccagatcggcctgatggaaggtaatacgttttgtaccaccctccaaccaaggctgttcacaatggacctgaacgtggtggaacataaggttttctataccgaactgttaaacctgtgcgaagctgaggatagcgctctcaccaagctgccctgctataagagtcttccatcccttgtgccgttgcgaatcgctgccctgaacgccttggctgcttgcaactatttgcctcagagccgggagaagattatcgcggctcttttcaaggctctaaactctaccaatagcgagctccaggaggcaggcgaagcgtgcatgcgcaagttcctagagggggcaacaatcgaagtggaccagattcacactcatatgcgccctctcctcatgatgttgggagactatcgctccctgacgctaaatgtagtgaacagactcacctccgtcactaggctattccccaactccttcaatgacaaattctgtgatcagatgatgcagcatctcagaaaatggatggaggtggtggtaataacgcacaaaggggggcaacgtagtgatggtaacgagatgaagatatgcagcgccatcattaatctgtttcatttgattccagccgccccacaaaccctggtaaaaccattactcgaagtggttatgaaaaccgagagggccatgctcatcgaggcaggttcgcctttcagggagccactcattaagtttctgacaaggcacccatcacagaccgtggaactcttcatgatggaagccaccttaaacgacccacaatggtccagaatgtttatgagctttctgaagcataaggacgctcgtcctctgagagatgtgctggcggcgaaccctaaccgtttcattacgttgttactacccggcggggcgcagacagcggtgaggccggggagcccaagtacaagcaccatgcgattggacctgcagttccaggccatcaagattatcagtattatcgtcaagaacgatgattcctggctggccagccagcactcattggttagtcaactgaggcgcgtttgggtgagcgagaactttcaggaacggcaccggaaagagaatatggcagccacaaactggaaggaacccaagcttcttgcatactgtcttcttaattactgcaagcgaaattatggggacatcgagctgctttttcagctgctccgggcattcacggggcgatttctgtgcaacatgacctttctgaaggagtatatggaagaggagataccaaaaaattactctatcgcacagaaacgggcattgttttttcggtttgtcgattttaacgatccgaattttggcgatgagctgaaagccaaggtcttgcaacacattctcaatcctgccttcctgtacagttttgagaagggcgagggcgagcagctactgggacctccgaatccagagggagataatccagagtctatcacatcggtgtttatcaccaaagtcttggacccagaaaaacaagccgatatgcttgactctctgaggatttatcttctgcagtatgccaccctgcttgttgagcatgctcctcaccacattcacgataataacaaaaatcgcaacagtaagcttcgtcgcctcatgacctttgcttggccctgtttgctgagtaaagcgtgtgttgatcctgcgtgcaagtattctggccacctcttgttagcccacataatcgctaagtttgccatacacaagaagatcgtacttcaggtatttcacagtctgcttaaggcgcatgccatggaggcccgagcaattgtgagacaggccatggcgatccttacccccgccgtacccgccaggatggaggacggccatcagatgctgacgcactggactagaaagatcattgtagaagagggccacacagtgccacagcttgtgcacatcctccaccttatcgtccagcactttaaggtctattatcctgtgagacaccacctggtgcagcacatggtttccgcaatgcagcgtctcggtttcacccccagcgttaccatcgaacagcgcaggctggccgtggacttgtctgaagtagttataaaatgggagctccagcgcatcaaagaccagcagcctgattctgatatggatcccaactcttcgggggagggggttaatagcgtgagctcgagcatcaagaggggcctgagcgtcgactccgcccaagaagtaaagcgctttaggactgccaccggggcaatatctgccgtcttcggccggtcacagagcctgcccggagccgactcattgctcgctaagccaatcgacaaacagcacaccgacacggtagtgaacttcctcatacgagtcgcctgccaggttaatgacaacacaaacactgctggctcgcctggcgaagttctgagtcgcaggtgcgttaacttgctgaaaacagccctgcgacccgatatgtggcccaagtccgaacttaaacttcagtggttcgacaaattattgatgaccgtagaacagcctaaccaggtcaactatggaaatatttgtactggcctggaggtactgagttttctccttacagtgcttcagagtcccgccatcctcagctcattcaaaccgttgcagaggggtatcgccgcttgcatgacatgcggcaacactaaagtactaagagccgttcactcactgttgtcccgcttgatgtccatcttccctacggaaccaagtacaagcagtgtcgcctccaagtacgaggaactcgagtgtctctacgccgcggtgggcaaggtcatatacgagggccttacaaattacgagaaggcaaccaatgccaaccctagtcagctcttcggaacgctgatgattttaaagagcgcctgcagtaacaatccctcctacatcgaccgcctgatctctgtgtttatgcggagtctgcagaagatggtgcgcgaacatctcaaccctcaggcggcttccggctctactgaggccacatctggaaccagtgagttggttatgttgagcctcgagttggtgaaaaccagactcgccgtcatgtctatggagatgaggaagaattttattcaggcaatattgacttcactaatcgagaaaagtcccgatgcgaagattctccgcgctgttgtgaaaatcgtggaggagtgggttaagaacaacagtcctatggctgcaaaccagacacccacactccgcgagaaaagcattctgttggtcaagatgatgacctacatagagaaaaggtttccggaggacttggaactcaacgcccagttcctcgacctggtcaactacgtctatcgggatgagacactaagcggatcagaactaacagcaaaactggagcccgcatttctgagcggattacggtgcgcgcaacccctaatcagggctaagttctttgaagtcttcgataacagcatgaagcgaagagtgtacgaaagactgctttatgtgacctgctcacagaattgggaagcgatgggtaaccatttctggattaaacagtgtatagagcttctgctggccgtgtgtgaaaaatcgactcccatcggaactagttgccagggtgcaatgctgccctcaataacgaacgtgatcaaccttgctgatagccatgaccgtgcagctttcgccatggtcacacacgtgaagcaggaaccgcgtgagcgggagaatagtgaaagcaaagaggaggatgtggaaattgacatcgaattggctccaggggatcaaacatcaacccctaaaacaaaggagctgagcgaaaaagacatcggcaatcagttgcatatgctcactaataggcacgataagtttttggacactctacgcgaggtgaagacaggagccctcctgtcggcctttgtgcaactgtgccacatcagtacgactctcgcagagaaaacctgggtgcagctgtttccaagactttggaaaatcttgagcgatcggcagcagcacgcactggcaggggagatttcccccttcctttgttccggcagtcaccaagtccagcgcgactgtcagcctagtgctctgaactgcttcgtggaagctatgagccaatgcgttcccccaatccctatcaggccatgtgttctgaagtatttggggaagactcacaatttatggttccggagcactctgatgctagagcaccaggcgtttgagaaaggccttagcttgcagattaaacccaaacagacaacagagttttacgaacaggagtctatcaccccccctcagcaagaaattctcgattcactggctgaattgtattccctgctccaggaagaagatatgtgggctggtctctggcagaagcggtgtaagtattcagagactgcaacagcaatcgcatacgagcagcacggcttctttgaacaggctcaggaaagctatgaaaaggccatggacaaggctaagaaagagcacgagcgtagcaacgccagtcctgccatatttcctgagtatcagctctgggaggatcactggattaggtgctcaaaagagctaaatcagtgggaggcgcttacagaatacggacagtctaagggacacatcaacccttacttagtgctggaatgtgcttggcgtgtgtcaaattggacagccatgaaggaagccctggtgcaggtggaagtatcttgtcccaaggaaatggcgtggaaggtgaacatgtaccgggggtacctcgccatatgtcacccagaggagcaacagctctcattcattgagagactggtagaaatggcatcttctctagccattcgcgagtggagacgcctccctcacgtggtgtcccacgtgcatacacccctccttcaagccgcgcagcagatcatagaactacaggaggccgcccagatcaacgccggcctgcagcctactaatctcggaagaaataactctctccatgatatgaagacagtagtgaagacctggagaaatagactccctatcgtctccgacgacttgtctcactggtcgtctatattcatgtggagacagcaccattatcaggccatcgtcacggcctacgaaaattccagccagcatgacccgtccagtaataatgccatgttgggggttcatgcatctgcctctgctattattcagtatggtaagatagctcgcaagcaaggactggtcaacgtcgcgctcgacatcctgagtcgtattcacactattccgactgtgcctatcgtggactgtttccagaagattaggcaacaggtgaaatgctatctgcagctggccggcgtgatggggaagaatgaatgtatgcaggggctcgaggttatcgagtctaccaacctgaagtacttcacaaaggagatgactgctgagttttacgccttgaagggcatgtttctagctcagattaataagagtgaagaagccaataaggccttttctgcagccgtgcagatgcatgatgttctggtcaaggcttgggccatgtggggagattatctcgagaatatcttcgtaaaggaaagacagctgcacctgggggtgagcgccatcacctgctatctccacgcctgtcgacatcagaatgaatccaagagcagaaaatacctggccaaagtgctgtggctgctaagtttcgatgatgataagaacaccctggctgatgccgtcgacaagtactgcattggagtgcctcccatccagtggctggcctggatcccacagcttcttacatgcctggtcggtagcgaagggaaactgttactgaatctgatatcacaagtggggcgggtgtatcctcaagccgtgtactttccaattcgcactctgtacctgactctgaagatcgagcaacgggagagatataaaagcgatcccggacctatacgcgcaaccgcacccatgtggcgctgtagtcggatcatgcacatgcagcgggagttgcatcctaccctgctctcatccctggaggggatagtcgaccaaatggtttggtttcgtgaaaactggcacgaagaggtgctcagacagctgcagcagggtttggccaaatgttattcagtcgcatttgaaaagagtggtgcggtaagtgatgccaaaattaccccccacacgttaaacttcgttaagaaattggtgtcgactttcggagtggggctggaaaacgtgtctaacgtttctaccatgttttcttctgccgcttctgaatcactggctaggagagcacaggccaccgcccaggacccggtcttccagaagttgaagggacaatttacaacagacttcgacttttccgtgccaggctccatgaagctgcacaatttgatctcgaaactcaagaagtggattaagatcttagaagcaaagacaaaacaactccccaagtttttcctgatcgaagagaagtgtcgatttctgtctaacttttccgcgcagaccgccgaggtggagatccctggagagtttttgatgccgaaacccactcactattacataaaaatagctcgatttatgccccgcgtggagatagtccagaagcacaacactgccgcacggagactctacataaggggccacaatggcaaaatttatccatacttagtgatgaacgacgcctgtttaacagagtccaggagagaagaacgcgttctgcagctgttgcgacttttgaatccttgccttgaaaagcgcaaggaaacaactaagaggcatctcttcttcactgtcccgcgcgtggttgccgtgtcccctcagatgaggctggtagaagacaacccttcatccttgtctttagtagaaatatacaagcaacgctgtgccaaaaagggcattgagcacgacaatcctatttccaggtattatgaccggcttgcgaccgtgcaagcaaggggtactcaggcttcacatcaagtgcttcgcgacattctaaaagaagtgcagagcaatatggtgccccgaagcatgcttaaggagtgggccctccacacatttccaaacgcaaccgactattggactttccgcaaaatgttcacgattcaactggcgctgatcggtttcgctgagtttgtgttgcatctcaaccggctcaatcctgaaatgctgcagattgctcaggacactggtaaactgaatgtggcatactttagatttgacatcaatgatgcaacaggtgacctggacgccaacagacccgtgcctttcaggctgacgcccaacatttccgagttcttgaccaccatcggcgtgtctgggcccctgaccgcgagcatgattgctgttgcacgttgtttcgcacagcctaatttcaaggttgatggcattctgaagactgttcttcgagacgagattattgcctggcacaagaaaacccaggaggacacaagcagccccttgagcgcggcaggacagccagagaatatggacagtcagcagcttgttagcctggtgcaaaaggcagtcactgctatcatgacaagactccacaacctggcccagttcgaaggtggcgagagcaaggtcaatactcttgtagccgctgcaaacagtttagacaacctgtgtcgaatggatcctgcctggcacccctggttgtag

SEQ ID NO: 138735 - DNA, 216 bp, Artificial Sequence
  derived and/or modified sequence
atggccttcgtggccacccagggcgccaccgtggtggaccagaccacccttatgaagaagtatctccaatttgtggcagctctgaccgacgttaacacccctgacgaaacaaagctgaaaatgatgcaggaggtgagtgaaaactttgaaaacgttacaagttctccacaatactcaaccttcctggagcatatcatccctcggtttttgacctag

SEQ ID NO: 138736 - DNA, 11493 bp, Artificial Sequence
  derived and/or modified sequence
atggcttttgtcgccacacagggcgctacagtggttgatcagacaacgttgatgaagaagtacttacagtttgtggccgcactgaccgatgtgaatacgcccgacgaaactaaattaaagatgatgcaggaggttagcgaaaactttgaaaacgtcacctccagcccacagtactccactttcctggagcatataataccccgatttttgacgtttttacaggatggcgaagtccagttcctgcaagaaaaacctgcccagcagttgaggaagctcgtgctggaaatcatccatcgtatcccgactaatgagcaccttcgaccacacactaagaacgtactgtccgtgatgttcagatttttggagacagagaatgaggagaacgtgttaatatgtttaagaattatcattgagctccacaaacagtttaggccacccataacacaggaaattcatcatttcctggacttcgtgaaacagatctataaggagttacccaaggtcgtgaacaggtacttcgaaaacccacaggtaattcctgagaatactgtaccacctcccgaaatggtcggaatgatcacaacaattgctgtaaaagtcaaccctgagagggaagactcggaaacgagaacacactctatcattcccagagggagcctgtccttgaaggtgcttgccgaactgccgattatagtcgtcctgatgtaccagctatataagttgaacatccataacgttgtggccgaatttgtgcctctgataatgaacacaatagcaattcaagtaagcgcccaagcaaggcaacacaaactgtacaataaagagttgtatgcggacttcattgcagcacagattaaaacgctaagtttcctggcatatattataaggatctatcaggagttggttacaaaatactcacaacagatggtgaaggggatgctgcagctactcagtaattgtcccgcagaaactgctcacctcagaaaagaacttctcatcgccgcaaaacatattctgacaacagagctgagaaaccagtttataccttgtatggacaaactgtttgatgagtcaatactgattggcagtgggtatacggccagggagacacttagaccactggcatacagcacactcgcggatctggtccatcatgtgagacagcacctccccctgtcagacctgtctctcgctgtgcagctcttcgccaagaatattgacgacgaaagcctgccttccagcatccagactatgtcctgtaaattattgctgaacttggtagattgcattaggagtaagtcggagcaagagtcaggaaacggtcgggacgtattaatgcggatgctggaggtgtttgtcttaaaattccacaccatcgcccgataccagctgagcgcaattttcaagaagtgcaaaccacagtccgagctgggcgcagttgaagccgcactaccaggggtccctactgcgcctgccgctcctggccctgctccatcccctgctccagtgcccgctccacctcctccccctccaccccctcctcccgcaacccctgttacccctgcccctgtcccgccttttgagaagcagggggagaaggacaaggaagacaagcaaaccttccaggttaccgactgccgcagtctcgtgaagacactcgtctgtggggtaaaaaccattacctggggaattactagctgcaaggccccaggcgaagctcagtttatacctaacaagcaacttcagcccaaagagactcaaatctatattaaacttgtgaagtatgcgatgcaggctctcgacatctaccaggtgcagattgcaggcaacggacaaacttacattcgtgtggctaactgccagactgtgaggatgaaagaagaaaaggaagtgttagagcactttgctggtgtttttacaatgatgaacccattgacttttaaggagatcttccagaccactgtcccctacatggtggaacggattagcaagaattacgccttgcagatcgtggcaaattctttcctcgcgaacccaaccacatcagccctcttcgccactatcctggtcgaatatcttttagaccggctgccagagatgggaagcaacgtagagctgtcgaatctatacttaaaactcttcaagctggtcttcggatccgtgagtctctttgccgcagagaacgaacaaatgctcaagccgcacttgcataagatcgttaattccagcatggaactggctcagaccgcaaaggaaccgtacaactacttcctgctgctccgggctttattcaggtccatcggcggtgggtcccatgatcttctgtaccaggagttcttgccattgctacctaatctgctgcagggcctcaatatgctgcagtccgggctgcacaagcagcatatgaaagacctgttcgtcgagctttgtctgacagtccctgtacgtctaagcagtctgttaccctatttgcctatgttaatggaccccctggtgtctgctctgaacggatcacagacacttgttagccaggggctgcgtacactggagttgtgcgtggacaatttgcagcccgactttctctacgaccatatccagccagtgagagcagagctgatgcaggccttatggagaacccttaggaacccagcggactcaatcagccatgtggcatatcgggtattgggcaagttcggagggagcaaccgcaagatgctcaaggagagccagaaactacattacgttgtgacagaagtgcaggggccatccattaccgttgaattcagtgattgtaaggcatccctccaactgcctatggagaaagctatagaaactgccttggattgcctaaagagtgccaatactgagccatactatcgccgacaggcctgggaggtgatcaaatgtttcttggttgcgatgatgtccttggaagacaataaacacgctctgtaccaactcttagcccacccaaatttcacagagaagactattccaaatgtcataattagccacagatacaaggcccaggacactcccgcaaggaagaccttcgaacaggccctgaccggagcctttatgagcgcagtgattaaggatttaaggccttccgcactgccatttgtcgcctccctaattcgtcactacactatggttgccgtcgcccaacagtgcggcccattcttgctgccttgctaccaggtcggatcgcagcctagcacagctatgttccacagcgaggagaatggttcaaagggaatggatccattagttcttattgacgcaattgctatttgtatggcctacgaggaaaaagaattgtgcaagattggggaggtcgcactggccgtgatatttgatgtggcgagcatcatcctaggcagtaaagaaagagcctgccagctgccgctcttctcttacatcgtcgaaagattgtgtgcatgctgttacgaacaagcctggtacgccaaactgggcggagttgtttctatcaaatttttaatggagcggctccctctaacatgggtgttacagaaccagcaaacgtttctcaaggcactcctgttcgtgatgatggatttgaccggagaagtgagcaatggggctgtagcgatggccaaaaccacgcttgagcagctcctgatgaggtgcgctacacccctgaaagatgaggaacgcgcagaggaaattgttgctgcccaggagaagtcattccaccatgtaacacatgatcttgtgcgggaggtcaccagtccaaattcaactgttcggaagcaggccatgcattcactccaggtgctcgcacaagtgactggcaaatccgtaaccgtgatcatggaaccccataaggaagtgctacaggatatggtgcctccgaagaagcacctcttgaggcaccagcctgctaacgcgcagatcggacttatggaaggtaacactttttgtaccacattgcagccaaggctgttcaccatggacctgaatgtggtggagcataaagtgttctatactgagttgctcaacctatgcgaagccgaagattccgccctgacaaagctgccctgttacaaatctctccctagcctcgtgccattgagaatcgctgccctgaatgctttggctgcctgcaattatttgcctcagagtcgtgaaaaaattattgcggctctgtttaaagccctgaatagcaccaactccgaactgcaggaggccggagaggcatgcatgaggaagttcctagagggcgctacaatcgaagtagaccagatccatacgcacatgagacccctcctcatgatgttgggggactaccggtcgctaacactcaacgtggtcaataggctcacttcagtgaccaggcttttcccaaatagctttaatgataagttttgtgaccagatgatgcagcacttacgcaagtggatggaggtagtcgttattacccacaaggggggacaacggagcgatggaaatgaaatgaagatctgcagcgccatcatcaacctgttccatttaatacccgctgccccacagaccctggtgaaacctttgctggaggtggttatgaaaaccgagagagccatgctgatagaggcgggttccccgttcagagagcctctgattaagtttttgaccagacatccttcacaaaccgtagaactcttcatgatggaggcgactctaaacgacccgcagtggtccaggatgtttatgagcttcctgaagcataaagatgctcgtccactgagggacgtccttgctgctaatcccaatcggtttataactctattgctccctgggggagcacagaccgcggtgcgtccaggatctccgtctaccagtactatgagactcgatctacagttccaggctatcaaaataataagcattatcgtaaagaatgacgacagttggctagcttcacaacatagtcttgtaagtcagctgcgaagagtgtgggtgagcgaaaacttccaggagaggcatagaaaggagaacatggctgccacgaactggaaggaaccgaagctgctcgcctattgcctgctgaactattgcaagcgcaattacggagatattgagcttttattccagctcttgagggctttcaccgggcgatttctctgtaatatgactttcttgaaagaatacatggaggaagaaatccccaaaaattactcaatcgcacagaaaagagccctttttttccggtttgtagatttcaatgacccaaattttggcgacgaactcaaggctaaagtcctgcaacacattctgaacccagcttttctgtattcctttgaaaaaggcgagggggaacagctgctggggcctcctaaccccgagggtgataatcccgaatcaatcacatccgtgtttatcaccaaggtgctggaccccgaaaaacaggccgacatgctggattccctgcgcatttacctactccagtacgccaccctactcgtggagcacgcaccgcaccacatacacgacaacaataagaatcgtaactctaaactgagaagattgatgacattcgcctggccctgcctgttgtctaaggcctgtgtggatccagcttgtaagtatagtggccatctgctgcttgcccatatcatcgccaagtttgccatccacaagaaaatcgtccttcaagtgtttcattctctgctaaaagcgcacgcgatggaggctagggctatagttaggcaggccatggcaatactgacgccagctgtccctgccagaatggaagacggtcaccaaatgctgacacactggacccgcaaaattatcgttgaggaaggtcatacagtcccacaacttgtccatattttgcatttgatagtgcagcactttaaggtctattaccccgtccgccaccacctagtgcagcacatggtgtccgctatgcagcggctgggctttacaccctccgttacaattgaacagaggcggctggcagtcgacctgagtgaggtggtaatcaaatgggaactgcagcgaatcaaggaccagcaacccgacagtgacatggatccgaactctagcggcgagggtgtcaatagcgttagctccagcattaagcggggactaagtgtggacagcgctcaagaagtcaagcgcttccgcaccgctacaggagctatctccgccgtgttcggacgtagtcagtcactcccaggggctgattctctgcttgctaagccaatcgacaagcagcacacagataccgttgtgaatttcctgatccgtgtggcatgtcaggtgaatgataacactaacactgctggatctcccggagaggtccttagccggcgatgcgttaacctgcttaagaccgcactgaggccagatatgtggccaaagagtgagctgaagctgcaatggtttgacaagctcctgatgacggtggagcaaccaaaccaagtgaattatggcaatatatgtacggggctcgaggtactctcttttttgctgaccgtgttacaaagccctgccattctaagtagttttaagcctctacagcgaggcattgccgcttgcatgacctgtggaaatactaaggtactccgcgcagtgcactccctcctgtcacggttgatgtcgatattcccaaccgaacccagcacctcatctgtggcctccaagtacgaagagcttgagtgtctatatgctgcagtggggaaagtgatttacgaaggccttaccaactatgagaaagccactaatgcaaacccctcacagctattcgggacactgatgatactgaagagtgcctgctcaaacaatccatcttacatcgaccgtttgatctctgtgtttatgcggagcttacagaaaatggtgcgtgaacatctcaaccctcaggctgcctccggatccaccgaagctacttctggcacttctgagctcgttatgctgtctcttgagttagtgaagacccggctcgccgtaatgtccatggagatgaggaaaaattttatccaagctattcttacatcacttatagagaagagcccagacgccaaaatccttcgagccgtagttaaaatcgtggaagagtgggttaagaataattcccccatggccgcaaaccagacccccacactccgagagaaaagtatccttctcgtgaagatgatgacctacatcgagaaacggtttcccgaggatctggagctgaatgcacaatttcttgaccttgtgaattatgtgtatcgggatgagacactctccggcagcgaactgaccgccaaactggagcccgcatttctgtctgggttgaggtgcgcccaaccgcttatccgcgcaaaatttttcgaagtgtttgataactccatgaaaaggcgcgtgtatgagaggttgctgtacgtcacatgcagtcagaactgggaggccatgggaaaccacttctggattaaacaatgtatcgaactgctcttggctgtttgcgagaaatctactcctattggcactagctgccagggagctatgctgccctccatcaccaatgtgatcaacctggccgatagccatgacagagctgcttttgccatggtaactcacgttaaacaggagccccgtgaacgggagaattctgaatctaaggaggaggatgttgaaatcgacatcgagcttgctcccggagatcagacttctacccccaagaccaaagagctctctgagaaggatataggcaatcaattacacatgttgaccaacagacacgacaaatttttggatactttaagagaagttaaaactggcgctttattatcggctttcgtccaactgtgccatatctccaccacactggctgaaaagacatgggttcagctgtttccgagactatggaaaatcctctctgaccgtcagcagcacgctttggcaggtgagatttcacccttcctgtgttctggcagtcaccaggtgcagcgagattgtcagcctagtgccctgaactgcttcgtggaagctatgtcccaatgcgtcccacccattccgatccggccatgcgtgctgaaataccttggaaaaacgcacaatctttggtttcgttcgacactgatgctcgagcaccaggctttcgagaaggggctgtcgttgcagatcaagcccaagcagaccacggagttctatgaacaagagtctataacccctccccagcaggagatattagattccctcgctgagctttatagcctgctgcaggaagaggacatgtgggccggtttgtggcaaaaaaggtgtaagtattccgagactgcaaccgctatcgcatacgaacaacacggtttcttcgagcaggcccaggaatcgtatgagaaagccatggataaagccaagaaggaacatgaacgaagcaatgcgagtcccgctattttccctgaatatcaactgtgggaagatcactggatccggtgtagtaaggagctgaatcagtgggaagcactcacagagtatggacagtctaagggccacatcaatccatatctggtcctggagtgcgcatggagggtctcaaattggaccgccatgaaagaggccctggtgcaggtggaggtgtcctgccctaaggagatggcatggaaagtgaacatgtataggggctatctggccatctgccatcccgaagagcagcagctctcctttatcgagcgactggtcgagatggcaagtagtctcgctatccgtgagtggaggagacttccccacgttgtctcacacgttcatacgccactgctgcaagccgcacaacagataattgagctgcaggaagccgctcagatcaacgctggcctgcagccgacaaacctggggaggaacaactctttacacgatatgaagaccgtggtgaaaacctggcgaaatcgactccctatcgtgtccgatgatttgtctcactggtcaagcatatttatgtggaggcagcaccattaccaggctattgtgaccgcctacgaaaactcgtcacagcacgaccccagtagcaacaatgcgatgctaggcgtgcatgctagcgcctccgcaattatacaatatggaaaaattgcacggaagcaggggttggttaacgtcgctctggatattttatcaagaatccataccatccccaccgtgcccatcgtggattgtttccagaagattcgccaacaggtgaagtgttacctccagctagctggagtgatggggaaaaacgagtgtatgcaaggcctggaggttattgaatccactaacctaaaatactttactaaagaaatgacagccgagttctacgctctcaaagggatgttcctggctcaaattaacaagtccgaagaagcaaataaagcattcagtgccgctgtgcagatgcacgacgtgcttgtgaaagcctgggcaatgtggggagactacctggaaaacatctttgttaaggagcggcagctccacctgggcgtgagcgctattacctgctacttgcatgcatgtcgacaccagaatgagtctaaatcacggaagtacctggccaaggtcctctggttactgtcctttgatgacgacaaaaataccctcgccgatgccgtcgacaagtattgtatcggcgtgccaccaatccagtggttggcctggatccctcagcttcttacttgcttagtgggcagtgaaggcaagctccttctaaatctcatttcacaggtcggcagagtctacccacaggcggtgtacttccctattagaacgctctacctgactctgaagatagagcagagagagaggtataaatctgatccgggaccaatccgtgccacggcaccgatgtggcgctgctcaagaataatgcatatgcagcgggaattacatcccacacttctgtccagcctggagggcatagtggatcagatggtctggtttcgcgaaaattggcatgaagaggtccttcggcaattgcagcagggccttgccaagtgctactctgtggctttcgagaaaagtggagccgtgtctgatgccaaaatcacccctcacaccttaaactttgttaaaaaactcgtttccactttcggcgtgggcctagaaaacgtgtccaatgtgtcgaccatgttttcctctgctgcgagcgaatctctggcgaggcgagcacaggcgacggcacaggacccggtcttccaaaagctcaaagggcagtttacgactgacttcgatttctctgttccagggagcatgaaactccacaacttgatttctaaacttaaaaagtggattaagatcctggaggccaaaactaaacagctacccaagttctttctgatcgaggagaagtgccgattcttgtctaacttttcggcgcagaccgctgaagtggaaatacccggagaattcctgatgccaaaacctactcattactacatcaaaattgccagattcatgccgcgagtggagatcgtacaaaaacacaacacagccgctcggagactgtacatccggggtcacaacgggaaaatctatccttaccttgtcatgaacgacgcgtgtcttaccgaaagtcggagggaggagcgagttcttcagttactgaggctgctgaatccctgcctggagaagcgaaaggagacaactaaacgccatctattctttacagtacccagagtggtcgctgtgtcgccacaaatgcgccttgtggaggataatccatcatctctttcactggttgagatctacaagcaacgctgcgccaagaagggtatcgaacatgataacccaatcagccgctattatgatcggcttgccactgtccaggccagagggacgcaggcatcacatcaggtacttcgcgacattttgaaggaagtgcagtctaatatggttcctcgcagtatgctgaaggagtgggcattacatacattcccgaacgccactgattattggacctttcgaaaaatgttcacgattcagctcgctctcattggattcgctgaattcgtgctgcacctgaataggctgaatcctgagatgctccagatcgcgcaggataccgggaagctgaacgtagcctacttccgcttcgacatcaacgatgctacaggtgatctagacgcgaacaggcccgtaccatttaggttgactccaaacatcagcgaatttctgactactatcggagtgtctggcccactgacagcgtctatgattgcggtggcgcgatgttttgcccagccaaacttcaaggtcgacggcattcttaaaacagtattgcgcgacgagataattgcgtggcataaaaagacacaggaggacactagctctccgctttctgcagcgggacagccagagaacatggattctcaacagctggtgtcactggtccagaaagcagtcacagcaataatgacacgactgcataaccttgctcaattcgagggaggcgaatctaaagtgaacaccttagtcgccgctgctaatagtttggataacctctgcagaatggacccagcctggcatccttggctgtag

SEQ ID NO: 138737 - DNA, 216 bp, Artificial Sequence
  derived and/or modified sequence
atggccttcgtggcgacgcagggtgccactgtggtggatcagaccacactcatgaagaaatacctccagtttgtggccgcactaactgacgtcaacaccccagacgaaactaagcttaagatgatgcaggaagtgtccgaaaactttgagaatgtcacatcctcaccgcagtattccacgtttctggagcatattattccgaggtttttaacatag

SEQ ID NO: 138738 - DNA, 12590 bp, Artificial Sequence
  derived and/or modified sequence
cgcgccggggcctggtgctcggtcggcgggtgctgccgctttaagcgggggcgggactgcgcgcggccgagcggttgcgacgagggctcggctgggggtcgccggggtcgcgggccgggcctgcaggagccgggccgccgaggtcggggctggttgaactcatggacctgatacttttctcttgagaagcaaaccagcccaaaagaaaaatggcgtttgttgcaacacagggggccacggtggttgaccagaccactttgatgaaaaagtaccttcagtttgtggcagctctcacagatgtgaatacacctgatgaaacaaagttgaaaatgatgcaagaagttagtgaaaattttgagaatgtcacgtcatctcctcagtattctacattcctagaacatatcatccctcgattccttacatttctccaagatggagaagttcagtttcttcaggagaaaccagcacagcaactgcggaagctcgtacttgaaataattcatagaataccaaccaacgaacatcttcgtcctcacacaaaaaatgttttgtctgtgatgtttcgctttttagagacggaaaatgaagaaaatgttcttatttgtctaagaataattattgagctacacaaacagttcaggccaccgatcacacaagaaattcatcattttctggattttgtgaaacagatttacaaggagcttccaaaagtagtgaaccgctactttgagaaccctcaagtgatccccgagaacacagtgcctcccccagaaatggttggtatgataacaacgattgctgtgaaagtcaacccggagcgtgaggacagtgagactcgaacacattccatcattccgaggggatcactttctctgaaagtgttggcagaattgcccattattgttgttttaatgtatcagctctacaaactgaacatccacaatgttgttgctgagtttgtgcccttgatcatgaacaccattgccattcaggtgtctgcacaagcgaggcaacataagctttacaacaaggagttgtatgctgacttcattgctgctcagattaaaacattgtcatttttagcttacattatcaggatttaccaggagttggtgactaagtattctcagcagatggtgaaaggaatgctccagttactttcaaattgtccagcagagactgcacacctcagaaaggagcttctgattgctgccaaacacatcctcaccacagagctgagaaaccagttcattccttgcatggacaagctgtttgatgaatccatactaattggctcaggatatactgccagagagactctaaggcccctcgcctacagcacgctggccgacctcgtgcaccatgtccgccagcacctgcccctcagcgacctctccctcgccgtccagctcttcgccaagaacatcgacgatgagtccctgcccagcagcatccagaccatgtcctgcaagctcctgctgaacctggtggactgcatccgttccaagagcgagcaggagagtggcaatgggagagacgtcctgatgcggatgctggaggttttcgttctcaaattccacacaattgctcggtaccagctctctgccatttttaagaagtgtaagcctcagtcagaacttggagccgtggaagcagctctgcctggggtgcccactgcccctgcagctcctggccctgctccctccccagcccctgtccctgccccacctccacccccgcccccacccccacctgccacccctgtgaccccggcccccgtgcctcccttcgagaagcaaggagaaaaggacaaggaagacaagcagacattccaagtcacagactgtcgaagtttggtcaaaaccttggtgtgtggtgtcaagacaatcacgtggggcataacatcatgcaaagcacctggtgaagctcagttcattcccaacaagcagttacaacccaaagagacacagatttacatcaaacttgtgaaatatgcaatgcaagctttagatatttatcaggtccagatagcaggaaatggacagacatacatccgtgtggccaactgccagactgtgagaatgaaagaggagaaggaggtattggagcatttcgctggtgtgttcacaatgatgaaccccttaacgttcaaagaaatcttccaaactacggtcccttatatggtggagagaatctcaaaaaattatgctcttcagattgttgccaattccttcttggcaaatcctactacctctgctctgtttgctacgattctggtggaatatctccttgatcgcctgccagaaatgggctccaacgtggagctctccaacctgtacctcaagctgttcaagctggtctttggctctgtctccctctttgcagctgaaaatgaacaaatgctgaagcctcacttgcacaagattgtgaacagctctatggagctcgcgcagactgccaaggaaccctacaactacttcttgctgctacgggcgctgtttcgctctattggtggaggtagccacgatctcttgtatcaggagttcttgcctctccttccaaacctcctgcaagggctgaacatgcttcagagtggcctgcacaagcagcacatgaaggacctctttgtggagctgtgtctcaccgtccctgtgcggctgagctcgcttttgccgtacctgcccatgcttatggatcccttggtgtctgcactcaatgggtctcagacattggtcagccaaggcctcaggacgctggagctgtgtgtggacaacctgcagcccgacttcctctacgaccacatccagccggtgcgcgcagagctcatgcaggctctgtggcgcaccttacgcaaccctgctgacagcatctcccacgtggcctaccgtgtgctcggtaagtttggcggcagtaacaggaagatgctgaaggagtcgcagaagctgcactacgttgtgaccgaggttcagggccccagcatcactgtggagttttccgactgcaaagcttctctccagctccccatggagaaggccattgaaactgctctggactgcctgaaaagcgccaacactgagccctactaccggaggcaggcgtgggaagtgatcaaatgcttcctggtggccatgatgagcctggaggacaacaagcacgcactctaccagctcctggcacaccccaactttacagaaaagaccatccccaatgttatcatctcacatcgctacaaagcccaggacactccagcccggaagacttttgagcaggccctgacaggcgccttcatgtctgctgtcattaaggacctgcggcccagcgccctgccctttgtcgccagcttgatccgccactatacgatggtggcagtcgcccagcagtgtggccctttcttgctgccttgctaccaggtgggcagccagcccagcacagccatgtttcacagtgaagaaaatggctcgaaaggaatggatcctttggttctcattgatgcaattgctatttgtatggcatatgaagaaaaggagctttgcaaaatcggggaggtggccctagctgtgatatttgatgttgcaagtatcatcctgggctccaaggagagggcctgccagctgcccctgttttcttacatcgtggagcgcctgtgtgcatgttgttatgaacaggcgtggtatgcaaagctggggggtgtggtgtctattaagtttctcatggagcggctgcctctcacttgggttctccagaaccagcagacattcctgaaagcacttctctttgtcatgatggacttaactggagaggtttccaatggggcagtcgctatggcaaagaccacgctggagcagcttctgatgcggtgcgcaacgcctttaaaagacgaggagagagccgaagagatcgtggccgcccaggaaaagtctttccaccatgtgacacacgacttggttcgagaagtcacctctccaaactccactgtgaggaagcaggccatgcattcgctgcaggtgttggcccaggtcactgggaagagtgtcacggtgatcatggaaccccacaaagaggtcctgcaggatatggtcccccctaagaagcacctgctccgacaccagcctgccaacgcacagattggcctgatggaggggaacacgttctgtaccacgttgcagcccaggctcttcacaatggaccttaacgtggtggagcataaggtgttctacacagagctgttgaatttgtgtgaggctgaagattcagctttaacaaagctgccctgttataaaagccttccgtcactcgtacctttacgaattgcggcattaaatgcacttgctgcctgcaattaccttcctcagtccagggagaaaatcatcgctgcactcttcaaagccctgaattccaccaatagtgagctccaagaggccggagaagcctgtatgagaaagtttttagaaggtgctaccatagaagtcgatcaaatccacacacatatgcgacctttgctgatgatgctgggagattaccggagcttgacgctgaatgttgtgaatcgcctgacttcggtcacgaggctcttcccaaattccttcaatgataaattttgtgatcagatgatgcaacatctgcgcaagtggatggaagtggtggtgatcacccacaaagggggccagaggagcgacggaaacgaaatgaagatttgctcagcaattataaacctttttcatctgatcccggctgctcctcagacactggtgaagcctttgctagaggttgtcatgaaaacggagcgggcgatgctgatcgaggcggggagtccattccgagagcccctgatcaagttcctgactcgacatccctcgcagacagtggagctgttcatgatggaagccacactgaacgatccccagtggagcagaatgtttatgagttttttaaaacacaaagacgccagacctctgcgggatgtgctggctgccaaccccaacaggttcatcaccctgctgctgccggggggtgcccagacggctgtgcgccccggttcgcccagcaccagcaccatgcgcctggacctccagttccaggccatcaagatcataagcattatagtgaaaaacgatgactcctggctggccagccagcactctctggtgagccagttgcgacgtgtgtgggtgagtgagaacttccaagagaggcaccgcaaggagaacatggcagccaccaactggaaggagcccaagctgctggcctactgcctgctgaactactgcaaaaggaattacggagatatagaattgctgttccagctgctccgagcctttactggtcgttttctctgcaacatgacattcttaaaagagtatatggaggaagagattcccaaaaattacagcatcgctcagaaacgtgccctgttctttcgctttgtagacttcaacgaccccaacttcggagatgaattaaaagctaaagttctgcagcatatcttgaatcctgctttcttgtacagctttgagaagggggaaggagagcagctcttgggacctcccaatccagaaggagataacccagaaagcatcaccagtgtgtttattaccaaggtcctggaccccgagaagcaggcggacatgctggactcgctgcggatctacctgctgcagtacgccacgctgctggtggagcacgccccccaccacatccatgacaacaacaagaaccgcaacagcaagctgcgccgcctcatgaccttcgcctggccctgcctgctctccaaggcctgcgtggacccagcctgcaagtacagcggacacttgctcctggcgcacattatcgccaaattcgccatacacaagaagatcgtcctgcaggtttttcatagtctcctcaaggctcacgcaatggaagctcgagcgatcgtcagacaggcgatggccattctgaccccggcggtgccggccaggatggaggacgggcaccagatgctgacccactggacccggaagatcattgtggaggaggggcacaccgtcccgcagctggtccacattctgcacctgatagtgcaacacttcaaggtgtactacccggtacggcaccacttggtgcagcacatggtgagcgccatgcagaggctgggcttcacgcccagtgtcaccatcgagcagaggcggctggccgtggacctgtctgaagtcgtcatcaagtgggagctgcagaggatcaaggaccagcagccggattcagatatggacccaaattccagtggagaaggagtcaattctgtctcatcctccattaagagaggcctgtccgtggattctgcccaggaagtgaaacgctttaggacggccaccggagccatcagtgcagtctttgggaggagccagtcgctacctggagcagactctctcctcgccaagcccattgacaagcagcacacagacactgtggtgaacttccttatccgcgtggcctgtcaggttaatgacaacaccaacacagcggggtcccctggggaggtgctctctcgccggtgtgtgaaccttctgaagactgcgttgcggccagacatgtggcccaagtccgaactcaagctgcagtggttcgacaagctgctgatgactgtggagcagccaaaccaagtgaactatgggaatatctgcacgggcctagaagtgctgagcttcctgctaactgtcctccagtccccagccatcctcagtagcttcaaacctctgcagcgtggaattgccgcctgcatgacatgtggaaacaccaaggtgttgcgagccgtccacagccttctctcgcgcctgatgagcattttcccaacagagccgagtacttccagtgtggcctccaaatatgaagagctggagtgcctctacgcagccgtcggaaaggtcatctatgaagggctcaccaactacgagaaggccaccaatgccaatccctcccagctcttcgggacccttatgatcctcaagtctgcctgcagcaacaaccccagctacatagacaggctgatctccgtctttatgcgctccctgcagaagatggtccgggagcatttaaaccctcaggcagcgtcaggaagcaccgaagccacctcaggtacaagcgagctggtgatgctgagtctggagctggtgaagacgcgcctggcagtgatgagcatggagatgcggaagaacttcatccaggccatcctgacatccctcatcgaaaaatcaccagatgccaaaatcctccgggctgtggtcaaaatcgtggaagaatgggtcaagaataactccccaatggcagccaatcagacacctacactccgggagaagtccattttgcttgtgaagatgatgacttacatagaaaaacgctttccggaagaccttgaattaaatgcccagtttttagatcttgttaactatgtctacagggatgagaccctctctggcagcgagctgacggcgaaacttgagcctgcctttctctctgggctgcgctgtgcccagccactcatcagggcaaagtttttcgaggtttttgacaactccatgaaacgtcgtgtctacgagcgcttgctctatgtgacctgttcgcagaactgggaagccatggggaaccacttctggatcaagcagtgcattgagctgcttctggccgtgtgtgagaagagcacccccattggcaccagctgccaaggagccatgctcccgtccatcaccaacgtcatcaacctggccgatagccacgaccgtgccgccttcgccatggtcacacatgtcaagcaggagccccgggagcgggagaacagcgagtccaaagaggaggatgtagagatagacatcgaactagctcctggggatcagaccagcacgcccaaaaccaaagaactttcagaaaaggacattggaaaccagctgcacatgctaaccaacaggcacgacaagtttctggacactctccgagaggtgaagactggagcgctgctcagcgctttcgttcagctgtgccacatttccacgacgctggcagagaagacgtgggtccagcttttccccagattgtggaagatcctctctgacagacagcagcatgcactcgcgggtgagataagtccatttctgtgcagcggcagtcaccaggtgcagcgggactgccagcccagcgcgctgaactgctttgtggaagccatgtcccagtgcgtgccgccaatccccatccgaccctgcgtcctgaagtacctggggaagacacacaacctctggttccggtccacgctgatgttggagcaccaggcttttgaaaagggtctgagtcttcagattaagccgaagcaaacaacggagttttatgagcaggagagcatcaccccgccgcagcaggagatactggattcccttgcggagctttactccctgttacaagaggaagatatgtgggctggtctgtggcagaagcggtgcaagtactcggagacagcgactgcgattgcttacgagcagcacgggttctttgagcaggcacaagaatcctatgaaaaggcaatggataaagccaaaaaagaacatgagaggagtaacgcctcccctgctattttccctgaataccagctctgggaagaccactggattcgatgctccaaggaattgaaccagtgggaagccctgacggagtacggtcagtccaaaggccacatcaacccctacctcgtcctggagtgcgcctggcgggtgtccaactggactgccatgaaggaggcgctggtgcaggtggaagtgagctgtccgaaggagatggcctggaaggtgaacatgtaccgcggatacctggccatctgccaccccgaggagcagcagctcagcttcatcgagcgcctggtggagatggccagcagcctggccatccgcgagtggcggcggctgccccacgtagtgtcccacgtgcacacgcctctcctacaggcagcccagcaaatcatcgaactccaggaagctgcacaaatcaacgcaggcttacagccaaccaacctgggaaggaacaacagcctgcacgacatgaagacggtggtgaagacctggaggaaccgactgcccatcgtgtctgacgacttgtcccactggagcagcatcttcatgtggaggcagcatcattaccaggcgattgtaactgcctatgagaatagctctcagcatgatcccagttcaaataacgctatgcttggggttcatgcatcagcttcagcgatcatccagtatggaaaaatcgcccggaaacaaggactggtcaatgtagctctggatatattaagtcggattcatactattccaactgttcctatcgtggattgcttccagaagattcgacagcaagttaaatgctacctccagctggcaggcgtcatgggcaaaaacgagtgcatgcagggccttgaagttattgaatctacaaatttaaaatacttcacaaaagagatgacagccgaattttatgcactgaagggaatgttcttggctcagatcaacaagtccgaggaggcaaacaaagccttctctgcagctgtgcagatgcacgatgtgctggtgaaagcctgggccatgtggggcgactacctggagaacatctttgtgaaggagcggcagctgcacctgggcgtgtctgccatcacctgctacctgcacgcctgccggcatcagaacgagagcaaatcgaggaaatacttagccaaggtgctgtggcttttgagttttgatgatgacaaaaacactttggcagatgccgtcgacaagtactgcattggtgtgccacccatccagtggctggcctggatcccacagctgctcacctgcctggttggctcggagggaaagctgctcttgaacctcattagccaggttggacgcgtgtatccccaagcggtctactttcccatccggaccctgtacctgaccctgaaaatagaacagcgggaacgctacaagagcgatccagggcccataagagcaacagcacccatgtggcgctgcagccgaatcatgcacatgcagcgagagctccaccccacccttctgtcttccctggaaggcatcgtcgatcagatggtctggttcagagaaaattggcatgaagaggttctcaggcagctccaacagggcctggcgaaatgttactccgtggcgtttgagaaaagtggagcggtgtccgatgctaaaatcaccccccacactctcaattttgtgaagaagttggtgagcacgtttggggtgggcctggagaatgtgtccaacgtctcgaccatgttctccagcgcagcctctgagtctctggcccggcgggcgcaggccactgcacaagaccctgtctttcagaagctgaaaggccagttcacgacggattttgacttcagcgttccaggatccatgaagcttcataatcttatttctaagttgaaaaagtggatcaaaatcttggaggccaagaccaagcaactccccaaattcttcctcatagaggaaaagtgccggttcttgagcaatttctcggcacagacagctgaagtggaaattcctggggagtttctgatgccaaagccaacgcattattacatcaagattgcacggttcatgccccgggtagagattgtgcagaagcacaacaccgcagcccggcggctgtacatccggggacacaatggcaagatctacccatacctcgtcatgaacgacgcctgcctcacagagtcacggcgagaggagcgtgtgttgcagctgctgcgtctgctgaacccctgtttggagaagagaaaggagaccaccaagaggcacttgtttttcacagtgccccgggttgtggcagtttccccacagatgcgcctcgtggaggacaacccctcttcactttcccttgtggagatctacaagcagcgctgcgccaagaagggcatcgagcatgacaaccccatctcccgttactatgaccggctggctacggtgcaggcgcggggaacccaagccagccaccaggtcctccgcgacatcctcaaggaggttcagagtaacatggtgccgcgcagcatgctcaaggagtgggcgctgcacaccttccccaatgccacggactactggacgttccggaagatgttcaccatccagctggctctgataggcttcgcggaattcgtcctgcatttaaatagactcaaccccgagatgttacagatcgctcaggacactggcaaactgaatgttgcctactttcgatttgacataaacgacgcgactggagacctggatgccaaccgtcctgtcccatttcgactcacgcccaacatttctgagtttctgaccaccatcggggtctccggcccgttgacagcgtccatgattgcggtcgcccggtgcttcgcccagccaaactttaaggtggatggcattctgaaaacggttctccgggacgagatcattgcttggcacaaaaaaacacaagaggacacgtcctctcctctctcggccgccgggcagccagagaacatggacagccagcaactggtgtccctggttcagaaagccgtcaccgccatcatgacccgcctgcacaacctcgcccagttcgaaggcggggaaagcaaggtgaacaccctggtggccgcggcaaacagcctggacaatctgtgccgcatggaccccgcctggcacccctggctgtgactgtggccgccacggccacccggaatgtgaagggcgctccgggctctgagcccgcagcttttacgacttctccctgcctcgttccttatattcacagaagccccatagtttcactgggttgcggttattttcctggtagtttgcgtgtaagaaagggagaatatagttttagaggaagctgaactatgacgatgctgggcgaagcggttggaaatggcagagctgaaacttattccaagctttcaaaataatcttttaagaagccaggattctccggtctggaatttctgagtgagtcctttttttatggtgtcctccctctgtgaatgtacaggcggaactgtacgaacagctcccttccatccatttttaactctttcggaaataacacctcacagcagcttcgtgcttttgtacagacctttgtaacaagtgtacagaaaactcattttgtttgagaaacaggagttgatgaacccatcatgctggtttttctctgagcacaaagttttaggctgtacacagccagccttgggaatctcgttgagcgttcggcgtggatccacggggccaggccaccctgcgggagcgccacacgcatccacttcggattcagtgggtgaagacagaactctgagagtctgcaggcggctcctgtgctttttatttctggctcttcggatgtcttctagacatttactatcactgcacctgaagaaaaaatcacttttaccttcctaatttaaaaagacaaaacagaaatgtacgttccttcgctagctttagtctttctgttcccatttttataaatctgagcattgataatgttctatctaaatttgtacagtgtgatttttttttttagaataaatattttataaaagggtt

SEQ ID NO: 138739 - DNA, 550 bp, Artificial Sequence
  derived and/or modified sequence
aggcctctctccatccagttttgatggaggtagctctgcctgccatgtggatccagcctcggagggtctcggtccatctccagccgtcaccttcccaaagaccctcctggcctcctctccattctgcgggccgagaagaaccccaggagagcagcggggaccgggagcgaggagtgggggtggcaaaccctaccctgcctgccaccttcagtccagtggtggacaatacctggaccccatagctgccaactcgggaagccgcgcccccccccaggctggttgaactcatggacctgatacttttctcttgagaagcaaaccagcccaaaagaaaaatggcgtttgttgcaacacagggggccacggtggttgaccagaccactttgatgaaaaagtaccttcagtttgtggcagctctcacagatgtgaatacacctgatgaaacaaagttgaaaatgatgcaagaagttagtgaaaattttgagaatgtcacgtcatctcctcagtattctacattcctagaacatatcatccctcgattccttacatt

SEQ ID NO: 138740 - protein, 681 aa, Artificial Sequence
  derived and/or modified sequence
MGSPVHRVSLGDTWSRQMHPDIESERYMQSFDVERLTNILDGGAQNTALRRKVESIIHSYPEFSCKDNYFMTQNERYKAAMRRAFHIRLIARRLGWLEDGRELGYAYRALSGDVALNIHRVFVRALRSLGSEEQIAKWDPLCKNIQIIATYAQTELGHGTYLQGLETEATYDAATQEFVIHSPTLTATKWWPGDLGRSATHALVQAQLICSGARRGMHAFIVPIRSLQDHTPLPGIIIGDIGPKMDFDQTDNGFLQLNHVRVPRENMLSRFAQVLPDGTYVKLGTAQSNYLPMVVVRVELLSGEILPILQKACVIAMRYSVIRRQSRLRPSDPEAKVLDYQTQQQKLFPQLAISYAFHFLAVSLLEFFQHSYTAILNQDFSFLPELHALSTGMKAMMSEFCTQGAEMCRRACGGHGYSKLSGLPSLVTKLSASCTYEGENTVLYLQVARFLVKSYLQTQMSPGSTPQRSLSPSVAYLTAPDLARCPAQRAADFLCPELYTTAWAHVAVRLIKDSVQHLQTLTQSGADQHEAWNQTTVIHLQAAKVHCYYVTVKGFTEALEKLENEPAIQQVLKRLCDLHAIHGILTNSGDFLHDAFLSGAQVDMARTAYLDLLRLIRKDAILLTDAFDFTDQCLNSALGCYDGNVYERLFQWAQKSPTNTQENPAYEEYIRPLLQSWRSKL

SEQ ID NO: 138741 - protein, 171 aa, Artificial Sequence
  derived and/or modified sequence
MGSPVHRVSLGDTWSRQMHPDIESERYMQSFDVERLTNILDGGAQNTALRRKVESIIHSYPEFSCKDNYFMTQNERYKAAMRRAFHIRLIARRLGWLEDGRELGYAYRALSGDVALNIHRVFVRALRSLGSEEQIAKWDPLCKNIQIIATYAQTELGHGTYLQGLETEATY

SEQ ID NO: 138742 - DNA, 2046 bp, Artificial Sequence
  derived and/or modified sequence
atgggctcgccggtccaccgcgtgagcctgggggacacatggtcccgccagatgcatcccgatattgagtccgaaaggtatatgcagtcctttgacgtcgagcgcctgaccaacatcctggatgggggtgcacagaatacagctttaaggcgtaaagtggaaagtatcatacactcttatcctgagttttcctgcaaggacaactacttcatgacgcagaacgaacgttacaaggcggccatgcgaagagcatttcacataaggctcattgcacggcggctgggatggctcgaggatgggcgggagctagggtatgcgtaccgtgctctgtctggagacgtggcgctgaacatccacagagtcttcgtccgtgcacttcggagcctgggatccgaggaacagatcgctaaatgggaccctctatgcaaaaacatccagattattgcaacttacgctcagactgaactgggccatggcacttatctgcagggcttggagacagaggcaacatatgacgctgccacacaggagtttgtcatccatagccccaccctcaccgcgactaagtggtggcccggtgacctcggccgaagtgcaactcacgcccttgtccaggctcagctgatatgctctggcgctcggagaggcatgcatgctttcatcgtaccaattcggagcctgcaggaccacacccctctgcccggcatcattattggggatataggtcctaaaatggatttcgaccagaccgataatgggttcttgcagttaaatcacgttcgcgtccctagggaaaacatgttgagcaggttcgcccaggtgctgcctgatggtacttatgtgaaactcggtacggcccagtcgaactatctccctatggtggtcgttagggtggagcttctatcaggcgaaatcctcccgattcttcaaaaggcctgcgtaattgccatgcgatacagcgtgatccggcgccagagtcgactgcggccctcagaccctgaagctaaggtgttagactatcagactcagcaacaaaagctatttccccagcttgccatctcatacgccttccatttcctcgcagtatctcttctggagttttttcagcactcttatacggcaatattaaatcaggatttttcctttcttccagaactacatgcattgtctaccggcatgaaagctatgatgagcgagttttgtacccagggcgccgaaatgtgccgtagggcctgtggagggcatggatattctaagctgtcaggcctcccgtccctggtcacaaaactaagcgcatcttgtacttacgagggcgagaacaccgtcctttacctgcaggtcgcgagattcttggtcaagagctatttacagacccagatgagtccagggtctacgccgcaacgcagcctatctccgtccgtcgcatatctgaccgcgcctgaccttgccaggtgccccgcgcagcgcgcagctgatttcctgtgcccagaactttacactaccgcatgggcgcatgtggcagtgcgcctgatcaaggactccgttcagcatcttcagactctgacccagtcaggcgcagatcagcatgaagcatggaaccaaacaacagttatccatctccaggccgctaaggtacactgttactacgtaacggtcaagggtttcacggaagcactggagaagctggagaacgagcccgcaatccaacaggtccttaagcgactctgcgatttacacgctatccatgggatcctgacgaactcaggagatttcctgcatgacgcctttttatccggagctcaggtggacatggctcgtactgcctatctggatctgctcagactcatcagaaaggacgcaatcctgctcacagatgctttcgactttacggaccagtgtctcaatagcgccttgggttgttatgatggcaatgtttatgaacgcttgttccagtgggcccagaaatcgcctactaacactcaggagaatcctgcttatgaggagtacatccgaccacttctgcagtcctggagatcaaagttatag

SEQ ID NO: 138743 - DNA, 516 bp, Artificial Sequence
  derived and/or modified sequence
atgggatcccctgtccacagagtgtccctcggcgacacctggtctcgccagatgcacccggacatagagagcgaacgatatatgcaatcattcgatgttgagcgcctgacaaacatcttggatggcggtgcgcagaacaccgctttgaggcgcaaggtggagtctatcattcattcataccccgagttcagttgtaaggacaattattttatgacacaaaacgagcgatataaggctgctatgcgcagagcttttcacatccggctgattgctcggcgcctagggtggctagaggatggcagagagcttgggtacgcttatcgggctcttagcggggatgtggctcttaatatccatagagtctttgttcgtgcgttgcggtctctagggtccgaagaacagatagcaaagtgggaccccctatgcaagaacatccagatcattgctacatacgcccagacagagttaggacacgggacctacctgcaaggcctggaaacagaggccacctactag

SEQ ID NO: 138744 - DNA, 2046 bp, Artificial Sequence
  derived and/or modified sequence
atgggcagccctgtgcaccgggtgtccctgggggacacctggagccggcagatgcacccagacatcgagagcgagcgctacatgcagagctttgatgtggagcggctgaccaacatcctggatggaggagcccagaacacagccctgcggaggaaggtggagagcatcatccacagctacccagagttcagctgcaaggacaactacttcatgacccagaatgaaagatacaaggccgccatgaggcgggccttccacatccgcctcatcgcccggcggctgggctggctggaggatggccgggagctgggctacgcctaccgggccctgtctggagatgtggccctgaacatccaccgggtgtttgtgcgggccctgcggagcctgggcagcgaggagcagatcgccaagtgggaccccctgtgcaagaacatccagatcatcgccacctacgcccagacagagctgggccacggcacctacctgcagggcctggagacagaggccacctatgatgctgccacccaggagtttgtgatccacagccccaccctgacagccaccaagtggtggccaggggacctgggccgcagcgccacccacgccctggtgcaggcccagctgatctgcagcggggcccggcggggcatgcacgccttcatcgtgcccatccgcagcctgcaggaccacacccccctgcccggcatcatcatcggggacatcggccccaagatggactttgaccagacagacaatggcttcctgcagctgaaccacgtgcgggtgccccgggagaacatgctgagcagatttgcccaggtgctgcctgatggcacctacgtgaagctgggcacagcccagagcaactacctgcccatggtggtggtgcgggtggagctgctgagcggggagatcctgcccatcctgcagaaggcctgtgtgattgccatgagatacagcgtcatccggcggcagagccggctgcggcccagcgaccctgaggccaaggtgctggactaccagacccagcagcagaagctgttcccccagctggccatctcctatgccttccacttcctggccgtgtccctgctggagttcttccagcacagctacacagccatcctgaaccaggacttctccttcctgcctgagctgcacgccctgagcacaggcatgaaggccatgatgtctgagttctgcacccagggcgctgagatgtgcagaagagcctgtggcggccacggctacagcaagctgagcggcctgcccagcctggtgaccaagctgagcgccagctgcacctatgaaggagaaaatacagtgctgtacctgcaggtggcccgcttcctggtgaagagctacctgcagacccagatgagccctggcagcaccccccagaggagcctgagccccagcgtggcctacctgacagccccagacctggcccgctgcccagcccagagagctgctgacttcctgtgcccagagctgtacaccacagcctgggcccacgtggccgtgcggctcatcaaggacagcgtgcagcacctgcagaccctgacccagagcggggctgaccagcacgaggcctggaaccagaccaccgtcatccacctgcaggccgccaaggtgcactgctactacgtgacagtgaagggcttcacagaggccctggagaagctggagaatgagcccgccatccagcaggtgctgaagaggctgtgtgacctgcacgccatccacggcatcctgaccaacagcggggacttcctgcatgatgccttcctgagcggggcccaggtggacatggccaggacagcctacctggacctgctgcggctcatcaggaaggatgccatcctgctgacagatgcctttgacttcacagaccagtgcctgaacagcgccctgggctgctatgatggaaatgtgtatgaaagactcttccagtgggcccagaagagccccaccaacacccaggagaacccagcctatgaggagtacatccggcccctgctgcagagctggaggagcaagctgtag

SEQ ID NO: 138745 - DNA, 516 bp, Artificial Sequence
  derived and/or modified sequence
atgggcagccctgtgcaccgggtgtccctgggggacacctggagccggcagatgcacccagacatcgagagcgagcgctacatgcagagctttgatgtggagcggctgaccaacatcctggatggaggagcccagaacacagccctgcggaggaaggtggagagcatcatccacagctacccagagttcagctgcaaggacaactacttcatgacccagaatgaaagatacaaggccgccatgaggcgggccttccacatccgcctcatcgcccggcggctgggctggctggaggatggccgggagctgggctacgcctaccgggccctgtctggagatgtggccctgaacatccaccgggtgtttgtgcgggccctgcggagcctgggcagcgaggagcagatcgccaagtgggaccccctgtgcaagaacatccagatcatcgccacctacgcccagacagagctgggccacggcacctacctgcagggcctggagacagaggccacctactag

SEQ ID NO: 138746 - DNA, 2046 bp, Artificial Sequence
  derived and/or modified sequence
atgggcagccccgtgcaccgggtgagcctgggcgacacctggagcagacagatgcacccagacatagagagcgagaggtatatgcagtcgttcgatgtggagcgactgaccaacatcctcgatggcggggcccagaacactgcccttcgccgcaaggtagaaagtatcatccattcttacccggagttttcctgcaaagataattacttcatgacacaaaacgagcggtacaaagccgccatgcgcagagcatttcacatccgcctcattgcaaggcggctcgggtggctggaggacggccgggagctgggatacgcatatagggcgctgtcaggggacgtcgccctgaatatccatcgagtgttcgtgagggcattgcgatcccttggcagtgaggagcaaattgctaagtgggatcctctgtgtaaaaacatccaaatcatcgccacttacgcgcaaacggagctgggccatggcacttacttgcagggcttggagacggaagctacctacgacgccgcaacgcaggagtttgtaatccactctccaacgctgactgccacaaaatggtggcctggagacctgggacgctctgccactcatgcactggtacaagcacagcttatttgcagtggggctcggcgggggatgcatgcattcattgttccaatacgcagtctgcaggatcacaccccgttacccggcataatcattggggacattggaccgaaaatggacttcgatcagacagataatggatttctgcaactgaaccacgtcagagtgccgagggagaacatgttgtctcggttcgctcaggtccttcctgatggcacatatgtgaagctggggaccgcacagagtaattacctgcccatggtggtagttcgtgtggagttgttatctggggagatactgcctatcctgcagaaggcctgcgtcatagcaatgcggtatagcgtcatcaggagacagtctcggcttcgacctagcgatcccgaggccaaagtgctagactaccagacccaacagcagaagctgtttcctcaattagcgatttcctatgcattccactttctcgcggtgtctctcctggagttttttcagcactcttatactgcaatcttaaaccaggatttctcttttctgccggaattacacgccttaagtaccgggatgaaggcgatgatgagcgaattctgcactcagggagcagagatgtgtagaagggcatgtggtgggcacggttattccaaactcagtggcctgccaagtttggttactaagctgtctgctagctgtacgtacgagggtgagaacaccgtgctgtatctccaggttgcaaggttcctggttaagtcgtacctgcagacccagatgtcccctggctccactcctcaaaggtcgttgtctccctcggttgcatacctcaccgcccctgacctggcacggtgtccagcacagagggccgccgatttcctgtgccctgagctttatactacggcatgggctcacgtggcagtgagattaattaaggacagtgttcagcacctacagactctaacacagtctggcgccgaccagcacgaagcgtggaaccaaacgactgtgattcaccttcaggctgcaaaggtgcattgctactacgtgacggtcaaaggatttactgaggcattagagaaactcgagaatgaacctgccattcagcaagtcctgaaaagactgtgtgacttgcacgctatacacgggattctcactaactcgggcgatttcttgcatgacgctttcctctctggcgcacaggtagatatggccaggaccgcataccttgacctgttacgcctgattcgcaaggacgctattcttctgacggatgcattcgacttcaccgaccagtgtctgaactccgcattgggctgttatgacggaaacgtctacgagaggttattccagtgggctcaaaaaagcccaacaaacacacaggagaatcccgcgtatgaggagtacatccgcccactattgcagagctggagatccaagctgtag

SEQ ID NO: 138747 - DNA, 516 bp, Artificial Sequence
  derived and/or modified sequence
atgggcagccccgtgcaccgggtgagcctgggcgacacctggagcagacaaatgcacccggatatcgaaagcgagagatatatgcagtctttcgatgtggagagactgaccaatattctagacggaggcgcccagaatactgccctgcgaagaaaggtggagtccatcatccactcttatccagagttcagttgtaaggacaactactttatgacccagaatgagcggtataaggccgccatgaggagagccttccatattcgattaatcgctcggaggctgggctggctcgaggacgggagggaactggggtacgcgtacagggccctttcgggggatgtggcactgaatatacaccgtgtatttgtgcgcgctctgaggtctctcggtagtgaagaacagatcgccaaatgggacccattatgcaaaaacattcagatcatcgccacgtatgctcagaccgaacttggacacgggacctatctccagggtctagagacagaagctacttattag

SEQ ID NO: 138748 - DNA, 2046 bp, Artificial Sequence
  derived and/or modified sequence
atgggatctccagtacaccgggtcagcttgggcgacacctggtccagacagatgcacccagatatcgagagcgagcggtacatgcaaagttttgatgttgagagactgactaacattctggacggaggggctcagaataccgctctgaggcgaaaggtcgaatccatcatacattcataccccgaattcagttgtaaagacaactacttcatgacccagaacgaacgatacaaggctgccatgcgtcgggcttttcacattagacttattgcaagacgtctagggtggctcgaggacggcagggagttaggctacgcttaccgtgctctctcaggagatgtggccttaaacatccaccgcgtgtttgtgcgggctctcagatctctgggcagcgaagaacagattgccaagtgggatccactctgtaagaacattcagattatagccacctacgcccagactgaactggggcacggtacctatcttcaggggctagagactgaggccacatatgacgccgctacgcaggagttcgtgattcacagtccgaccctcaccgcgacaaaatggtggccaggcgaccttggtagaagtgccacccatgctctggtgcaggctcaactcatatgctcaggtgctcgcagagggatgcatgccttcatagttccgattcgctctctgcaggaccacacacctctccccggaatcatcattggagatataggccctaaaatggactttgaccagaccgacaatggctttttgcagctgaatcacgttagagtacccagagaaaatatgctcagcaggtttgctcaggtgctgccggatgggacctatgtgaaactgggaactgctcagtctaattatctgccgatggtggtggtacgtgtggaactcctgtctggggaaatcctacctatcttgcagaaggcgtgcgtgatcgccatgagatattctgtgattcgtcgacagagccgcctgcggcctagtgaccctgaagccaaggtgttagactaccaaactcagcaacaaaaactattcccacagctggccatttcctacgcttttcatttcttagctgtgtcactgctggaatttttccagcacagctacacggccattttaaatcaggatttttcctttctgccagaactgcacgcactgtcaaccgggatgaaagctatgatgtccgagttctgcacccagggggctgagatgtgtcgaagggcctgcggaggccatggttacagcaagctgagcggcttgccaagcttggtgacgaagctctcagcatcttgcacgtacgaaggcgaaaacactgtgctgtacctgcaggttgcacgctttctagtgaagtcctacctccaaacccaaatgagtccagggtctaccccacagcggagcctgtcaccttctgtggcatatctcacagctcccgatctggccaggtgtcccgctcaaagggctgctgactttctgtgccccgagctctacaccactgcctgggcgcatgtagccgttcgcctcattaaagatagtgtgcagcacctccagactctcactcagtccggcgcagaccagcacgaagcttggaaccagactactgtgatacatctccaggcagctaaagtacactgctattacgtcacggtgaaaggttttacggaagccttagaaaagctggaaaacgagcccgcaatccaacaggttctgaaacggctgtgtgatctgcatgcaattcatgggatcctgacaaactccggcgattttctccacgacgcatttctttcgggggctcaagtcgatatggcacgaactgcctatcttgacctgctgcgcctcattaggaaggacgccatcttactgacggacgcctttgactttactgatcagtgcctcaacagcgccctcggctgctatgacggtaacgtttacgagcgcctttttcaatgggcccagaaatcccccaccaacactcaagagaaccctgcatacgaggaatacatccgacccctgctacagtcatggaggtccaagctgtag

SEQ ID NO: 138749 - DNA, 516 bp, Artificial Sequence
  derived and/or modified sequence
atgggcagtcccgtacaccgagtgtctctcggagacacctggtccaggcagatgcatccagatattgagtctgagaggtatatgcagtcttttgacgtcgagcggctcactaatatcctggacggcggtgctcagaatacggcgcttcgacgtaaagtggaaagcatcattcacagctacccagaattctcttgcaaggacaattactttatgacacaaaatgaaaggtacaaggcagctatgcgccgagcgttccacattcgcctcattgcaagacgactgggctggctggaggacgggagggagctgggctatgcttatcgcgctcttagcggagacgtggctttgaatatccaccgggtctttgtccgggcattaagatcattgggatcggaagaacagattgcaaagtgggaccctctgtgtaagaacatccagataattgcgacctacgctcaaactgagctgggacacgggacctatctccagggcttggaaactgaagccacctactag

SEQ ID NO: 138750 - DNA, 2046 bp, Artificial Sequence
  derived and/or modified sequence
atgggcagccccgtgcacagagtgagcctgggcgacacctggagcagacagatgcaccccgacatcgagagcgagagatacatgcagagcttcgacgtggagagactgaccaacatcctggacggcggcgcccagaacaccgccctgagaagaaaggtggagagcatcatccacagctaccccgagttcagctgcaaggacaactacttcatgacccagaacgagagatacaaggccgccatgagaagagccttccacatcagactgatcgccagaagactgggctggctggaggacggcagagagctgggctacgcctacagagccctgagcggcgacgtggccctgaacatccacagagtgttcgtgagagccctgagaagcctgggcagcgaggagcagatcgccaagtgggaccccctgtgcaagaacatccagatcatcgccacctacgcccagaccgagctgggccacggcacctacctgcagggcctggagaccgaggccacctacgacgccgccacccaggagttcgtgatccacagccccaccctgaccgccaccaagtggtggcccggcgacctgggcagaagcgccacccacgccctggtgcaggcccagctgatctgcagcggcgccagaagaggcatgcacgccttcatcgtgcccatcagaagcctgcaggaccacacccccctgcccggcatcatcatcggcgacatcggccccaagatggacttcgaccagaccgacaacggcttcctgcagctgaaccacgtgagagtgcccagagagaacatgctgagcagattcgcccaggtgctgcccgacggcacctacgtgaagctgggcaccgcccagagcaactacctgcccatggtggtggtgagagtggagctgctgagcggcgagatcctgcccatcctgcagaaggcctgcgtgatcgccatgagatacagcgtgatcagaagacagagcagactgagacccagcgaccccgaggccaaggtgctggactaccagacccagcagcagaagctgttcccccagctggccatcagctacgccttccacttcctggccgtgagcctgctggagttcttccagcacagctacaccgccatcctgaaccaggacttcagcttcctgcccgagctgcacgccctgagcaccggcatgaaggccatgatgagcgagttctgcacccagggcgccgagatgtgcagaagagcctgcggcggccacggctacagcaagctgagcggcctgcccagcctggtgaccaagctgagcgccagctgcacctacgagggcgagaacaccgtgctgtacctgcaggtggccagattcctggtgaagagctacctgcagacccagatgagccccggcagcaccccccagagaagcctgagccccagcgtggcctacctgaccgcccccgacctggccagatgccccgcccagagagccgccgacttcctgtgccccgagctgtacaccaccgcctgggcccacgtggccgtgagactgatcaaggacagcgtgcagcacctgcagaccctgacccagagcggcgccgaccagcacgaggcctggaaccagaccaccgtgatccacctgcaggccgccaaggtgcactgctactacgtgaccgtgaagggcttcaccgaggccctggagaagctggagaacgagcccgccatccagcaggtgctgaagagactgtgcgacctgcacgccatccacggcatcctgaccaacagcggcgacttcctgcacgacgccttcctgagcggcgcccaggtggacatggccagaaccgcctacctggacctgctgagactgatcagaaaggacgccatcctgctgaccgacgccttcgacttcaccgaccagtgcctgaacagcgccctgggctgctacgacggcaacgtgtacgagagactgttccagtgggcccagaagagccccaccaacacccaggagaaccccgcctacgaggagtacatcagacccctgctgcagagctggagaagcaagctgtag

SEQ ID NO: 138751 - DNA, 516 bp, Artificial Sequence
  derived and/or modified sequence
atgggcagccccgtgcacagagtgagcctgggcgacacctggagcagacagatgcaccccgacatcgagagcgagagatacatgcagagcttcgacgtggagagactgaccaacatcctggacggcggcgcccagaacaccgccctgagaagaaaggtggagagcatcatccacagctaccccgagttcagctgcaaggacaactacttcatgacccagaacgagagatacaaggccgccatgagaagagccttccacatcagactgatcgccagaagactgggctggctggaggacggcagagagctgggctacgcctacagagccctgagcggcgacgtggccctgaacatccacagagtgttcgtgagagccctgagaagcctgggcagcgaggagcagatcgccaagtgggaccccctgtgcaagaacatccagatcatcgccacctacgcccagaccgagctgggccacggcacctacctgcagggcctggagaccgaggccacctactag

SEQ ID NO: 138752 - protein, 700 aa, Artificial Sequence
  derived and/or modified sequence
MASTVEGGDTALLPEFPRGPLDAYRARASFSWKELALFTEGEGMLRFKKTIFSALENDPLFARSPGADLSLEKYRELNFLRCKRIFEYDFLSVEDMFKSPLKVPALIQCLGMYDSSLAAKYLLHSLVFGSAVYSSGSERHLTYIQKIFRMEIFGCFALTELSHGSNTKAIRTTAHYDPATEEFIIHSPDFEAAKFWVGNMGKTATHAVVFAKLCVPGDQCHGLHPFIVQIRDPKTLLPMPGVMVGDIGKKLGQNGLDNGFAMFHKVRVPRQSLLNRMGDVTPEGTYVSPFKDVRQRFGASLGSLSSGRVSIVSLAILNLKLAVAIALRFSATRRQFGPTEEEEIPVLEYPMQQWRLLPYLAAVYALDHFSKSLFLDLVELQRGLASGDRSARQAELGREIHALASASKPLASWTTQQGIQECREACGGHGYLAMNRLGVLRDDNDPNCTYEGDNNILLQQTSNYLLGLLAHQVHDGACFRSPLKSVDFLDAYPGILDQKFEVSSVADCLDSAVALAAYKWLVCYLLRETYQKLNQEKRSGSSDFEARNKCQVSHGRPLALAFVELTVVQRFHEHVHQPSVPPSLRAVLGRLSALYALWSLSRHAALLYRGGYFSGEQAGEVLESAVLALCSQLKDDAVALVDVIAPPDFVLDSPIGRADGELYKNLWGAVLQESKVLERASWWPEFSVNKPVIGSLKSKL

SEQ ID NO: 138753 - DNA, 2103 bp, Artificial Sequence
  derived and/or modified sequence
atggcttcaactgttgaaggcggtgatactgcactacttcctgaatttccaaggggacccctggacgcctatcgtgccagagcaagttttagctggaaggaactggcattgtttacagaaggggagggcatgctccgtttcaagaaaaccatcttttccgctcttgagaacgatcccctatttgcccgctccccaggggctgacctgtccctcgagaaatatcgcgagctaaattttcttagatgcaaaagaatcttcgaatacgatttccttagtgtggaggacatgtttaagtcaccactcaaggtgccggccctgatccagtgcttgggtatgtacgactctagcttagctgccaaatacttgctccactctttggtatttggttcagccgtatattccagcggctccgagagacacctgacctatatccagaaaatttttcgcatggaaattttcgggtgcttcgcccttacggagctttcccatggctctaacacgaaggcgatcaggacaaccgcgcactacgatccagccacggaggagtttataatacactcacctgacttcgaggccgccaagttctgggttggcaatatggggaaaaccgcgacacatgccgttgtgttcgcaaagctgtgcgtgcctggtgaccaatgccacggactccatccgtttattgttcaaataagggacccaaaaactctgctgcccatgcctggtgtaatggtcggcgatattggcaaaaagctgggtcagaatggcctggataatggcttcgcaatgtttcataaggtacgtgtgccgcgccagagcctgctcaatcgcatgggcgacgtcactccggaaggaacttacgtcagcccgttcaaggatgtacgccagcgtttcggcgcaagtctcggctccttgtcatccggccgcgtctctatcgtctctcttgctattttaaatctcaaattagcggttgcaatcgctctccggtttagcgctacaaggcggcagtttggtcctacggaagaggaagagatccccgtgctggagtatcctatgcaacagtggcggcttctgccttacctggcggcagtttacgccctggaccacttttctaagagtttgttcctagatctcgtcgagcttcagaggggactggccagtggcgatagaagcgcccggcaggctgagctagggcgggagatccacgctctagcatcagcctcaaaacccctcgcatcttggacaacacaacagggcatccaggagtgtcgggaagcatgtggcggccacggatacttggcaatgaaccggctaggggtgctgcgcgacgataatgaccccaattgcacctacgagggggataacaacatactgctgcaacaaacttcaaattatcttctcggattgctcgctcaccaagtgcacgacggagcttgtttccgaagcccgctcaaaagcgttgattttcttgatgcttacccgggcatacttgaccagaaattcgaggtcagctcagtcgctgactgcctggatagtgccgtcgctctcgccgcctataagtggctggtctgctacttactgagagaaacttatcagaagttaaatcaggagaaacgctccggatcctctgatttcgaggctagaaataagtgtcaggtgagtcacggaaggcccctggctctagcattcgtggaactgactgtcgtccagcggttccatgaacacgttcatcagccctcggtgcccccctccctacgggcggtactcggccgcctgagcgctctgtatgccctctggtcattgtcccgacatgccgccttactctaccgcggaggctacttctctggtgagcaggcaggcgaggtcctggagtctgcagtgctggccctgtgtagtcagttgaaagacgatgctgtcgcgctggtcgacgtcatcgcaccccctgatttcgtcctggacagtccaatcggacgtgccgacggagagctgtacaaaaacctgtggggagctgtgttacaggagtcgaaagtgctggagcgcgcgtcctggtggccagaattcagcgttaacaagccggttatcggcagtctcaagtccaagctgtag

SEQ ID NO: 138754 - DNA, 2103 bp, Artificial Sequence
  derived and/or modified sequence
atggccagcactgtagaaggcggggatacggcactgctgccggagttccccagaggccctttggacgcctatcgcgccagggcttctttctcttggaaagagctggccctgttcacggagggtgaggggatgctgagatttaagaaaaccatttttagcgctctcgagaatgacccccttttcgcaagaagccccggcgcagacctgtcactagagaagtatagagagctaaactttctgaggtgcaagcgcatttttgaatacgacttcctgagtgtcgaggacatgttcaagagcccgctcaaggtgcccgcactgatccagtgtctaggaatgtacgattcaagtttggcggcaaagtacctgctgcattcactggttttcggtagtgctgtatattcttctggaagcgagaggcacctgacgtatatccagaagatatttcgcatggagatcttcggttgtttcgctctcacagagttatcccacggctcaaacactaaggctattaggacaaccgcgcactatgatcccgccaccgaagagttcatcatccatagtcctgactttgaggctgcgaagttttgggtagggaatatgggtaagactgccactcatgcagtggtgttcgccaagctctgtgtgcccggggatcagtgccatggtctccaccccttcatcgtccagatcagagatccaaaaacgcttctccctatgcccggggtaatggtgggtgacatcggtaagaagctcggtcagaacggactcgataacggatttgcgatgtttcataaagtacgagtacctcggcaatccttgcttaacagaatgggcgacgtcactcctgaggggacatatgtgtctccatttaaagacgtccggcagcgatttggggccagtttagggtccctgtcttccggacgggtctctatcgtgtcccttgctattctgaacctgaagctggcagtggctatagcgttgagattttctgccactcgccggcagtttgggcccactgaggaagaggaaatcccggttctggagtatcccatgcagcaatggcgactgctgccttatttggcagcggtgtacgctctcgaccatttttcaaagtcattgttcttggatctggtcgagttacagcggggcctggcctccggggaccgatctgccaggcaggccgaattaggtagagaaatccacgctttggcttcagcgtccaagcccctggcaagctggacaacccaacagggaattcaggagtgcagggaggcatgtgggggtcatggctacctagcaatgaaccgtctgggggttctaagagacgacaacgaccctaactgcacatatgaaggcgataacaacattttactgcaacaaacatcaaactacctgctgggtctcctagcacaccaggtgcatgacggcgcctgctttaggagccccctgaagagcgtagatttcttagacgcttatcctgggattcttgaccagaagtttgaggtcagctcagtcgccgactgtctagattctgcagtggcccttgccgcctataagtggctcgtgtgttacttgttgcgcgagacttatcaaaagctgaaccaggagaaaagatccgggagctccgacttcgaagcccgaaacaaatgccaggtgtcccatggacgccctctggcactagcttttgtggaactgactgtcgtgcagcgcttccacgaacatgtgcatcagccaagtgtccccccatctctgagggctgtgctggggagattatctgctctgtacgccctctggtcccttagcaggcatgccgcactgttgtaccggggaggttacttcagtggagaacaggcaggagaagtactggagtctgcagtgctggccctttgtagtcaactcaaggatgacgcggttgctttggttgacgtcattgcccccccagattttgtattggacagcccaattggaagggcggatggggagctgtacaaaaacctgtggggtgcagttctccaggaaagtaaggtcctagagcgggcttcatggtggcctgaattttctgtgaacaagcctgtgatcggctcgctcaaatccaaactttag

SEQ ID NO: 138755 - DNA, 2103 bp, Artificial Sequence
  derived and/or modified sequence
atggccagcacagtggagggcggggacacagccctgctgcctgagttcccccggggccccctggatgcctaccgggcccgggccagcttctcctggaaggagctggccctcttcacagaaggagagggcatgctgcgcttcaagaagaccatcttcagcgccctggagaatgaccccctgtttgcccggagccctggagctgacctgagcctggagaagtaccgggagctgaacttcctgcgctgcaagaggatctttgaatatgacttcctgtctgtggaggacatgttcaagagccccctgaaggtgcctgccctgatccagtgcctgggcatgtatgacagcagcctggccgccaagtacctgctgcacagcctggtgtttggcagcgctgtgtacagcagcggcagcgagcggcacctgacctacatccagaagatcttcaggatggagatcttcggctgctttgccctgacagagctgagccacggcagcaacaccaaggccatccgcaccacagcccactatgaccctgccacagaggagttcatcatccacagcccagactttgaggccgccaagttctgggtgggcaacatgggcaagacagccacccatgctgtggtgtttgccaagctgtgtgtgcctggggaccagtgccacggcctgcaccccttcatcgtgcagatccgggaccccaagaccctgctgcccatgcctggggtgatggtgggggacatcggcaagaagctgggccagaatggcctggacaatggatttgccatgttccacaaggtgcgggtgccccggcagagcctgctgaacaggatgggagatgtgaccccagagggcacctacgtgagccccttcaaggatgtgcggcagagatttggagccagcctgggcagcctgagcagcggccgggtgtccatcgtgtccctggccatcctgaacctgaagctggccgtggccatcgccctgcgcttcagcgccacccggcggcagtttggccccacagaggaggaggagatccctgtgctggagtaccccatgcagcagtggaggctgctgccctacctggccgctgtgtatgccctggaccacttcagcaagagcctcttcctggacctggtggagctgcagaggggcctggccagcggggacagaagtgcccggcaggccgagctgggccgggagatccacgccctggccagcgccagcaagcccctggcctcctggaccacccagcagggcatccaggagtgccgggaggcctgtggcggccacggctacctggccatgaaccggctgggcgtgctgagagatgacaatgaccccaactgcacctatgaaggagacaacaacatcctgctgcagcagaccagcaactacctgctgggcctgctggcccaccaggtgcatgatggagcctgcttccgcagccccctgaagtctgtggacttcctggatgcctacccaggcatcctggaccagaagtttgaggtgtcctctgtggccgactgcctggacagcgctgtggccctggccgcctacaagtggctggtgtgctacctgctgcgggagacctaccagaagctgaaccaggagaagaggagcggcagcagtgactttgaggccaggaacaagtgccaggtgagccacggccggcccctggccctggcctttgtggagctgactgtggtgcagcgcttccacgagcacgtgcaccagcccagcgtgccccccagcctgcgggctgtgctgggccgcctgagcgccctgtatgccctgtggagcctgagcagacatgctgccctgctgtaccggggcggctacttcagcggggagcaggccggggaggtgctggagagcgctgtgctggccctgtgcagccagctgaaggatgatgctgtggccctggtggatgtgattgcccccccagactttgtgctggacagccccatcggccgggcagatggagagctgtacaagaacctgtggggcgctgtgctgcaggagagcaaggtgctggagcgggcctcctggtggccagagttctctgtgaacaagcctgtgattggcagcctgaagagcaagctgtag

SEQ ID NO: 138756 - DNA, 2103 bp, Artificial Sequence
  derived and/or modified sequence
atggccagcaccgtggagggcggcgacaccgccctgctgcccgagttcccccgtggcccgttggacgcctacagagcccgcgcttcattcagctggaaagagttagcccttttcaccgagggcgaggggatgctccgcttcaagaaaaccatattttcagctctggaaaatgaccccctttttgccagaagtcccggggcggacctgagcctggaaaaatatcgcgagcttaatttcctgcgctgcaaacgtatctttgaatacgacttcttgtctgttgaagatatgtttaaatcacctttgaaagttcctgcgttaatccaatgcctgggtatgtatgactcatctctggcggccaagtacctcctacatagtttggtttttggctccgcagtgtacagcagcggatccgagaggcaccttacctacattcagaagatttttaggatggaaatatttggctgcttcgccttgacagagctgtcccacggttccaatacgaaggcgatccgcactaccgcacattacgaccctgcgacggaggaatttattatccactctcctgacttcgaggcagctaagttctgggtcggaaacatgggaaagaccgctactcatgccgtcgtctttgcgaaactctgcgtccctggcgaccagtgtcatgggcttcacccattcatcgtccagattcgcgacccaaaaacccttttgcctatgccgggcgtaatggtcggcgatattgggaagaaattggggcagaacggcctggataacggcttcgcaatgttccacaaggttcgggtgcctaggcagtccctcctcaatagaatgggagatgttacccctgaaggaacatacgtctcgcccttcaaggacgtgcggcagcgatttggcgcatctctggggagtctctcctccggcagggtgtctattgtgtcactagctattctaaatctaaaattagccgtagctattgcattgagattttctgcgacccgccgtcagttcggtcctactgaagaagaggagattccagtcttggagtatccaatgcagcagtggcggctcctgccttatctggcagctgtctacgctctggaccatttttcaaaatcattgtttcttgacttggttgaactccagcgtggtttggccagcggggataggtccgccagacaggccgagctgggtagagagatacacgcgctggcatccgctagcaaaccacttgccagttggaccacacaacagggcattcaggagtgtagagaagcatgcggtgggcacggctatttggccatgaaccgactgggagtgttgcgggacgacaacgatccgaactgtacgtacgagggagataataatattttgctgcagcagacatctaactatctattggggctgttagctcaccaagtacacgacggagcgtgctttcggtcacccctgaagtcagtggacttcctcgatgcctaccccgggatcctggaccagaaattcgaggtgagcagtgtggcagattgtctggatagtgcagtggccctagcagcctacaagtggctggtatgttacttattgcgggagacctatcagaagttgaaccaagaaaagcggagtggctcatcagacttcgaggcaagaaacaaatgtcaagtatctcatggcaggcctttggccctggcctttgtagaactgaccgtggttcaaaggttccacgagcacgtgcatcaaccatctgtgcctccttctctgagagccgtcctgggtcgcctgtccgccctttacgccctctggagtctctctcgccacgctgccctcttgtatagagggggctacttctccggcgagcaagctggtgaggttctcgaatccgctgttctcgccctttgctcccaattaaaagatgacgcagtagccctggtggatgtgattgcaccgcccgattttgtcctggacagccccatcggcagggcagacggggaactctacaagaacctgtggggcgccgttctgcaagagagtaaggtattggagcgagcttcctggtggcctgagttttcagtcaacaagcccgtgatcggctcgctcaagagcaaactttag

SEQ ID NO: 138757 - DNA, 2103 bp, Artificial Sequence
  derived and/or modified sequence
atggccagcaccgtggagggcggcgacaccgccctgctgcccgagtttccaaggggccccctcgacgcgtatcgtgctagagcttctttcagctggaaagaactggctctgttcacagaaggagaggggatgctccgattcaaaaagaccatctttagcgccctggagaacgatccactattcgccagaagcccaggggccgatctctcattggagaagtatagggagctcaatttcttacggtgtaaacgaattttcgagtatgactttttgtcagttgaggatatgtttaagtcccccttgaaagtcccagccctaatccagtgcttaggtatgtatgattcatctcttgcggctaaatatttactgcactcacttgttttcggtagtgctgtctacagcagcggcagtgagaggcatctcacatacatccagaaaatttttcggatggagattttcggctgctttgcactcactgagctatcgcacgggtccaacaccaaggcaatacgaaccactgcccactatgaccctgcaaccgaggagtttatcatccactcgcctgactttgaggctgctaaattctgggtcggaaatatgggcaagacagccacccacgccgtcgtcttcgcgaagctttgtgtcccaggtgaccagtgccacggactgcacccgtttatagttcaaattcgagaccccaaaactcttctgcccatgcccggtgttatggtaggggatattggaaaaaagctgggccagaacgggctcgacaatggttttgccatgtttcacaaggttagggttcccagacagtcacttcttaataggatgggagacgttactcccgaaggcacttacgtctccccgtttaaggatgtcaggcagcgctttggcgccagtctaggtagtttatctagcgggagggtctctattgtatcattggccattctgaacctgaaactcgccgtcgcaatcgctctgcgcttttctgccacaagacggcagttcggcccaaccgaagaggaggagattccagtgctggaatatccaatgcagcagtggaggctgctgccctatttggccgcagtgtatgctctcgatcatttttcaaaatctttattcctcgatcttgtcgaacttcagcgcggcctcgccagcggcgacagatctgccaggcaggctgaactgggcagagaaatccacgccctagcctccgcgagcaaacccctggccagctggaccactcagcagggtattcaggagtgccgcgaggcctgcggtggccatgggtacctcgctatgaaccggttgggggtcctgcgcgatgacaatgaccccaactgcacatacgaaggagataacaatatcctcctgcagcaaaccagcaattaccttcttgggctgctagcccatcaggtgcatgacggggcatgctttagaagcccgctcaagtccgttgactttttggacgcctacccgggaatcctggatcagaagttcgaggtgtctagcgtcgcagattgccttgacagtgccgtggccctggccgcctacaagtggctagtgtgctatctgctccgcgagacctatcagaaattgaaccaggaaaaacggtccggcagtagcgattttgaggctagaaacaagtgccaggtgtcccatgggcgccctctggcattagctttcgttgaactgaccgttgtgcagcgcttccacgagcatgtccaccagccttccgttccacccagcctgagggcagtccttggccggctgagcgccctctatgcgctctggagcttaagtcggcacgctgcgttgctctaccgcgggggctatttcagcggggagcaagctggtgaagtgctggagtccgcagtactggccctttgctcacaactcaaagatgacgcggtggctttagtggacgtgatcgctcctcctgactttgtcttggattcacccattggccgagctgatggagagctatataaaaacctgtggggagctgttttacaggagtcaaaggtcctagagagggcctcttggtggcccgaattctcggtcaataagcccgttatcggctctctgaagagcaagctctag

SEQ ID NO: 138758 - DNA, 2103 bp, Artificial Sequence
  derived and/or modified sequence
atggcaagcactgtggagggcggtgatacggccctgcttcctgagttcccacgagggcctttggatgcctatcgggcacgagcttcattctcctggaaggagctcgctcttttcaccgagggagaaggaatgctgaggttcaagaagaccatcttctcagctctggaaaatgatcccctgttcgctcgctctccaggggcagatctgtccctggaaaagtatagggagctgaactttctgaggtgcaaacgcatattcgagtatgattttctatctgtcgaggacatgtttaagtccccactgaaagtaccagccctgatccagtgtcttggaatgtacgattcctctctagctgccaagtacttattgcacagcctggtgtttggctctgccgtgtattccagcggatccgagagacatttgacctatattcaaaaaatctttagaatggagatcttcggctgcttcgccctaaccgagctatcacatggctcaaacaccaaggccattaggactactgctcactatgaccctgccactgaagagtttatcatccattcaccggacttcgaagccgcaaaattttgggttggcaatatgggtaagactgcaacacatgcagtggtcttcgcaaaattgtgcgtcccaggtgatcaatgccacgggcttcacccatttattgtgcagatacgcgatcctaaaacattgctgccaatgccgggtgttatggtcggagacatcggaaagaagcttggccaaaacggactcgacaatggcttcgccatgtttcacaaagttcgggtcccacgacagtccctcctgaacaggatgggagatgtcacgcccgagggaacctatgtgagccctttcaaagacgtacggcagaggtttggggcatccctgggctcactgtcaagcggaagagtgtccattgtttccctggccatcttgaatctcaaattggctgtggctatcgctctccggttctctgctacccgcaggcagttcggcccaacggaggaagaggaaattccagtgctggaataccccatgcagcaatggcggctactgccttaccttgctgcagtttacgcactcgaccatttctccaagagcctgttcctcgatttagtcgaactgcaacggggactggctagcggagataggtctgccaggcaagctgaattggggagggagatccatgctctcgcctccgcctccaagcccctggcatcatggaccacacagcagggcatccaggaatgtcgagaggcatgcggtggtcacggctacttggctatgaacaggttgggggtgctcagagatgacaatgaccctaactgcacttatgagggagataacaatatcttactccaacagacctctaactacctgctgggacttttggcacatcaggttcacgatggtgcttgtttcagatccccattgaagtcagtggatttcctcgatgcatatccaggaatactggatcagaagtttgaggtgtcctcagtggcagattgcctcgattccgcagtcgctttagccgcttacaagtggctggtgtgttatctgctgagggaaacctatcaaaaactgaatcaggagaaaaggagtgggtcctccgacttcgaagcccgaaataagtgccaggtgtcccacgggcgacctttggctctggcctttgtcgagctgactgtggtccagagatttcatgaacatgtccaccagcccagcgttccacccagtttgcgcgcagtgttggggagactctcggctctttatgctctctggtctctatctagacacgccgcactcctttacagaggaggttatttctcaggcgagcaggctggggaagtgctggaaagtgctgttcttgccttgtgttcccagctgaaagatgacgccgttgcattggtcgacgtgatcgcacctcccgacttcgttcttgattctcccattggcagagccgacggcgagctctacaagaatctgtggggagccgttctgcaggagtctaaggtgctcgagcgggctagctggtggcctgagttttctgtgaacaaacctgtgattggctcgctgaaaagtaagctgtag

SEQ ID NO: 138759 - DNA, 2103 bp, Artificial Sequence
  derived and/or modified sequence
atggcttcaaccgtagagggcggtgataccgcactgctgcccgaatttcctagaggtcccctcgacgcatacagagccagggctagtttcagttggaaggaactggccttgttcacagagggtgagggaatgttgagattcaagaagacaattttctcggcactcgagaacgacccacttttcgctcggtcccctggggcagacctgagtctcgagaagtacagagaactcaatttcttgcgatgcaagcgcatcttcgagtacgactttctatctgtggaagatatgtttaaatcaccactgaaagtgccggctctgattcagtgtctcggcatgtacgacagcagtctcgccgctaagtatctgctgcacagccttgttttcggcagtgccgtgtactcctctgggtccgagagacacctgacctacatacaaaagatcttccgaatggaaatctttgggtgcttcgctctgaccgaactatcacacggcagcaatacaaaggctatccgcacaacagcccactacgaccctgccacagaggaatttatcatacattcccctgacttcgaggccgcaaagttctgggtgggcaacatgggtaagactgctacccatgcggtggtgttcgcaaaactgtgtgttccaggtgaccagtgccacggcctgcatccattcatcgtgcagatacgggatcctaagactctcctgccaatgccgggagtcatggtgggagacatcggtaaaaagttgggtcagaacggcctcgacaacggctttgctatgttccacaaagtgagagtgcctaggcagtccctactgaatcgcatgggtgatgtgactcctgagggcacctatgtgagcccattcaaagacgtcaggcagcgcttcggggcttcccttggtagcctaagtagtggtcgcgtaagtatcgtctctttggcaatcttaaacctcaaacttgcggttgccatcgcattgcgattttcggcaactcgcagacagtttggcccaaccgaggaggaggaaattcccgtgcttgagtacccgatgcagcaatggcgacttctgccctatctggccgctgtgtacgcgttagaccatttctctaaaagcctgtttctggacttggtggagctgcagcgaggcctggcaagtggggacagaagcgcacgccaggcggagctggggagagagatacacgcgctggcaagcgcaagcaagccactcgcttcttggaccacacaacaaggtatccaggagtgccgcgaggcctgtggagggcacggatatctggctatgaatcggctgggggtcttgcgggatgacaacgaccccaattgcacctacgagggggataataatattttgctgcagcagactagcaattacctccttggactgttggcccaccaggtccatgacggtgcatgctttcggtcacccttaaaatcagtggacttcctcgatgcatatccgggaattcttgaccagaaatttgaggtgagctcagtggccgattgtctggattccgccgtcgcgctggcggcttataagtggctggtgtgctacctgctgagagaaacctaccaaaagctgaaccaggaaaaaaggtcaggttcctcggacttcgaagctcgcaataagtgccaagtgagccacggcaggccactggctctggcctttgtggagctcacagtggtccaaagattccatgagcacgtgcaccagccctccgtaccacccagcttgcgggctgtgctgggcagactgtccgctctgtacgcactgtggtccctcagcagacacgctgcactcctgtaccgtggaggatacttcagcggtgagcaggctggggaagtgttggaaagtgccgtccttgctttatgttcccagcttaaagacgacgctgtggccctggtcgacgtgatcgcccctccggacttcgtgctggatagccctataggacgcgcagacggagaactgtataagaacctgtggggagccgtcctccaggaaagcaaggtgctggagcgcgcatcttggtggccggagttctctgtaaacaaacctgtgattggttcactcaagtcaaagctttag

SEQ ID NO: 138760 - DNA, 2103 bp, Artificial Sequence
  derived and/or modified sequence
atggccagcaccgtggagggcggcgacaccgccctgctgcccgagttccccagaggccccctggacgcctacagagccagagccagcttcagctggaaggagctggccctgttcaccgagggcgagggcatgctgagattcaagaagaccatcttcagcgccctggagaacgaccccctgttcgccagaagccccggcgccgacctgagcctggagaagtacagagagctgaacttcctgagatgcaagagaatcttcgagtacgacttcctgagcgtggaggacatgttcaagagccccctgaaggtgcccgccctgatccagtgcctgggcatgtacgacagcagcctggccgccaagtacctgctgcacagcctggtgttcggcagcgccgtgtacagcagcggcagcgagagacacctgacctacatccagaagatcttcagaatggagatcttcggctgcttcgccctgaccgagctgagccacggcagcaacaccaaggccatcagaaccaccgcccactacgaccccgccaccgaggagttcatcatccacagccccgacttcgaggccgccaagttctgggtgggcaacatgggcaagaccgccacccacgccgtggtgttcgccaagctgtgcgtgcccggcgaccagtgccacggcctgcaccccttcatcgtgcagatcagagaccccaagaccctgctgcccatgcccggcgtgatggtgggcgacatcggcaagaagctgggccagaacggcctggacaacggcttcgccatgttccacaaggtgagagtgcccagacagagcctgctgaacagaatgggcgacgtgacccccgagggcacctacgtgagccccttcaaggacgtgagacagagattcggcgccagcctgggcagcctgagcagcggcagagtgagcatcgtgagcctggccatcctgaacctgaagctggccgtggccatcgccctgagattcagcgccaccagaagacagttcggccccaccgaggaggaggagatccccgtgctggagtaccccatgcagcagtggagactgctgccctacctggccgccgtgtacgccctggaccacttcagcaagagcctgttcctggacctggtggagctgcagagaggcctggccagcggcgacagaagcgccagacaggccgagctgggcagagagatccacgccctggccagcgccagcaagcccctggccagctggaccacccagcagggcatccaggagtgcagagaggcctgcggcggccacggctacctggccatgaacagactgggcgtgctgagagacgacaacgaccccaactgcacctacgagggcgacaacaacatcctgctgcagcagaccagcaactacctgctgggcctgctggcccaccaggtgcacgacggcgcctgcttcagaagccccctgaagagcgtggacttcctggacgcctaccccggcatcctggaccagaagttcgaggtgagcagcgtggccgactgcctggacagcgccgtggccctggccgcctacaagtggctggtgtgctacctgctgagagagacctaccagaagctgaaccaggagaagagaagcggcagcagcgacttcgaggccagaaacaagtgccaggtgagccacggcagacccctggccctggccttcgtggagctgaccgtggtgcagagattccacgagcacgtgcaccagcccagcgtgccccccagcctgagagccgtgctgggcagactgagcgccctgtacgccctgtggagcctgagcagacacgccgccctgctgtacagaggcggctacttcagcggcgagcaggccggcgaggtgctggagagcgccgtgctggccctgtgcagccagctgaaggacgacgccgtggccctggtggacgtgatcgccccccccgacttcgtgctggacagccccatcggcagagccgacggcgagctgtacaagaacctgtggggcgccgtgctgcaggagagcaaggtgctggagagagccagctggtggcccgagttcagcgtgaacaagcccgtgatcggcagcctgaagagcaagctgtag

SEQ ID NO: 138761 - DNA, 2423 bp, Artificial Sequence
  derived and/or modified sequence
cgccgctggagatcctttcctgcttttggtttccctggcaggggttgaactgtggagtgtgtgggctcttatcacgcgatggcatccactgtggaaggaggcgacacagctctgctcccagaattccccagggggcccctcgatgcctaccgagcaagagcgtccttcagctggaaggagctggcgctgttcacggaaggggagggcatgctccgctttaagaaaaccatcttctcagctcttgagaatgaccctcttttcgctcgttcccctggagccgatctgtccttggagaagtatcgcgagctgaacttccttcgatgcaagcggatcttcgagtatgacttcctcagtgtcgaagacatgttcaagagccctctgaaggtccccgccttgattcagtgcctgggcatgtatgactcttctctggctgccaagtacctcctccatagcttggtttttggatcagcagtttacagttctggttctgaaagacatctcacatatattcaaaagatcttcaggatggagatttttggatgttttgctctgaccgaattaagccacggcagtaataccaaggccattcgcacaactgcccactacgatcctgccactgaggaattcatcatacattcccctgatttcgaagctgccaagttttgggttggcaacatgggcaagacagccactcacgcggtggtgtttgctaagctgtgtgtgccaggggaccagtgccatgggctgcatccctttatcgtgcagatccgggacccgaagacccttcttcccatgcctggagtgatggttggcgacataggaaaaaaactcgggcagaacggtctggataatggtttcgccatgttccacaaggtcagagttcctcgccagagccttctgaaccggatgggagacgtcacccccgagggcacctatgtcagcccctttaaggacgtcaggcagcgctttggagcgtccctggggagcctgtcctcgggccgggtctccatcgtgagcctggccatccttaacctaaagctggccgtggccatcgctcttcgcttctcagccactcggcgtcagtttggacccacagaggaggaggaaataccagtgcttgagtatccaatgcagcaatggcgcttgcttccatatctggcagctgtctacgccttagaccatttctccaagtcgctcttcctggacctggtggagctccagcgaggacttgcatcgggagaccgcagcgccagacaggcagagcttggacgtgagatccacgccctggcatcggccagcaagcccctggcctcgtggaccacccagcaaggaattcaggaatgccgggaggcgtgtggaggacacggctatctggccatgaaccggttgggtgtccttagagatgacaacgatcccaactgcacatacgaaggtgacaacaacatcctgctgcagcagacaagcaactatttgctgggtctcctggcacaccaggtccacgatggagcttgcttccgcagtccgctgaagtcagtggactttctggacgcctatcccggcatccttgaccagaagtttgaggtctccagtgttgccgactgcttggactctgcagtcgccctggcagcatacaagtggctggtttgctacctgctccgagagacttatcaaaaattaaaccaagagaaaagatcaggaagcagtgactttgaagcaaggaacaaatgccaggtgtcccacggccgtccgttggcgctggccttcgtggagctcacggtggtccagaggttccacgagcacgtgcaccagccttccgtgccgccctcgctgcgggccgtgctggggcggctcagtgctctgtacgccctgtggtccctgagccgccacgcggccctgctctaccgaggaggatacttctccggtgagcaggcgggagaagtgttggagagcgccgtcctggctttgtgttcccagctgaaagacgatgcagttgccctggtagacgtgatcgctcctcctgactttgttctggactcaccgattggcagagccgacggcgagctctacaaaaacctctggggcgctgtcctgcaggaaagcaaggtgttggagcgggcatcctggtggccagagttttctgtgaacaaacctgtcataggaagtctgaaatcgaagctctagtgggactggcacacattcagccaagtctaatgaaacgaagggaactaatcagacgtggacctcaacttctgattccagaacacgccggagattgctgctgctttctgagcccgcacctgtgcgcctaaactgctgattggcctcaactgcccaggcggacgggagggaggcacccggccggctggactaatctgggatcgcggtgatttgcagcgtggaaaagaaatgcagatgatcatgtc

SEQ ID NO: 138762 - DNA, 2253 bp, Artificial Sequence
  derived and/or modified sequence
atgggacggacggaggccgagaggcgtggcgggggagcagtggggccaggccagagacagctgcgctgtgcgggcagctagtcccagtactccgagtcggtcgcgggccgacaggcatcccctgagcgcctgctgggctcttatcacgcgatggcatccactgtggaaggaggcgacacagctctgctcccagaattccccagggggcccctcgatgcctaccgagcaagagcgtccttcagctggaaggagctggcgctgttcacggaaggggagggcatgctccgctttaagaaaaccatcttctcagctcttgagaatgaccctcttttcgctcgttcccctggagccgatctgtccttggagaagtatcgcgagctgaacttccttcgatgcaagcggatcttcgagtatgacttcctcagtgtcgaagacatgttcaagagccctctgaaggtccccgccttgattcagtgcctgggcatgtatgactcttctctggctgccaagtacctcctccatagcttggtttttggatcagcagtttacagttctggttctgaaagacatctcacatatattcaaaagatcttcaggatggagatttttggatgttttgctctgaccgaattaagccacggcagtaataccaaggccattcgcacaactgcccactacgatcctgccactgaggaattcatcatacattcccctgatttcgaagctgccaagttttgggttggcaacatgggcaagacagccactcacgcggtggtgtttgctaagctgtgtgtgccaggggaccagtgccatgggctgcatccctttatcgtgcagatccgggacccgaagacccttcttcccatgcctggagtgatggttggcgacataggaaaaaaactcgggcagaacggtctggataatggtttcgccatgttccacaaggtcagagttcctcgccagagccttctgaaccggatgggagacgtcacccccgagggcacctatgtcagcccctttaaggacgtcaggcagcgctttggagcgtccctggggagcctgtcctcgggccgggtctccatcgtgagcctggccatccttaacctaaagctggccgtggccatcgctcttcgcttctcagccactcggcgtcagtttggacccacagaggaggaggaaataccagtgcttgagtatccaatgcagcaatggcgcttgcttccatatctggcagctgtctacgccttagaccatttctccaagtcgctcttcctggacctggtggagctccagcgaggacttgcatcgggagaccgcagcgccagacaggcagagcttggacgtgagatccacgccctggcatcggccagcaagcccctggcctcgtggaccacccagcaaggaattcaggaatgccgggaggcgtgtggaggacacggctatctggccatgaaccggttgggtgtccttagagatgacaacgatcccaactgcacatacgaaggtgacaacaacatcctgctgcagcagacaagcaactatttgctgggtctcctggcacaccaggtccacgatggagcttgcttccgcagtccgctgaagtcagtggactttctggacgcctatcccggcatccttgaccagaagtttgaggtctccagtgttgccgactgcttggactctgcagtcgccctggcagcatacaagtggctggtttgctacctgctccgagagacttatcaaaaattaaaccaagagaaaagatcaggaagcagtgactttgaagcaaggaacaaatgccaggtgtcccacggccgtccgttggcgctggccttcgtggagctcacggtggtccagaggttccacgagcacgtgcaccagccttccgtgccgccctcgctgcgggccgtgctggggcggctcagtgctctgtacgccctgtggtccctgagccgccacgcggccctgctctaccgaggaggatacttctccggtgagcaggcgggagaagtgttggagagcgccgtcctggctttgtgttcccagctgaaagacgatgcagttgccctggtagacgtgatcgctcctcctgactttgttctggactcaccgattggcagagccgacggcgagctctacaaaaacctctggggcgctgtcctgcaggaaagcaaggtgttggagcgggcatcctggtggccagagttttctgtgaacaaacctgtcataggaagtctgaaatcgaagctctag

SEQ ID NO: 138763 - protein, 862 aa, Artificial Sequence
  derived and/or modified sequence
MNIQEQGFPLDLGASFTEDAPRPPVPGEEGELVSTDPRPASYSFCSGKGVGIKGETSTATPRRSDLDLGYEPEGSASPTPPYLKWAESLHSLLDDQDGISLFRTFLKQEGCADLLDFWFACTGFRKLEPCDSNEEKRLKLARAIYRKYILDNNGIVSRQTKPATKSFIKGCIMKQLIDPAMFDQAQTEIQATMEENTYPSFLKSDIYLEYTRTGSESPKVCSDQSSGSGTGKGISGYLPTLNEDEEWKCDQDMDEDDGRDAAPPGRLPQKLLLETAAPRVSSSRRYSEGREFRYGSWREPVNPYYVNAGYALAPATSANDSEQQSLSSDADTLSLTDSSVDGIPPYRIRKQHRREMQESVQVNGRVPLPHIPRTYRVPKEVRVEPQKFAEELIHRLEAVQRTREAEEKLEERLKRVRMEEEGEDGDPSSGPPGPCHKLPPAPAWHHFPPRCVDMGCAGLRDAHEENPESILDEHVQRVLRTPGRQSPGPGHRSPDSGHVAKMPVALGGAASGHGKHVPKSGAKLDAAGLHHHRHVHHHVHHSTARPKEQVEAEATRRAQSSFAWGLEPHSHGARSRGYSESVGAAPNASDGLAHSGKVGVACKRNAKKAESGKSASTEVPGASEDAEKNQKIMQWIIEGEKEISRHRRTGHGSSGTRKPQPHENSRPLSLEHPWAGPQLRTSVQPSHLFIQDPTMPPHPAPNPLTQLEEARRRLEEEEKRASRAPSKQRYVQEVMRRGRACVRPACAPVLHVVPAVSDMELSETETRSQRKVGGGSAQPCDSIVVAYYFCGEPIPYRTLVRGRAVTLGQFKELLTKKGSYRYYFKKVSDEFDCGVVFEEVREDEAVLPVFEEKIIGKVEKVD

SEQ ID NO: 138764 - DNA, 2589 bp, Artificial Sequence
  derived and/or modified sequence
atgaatatccaagaacagggttttcctctggacctgggcgcttccttcaccgaggacgcaccccggccccctgtgcccggagaggaaggagaactggtgagcacagacccacgtccggctagttacagcttttgctccggtaagggggtaggcatcaaaggcgagacctctaccgctaccccacgacgaagcgacttggacctgggatatgagcccgaagggagtgcgtcccctactcccccgtacctgaagtgggctgaatctcttcattccttattggacgatcaggatggcatttccctgtttcgaacatttctgaaacaggaaggctgtgccgatctgcttgatttttggttcgcttgtaccggctttagaaagctggaaccatgtgatagcaatgaagagaaacggctgaaactcgcacgggccatctaccggaagtacatcttagacaataatggaatagtgagtaggcagacaaagcccgcaaccaagtcctttattaagggctgcattatgaaacagcttattgacccggcaatgtttgatcaggcacaaactgaaattcaggccacaatggaagagaacacatacccatcattcctcaagagtgacatttacctcgaatacactaggactgggagcgagtcaccaaaagtgtgctccgatcagtcctccgggagcgggaccggaaaaggcatttctggctatctgccaactttgaacgaggacgaggaatggaagtgcgaccaggatatggatgaagacgatggccgagacgcggcaccccccggaaggctaccccagaagctcctgctcgaaactgctgcccccagggttagtagcagccggcggtattcagaaggtagagagtttagatacggatcttggagggaacctgtgaacccttactatgttaatgcaggatatgcccttgcgcccgcgaccagtgccaatgatagcgagcagcaatcactgagctctgacgctgatactttaagcttgacagactcatcggtggatggcatacccccctatagaatcaggaaacaacatagacgcgagatgcaggaatctgtccaggtgaacggtcgagtgcccctgccgcacatccctagaacctaccgagtgccgaaggaagttcgcgtggaaccacaaaaattcgcggaggaactgatccaccgacttgaagcagtgcagagaaccagagaggccgaggagaaactggaagagagactgaagcgcgtaagaatggaggaagaaggggaagatggcgacccctccagcggacccccaggcccatgccataagcttccccctgcaccggcctggcatcactttcccccccggtgtgtggatatgggatgcgctggtctgcgcgacgctcacgaggaaaaccccgaatccatcctagatgagcacgttcagagggttcttagaactcccgggaggcagtctccgggtcccggccatagatccccagactctggacacgtcgctaaaatgccagttgccctggggggcgctgcatctgggcacggtaagcacgttccgaagtctggggctaagctggacgcagccggtttgcaccatcaccgccatgtgcatcaccatgttcaccattcaactgcacgccccaaggaacaggtggaagctgaggccaccagacgcgcccagagcagctttgcctgggggctggagccccattctcatggagctaggagccgtggttactccgaaagcgttggagccgcgcccaacgcctccgatgggctggctcattccggaaaggttggggtggcgtgcaagagaaatgcaaaaaaagccgagagcgggaagagtgcttccactgaggtgcccggagcgtccgaggacgctgaaaagaatcagaaaataatgcagtggatcattgagggggagaaggagatttcacgtcacaggagaaccggtcacgggtctagtggcacgcggaagccgcagccccatgaaaattcccggccactctccctggagcacccttgggctggaccacaacttcgcactagtgttcagccctcccatctgttcatccaagacccgaccatgcccccacaccccgctcctaatcctttgacacagctggaagaagcccgccgccgcctagaagaggaagagaaaagagctagccgggcaccatccaaacagcgctacgtgcaggaagtcatgcgtagagggcgcgcgtgcgtgcggcctgcttgtgcaccagtgttacacgttgttcccgccgtctctgatatggagctctcagagaccgaaacacggtctcagcggaaggtgggcggggggtctgctcagccttgcgactcaatcgtggtcgcttattacttctgtggggagcctataccttatcgaactctcgtgcgggggcgagcggtcactctcggccagttcaaggaactgcttaccaaaaaaggctcttaccgatactacttcaaaaaagtgagtgatgaatttgactgcggggtggtctttgaggaggtccgcgaagatgaagcagtgctccccgtctttgaggagaagatcataggaaaagtcgagaaagtcgactag

SEQ ID NO: 138765 - DNA, 2589 bp, Artificial Sequence
  derived and/or modified sequence
atgaacatccaggagcagggcttccccctggacctgggcgccagcttcacagaagatgcccccaggcctcctgtgcctggagaggagggggagctggtgtccacagaccccaggcctgccagctacagcttctgcagcggcaagggcgtgggcatcaagggggagaccagcacagccaccccccggcggagtgacctggacctgggctatgagcctgagggcagcgccagccccaccccaccctacctgaagtgggccgagagcctgcacagcctgctggatgaccaggacggcatcagcctcttccgcaccttcctgaagcaggagggctgtgccgacctgctggacttctggtttgcctgcaccggcttcaggaagctggagccctgtgacagcaatgaggagaagaggctgaagctggcccgggccatctacaggaagtacatcctggacaacaatggaattgtgtcccggcagaccaagccagccaccaagagcttcatcaagggctgcatcatgaagcagctgattgatcctgccatgtttgaccaggcccagacagagatccaggccaccatggaggagaacacctaccccagcttcctgaagagtgacatctacctggagtacaccaggactggaagtgagagccccaaggtgtgcagcgaccagagcagcggcagcggcaccgggaagggcatcagcggctacctgcccaccctgaatgaagatgaggagtggaagtgtgaccaggacatggatgaagatgatggaagagatgctgcccctcctggccgcctgccccagaagctgctgctggagacagctgccccccgggtgagcagcagccgccgctacagcgagggccgggagttccgctatggctcctggagggagcctgtgaacccctactacgtgaatgccggctacgccctggccccagccaccagcgccaatgattctgagcagcagagcctgagcagtgatgctgacaccctgagcctgacagacagctctgtggatggcatccccccctaccgcatcaggaagcagcacagaagagagatgcaggagagcgtgcaggtgaatggccgggtgcccctgccccacatccccaggacctacagagtgcccaaggaggtgcgggtggagccccagaagtttgctgaggagctgatccaccggctggaggccgtgcagaggacccgggaggccgaggagaagctggaggagcggctgaagagggtgaggatggaggaggagggagaagatggagaccccagcagcggccccccaggcccctgccacaagctgcccccagccccagcctggcaccacttccccccaagatgtgtggacatgggctgtgccggcctgagagatgcccatgaagaaaatcctgagagcatcctggatgagcacgtgcagagggtgctgcggaccccaggccggcagagccctggccctggccacaggagcccagacagcggccacgtggccaagatgcctgtggccctgggcggggccgccagcggccacggcaagcacgtgcccaagagcggggccaagctggatgctgctggcctgcaccaccaccgccacgtgcaccaccacgtgcaccacagcacagcccggcccaaggagcaggtggaggccgaggccacccggcgggcccagagcagctttgcctggggcctggagccccacagccatggagcccggagccggggctacagcgagagcgtgggcgccgccccaaatgccagtgatggcctggcccacagcggcaaggtgggcgtggcctgcaagagaaatgccaagaaggccgagagcggcaagagcgccagcacagaggtgcctggggcctctgaagatgctgagaagaaccagaagatcatgcagtggatcattgaaggagagaaggagatcagccgccacagaagaactggacatggcagcagcggcaccaggaagccccagccccatgagaacagccggcccctgagcctggagcacccctgggccggcccccagctgcggacctctgtgcagcccagccacctgttcatccaggaccccaccatgccaccccacccagcccccaaccccctgacccagctggaggaggcccggcggcggctggaggaggaggagaagagggccagccgggcccccagcaagcagcgctacgtgcaggaggtgatgaggcggggccgggcctgtgtgcggcctgcctgtgcccctgtgctgcacgtggtgcctgctgtgtctgacatggagctgtctgaaacagagaccaggagccagaggaaggtgggcggcggcagcgcccagccctgtgacagcatcgtggtggcctactacttctgtggggagcccatcccctaccgcaccctggtgcggggccgggctgtgaccctgggccagttcaaggagctgctgaccaagaagggcagctaccgctactacttcaagaaggtgtctgatgaatttgactgtggggtggtgtttgaggaggtgcgggaggatgaagctgtgctgcctgtgtttgaggagaagatcatcggcaaggtggagaaggtggactag

SEQ ID NO: 138766 - DNA, 2589 bp, Artificial Sequence
  derived and/or modified sequence
atgaacatccaggagcagggcttccccctggacctgggcgccagcttcacagaggacgccccccggcctcctgtgccaggagaggagggagagctggtatccacagatccacggcccgcttcatattcattctgttcgggtaaaggggtggggatcaaaggagaaaccagcacagccacgccacgaagatccgacctggacctgggatatgagcctgaggggtccgcctcccctacgcctccctaccttaagtgggcagaaagtctgcactcacttttagacgaccaggatgggatttctctctttcgaacttttctcaaacaggagggctgcgccgacttattagacttctggttcgcctgcacaggatttaggaaactcgaaccgtgtgattcaaatgaggaaaagcgcctgaagctggccagagcaatctaccgaaagtacatcctagacaacaacgggattgtgagccggcagactaagcccgccaccaagagcttcattaagggatgcattatgaagcagctgatcgatccagcaatgttcgaccaggctcagacggaaattcaggctacaatggaggaaaacacctatcccagtttcctgaagtccgatatctaccttgaatatacacggacaggtagcgagtcaccaaaagtatgttcagaccagtcatccggctcggggacaggaaagggtatcagcggctacctgcctactctgaatgaggacgaagagtggaagtgcgaccaagacatggatgaagatgatgggcgagacgccgccccaccaggtagactgccacagaaactcctgctggagaccgcagctcctcgggtgtcttccagtcgcagatatagtgagggccgcgaatttcgatatggatcctggagagaaccagtcaatccgtactatgtgaacgctggatacgctctggcaccggccacatcagctaacgattctgagcagcagagtctcagtagcgacgctgatactctgagtcttaccgactcatctgtggatggcatccctccctaccggataagaaagcaacatcgcagggagatgcaagaatccgtgcaagtgaacggaagggttcccctcccccatatcccacgcacctaccgcgtgcccaaggaggtgcgggtggaacctcaaaaatttgcagaggagctgatccaccgcctcgaagctgtgcaacggaccagggaagctgaggagaagctggaagaaaggcttaagcgcgttcgcatggaagaagagggcgaagacggagatccttcaagcggtccacccggaccttgtcataaactgccgcccgcccccgcctggcaccatttcccacctagatgcgtggatatgggctgcgccggcctacgcgacgcccacgaggaaaatccggaaagcatcctggacgaacatgtccagcgcgtactccgcactcctgggagacagagcccaggccccggacaccgtagcccagactcaggccacgtggcaaagatgccagtggctctaggaggcgccgcctccggacatggaaagcatgtgcccaaaagtggtgcaaaactggatgcggctggactgcatcaccaccggcacgtgcatcatcacgtgcaccacagtacggctcgaccaaaggaacaggtagaagcggaggccactaggcgggcacagagtagcttcgcctgggggctggagcctcacagtcacggcgcgcggagccgcggatactctgaatcagtgggtgcagctcctaacgctagtgacggccttgcccactctggaaaggtaggagttgcttgcaagcgtaatgccaaaaaagccgaatcggggaaaagcgcgagtaccgaagtgcctggcgcctctgaagacgccgaaaagaaccaaaaaatcatgcagtggatcattgagggtgagaaagaaatcagcaggcaccgcagaactggccacgggtctagtggtactagaaaacctcaacctcacgagaatagtagacctctgtcactggagcacccttgggctggcccacagttgcgcactagtgttcagccatcgcatctgtttatacaggaccccacgatgccacctcaccccgcacctaaccccctcactcagcttgaggaggctcgacgacggctcgaggaagaggaaaagcgggcaagccgggccccgtctaagcagcgatacgtacaggaagtgatgcgtcgtggtcgcgcttgtgtcagacccgcctgtgctcccgtcctgcacgtggtgcctgcggtgtctgacatggagcttagcgagaccgagaccagatcccaacggaaggtcggaggtgggtctgcacaaccctgcgacagtatcgtcgttgcatactacttttgcggcgaaccgatcccataccggacccttgttcgcgggcgtgctgtgaccctgggccagtttaaggagctcttgacaaagaaaggaagttatcgctactattttaaaaaagtgtccgacgaatttgactgtggggtagtcttcgaggaggtgcgcgaggacgaggccgtgttaccggtattcgaagaaaaaataatcggtaaagtagaaaaggtggactag

SEQ ID NO: 138767 - DNA, 2589 bp, Artificial Sequence
  derived and/or modified sequence
atgaacattcaagagcagggctttcccctcgacctgggggctagttttacagaggacgctcctcgtccaccagtgcccggtgaggaaggagagctggttagcaccgacccgcgtcctgcaagctattcattctgcagcggaaagggggtgggcatcaaaggcgagacatccaccgccactccgaggcgatcagacctggacttgggatacgagccagaaggttccgcatctcccacaccgccttatctgaaatgggcagagtcgcttcacagcttgttagatgaccaggacggaattagcctttttcgaacctttctgaaacaggaaggttgcgccgatctcctcgatttctggttcgcctgtacgggcttccgcaagctggagccttgcgatagcaacgaagagaagcgcctgaagctggctcgagctatttacagaaaatacatccttgataacaacgggattgtgagcagacaaaccaagcccgctacaaagtcctttatcaaggggtgtatcatgaagcagctgatcgatcccgcaatgttcgatcaagcacagacggaaatacaggcaactatggaagaaaacacttacccctccttcctcaaatcagacatctacttggaatatacccgcactgggagtgaaagtccaaaggtgtgttcagatcagtcctcaggttctggaactggtaaaggcataagcgggtacttgccgacactgaacgaggatgaagagtggaaatgcgatcaggacatggacgaagacgacggcagagacgccgcaccacccggacggctgccccagaagctgttgttggagacggccgctcctcgagtcagtagttcacggaggtactctgaaggtagagaattcaggtatggctcatggagggaaccagtaaatccatactacgtcaatgctggctacgcactggccccagctacgtcagccaatgattccgagcagcagagcttaagcagtgatgctgatacactaagtctcaccgatagtagcgtggacgggattccaccatatcggatacgcaaacagcatcgcagggagatgcaggagtccgtgcaggtgaatggcagagtcccgctgccacacatcccaagaacgtacagagtgcctaaagaagtgagggttgagcctcagaagtttgctgaggagctgatacaccggctggaggccgtccagcggacacgggaggcggaagagaagctggaagagcgtctcaaaagggtgaggatggaagaagagggggaagatggggaccccagcagcggcccacccggtccctgccacaagctcccacccgcacccgcttggcaccatttcccaccacgatgcgtcgatatgggttgcgcaggcttgagggacgcacatgaggaaaatccggaatccatcttagatgaacacgtgcagagggtgcttaggacccctggccgacagtcacctgggccaggtcaccgcagtcctgacagcgggcatgttgctaaaatgcctgtggcgctaggcggtgccgcaagcgggcacggaaaacacgtcccaaagagtggtgcaaagctggacgcagccggactgcaccaccaccgtcatgttcaccatcacgtccaccactccacggccagaccgaaggaacaggtagaagccgaagcaactagacgagcgcagtcgagcttcgcttgggggctggaacctcacagtcacggcgcacgctcccggggatactctgaatcagtcggagcagcaccaaatgccagtgatggtctggcacacagtggcaaggtgggtgtggcctgcaaacgcaatgcgaagaaggccgaatccggtaaatccgcgagcaccgaggtgcccggagcatctgaggatgctgagaagaaccaaaagatcatgcaatggatcatcgagggggaaaaggaaatcagtagacacagacgcaccggtcatgggtcttccggtactcgaaagcctcagccacacgagaattcaagacccctctcactggaacacccctgggccggaccgcagctaagaacgtcggtgcagcccagtcatctgtttatccaggatccaacaatgccaccgcaccccgcacccaatccacttacccaactcgaggaggcaagacggcgtctggaagaagaggagaagagggcatcgcgtgcgccatccaagcagcgatacgtacaggaagtgatgcggagaggacgcgcttgtgttcggcctgcctgtgctcccgtcctccatgtggtaccagccgtgtcagacatggagctatccgagaccgagaccagaagccagcggaaagtcggcggaggctccgcccagccttgcgacagcatcgttgtggcctactatttctgtggagagcctattccgtataggactttggtgcgaggcagggctgtgacactggggcagtttaaagaacttctcactaaaaaaggatcctaccgatactacttcaagaaagtctctgatgaatttgactgtggggtggtctttgaggaagtgagagaagacgaagctgttctgcctgttttcgaggaaaaaatcattggcaaagtggagaaagttgattag

SEQ ID NO: 138768 - DNA, 2589 bp, Artificial Sequence
  derived and/or modified sequence
atgaacatccaggagcagggcttccccctggacctgggcgccagcttcaccgaggacgcccccagaccccccgtgcccggcgaggagggcgagctggtgagcaccgaccccagacccgccagctacagcttctgcagcggcaagggcgtgggcatcaagggcgagaccagcaccgccacccccagaagaagcgacctggacctgggctacgagcccgagggcagcgccagccccacccccccctacctgaagtgggccgagagcctgcacagcctgctggacgaccaggacggcatcagcctgttcagaaccttcctgaagcaggagggctgcgccgacctgctggacttctggttcgcctgcaccggcttcagaaagctggagccctgcgacagcaacgaggagaagagactgaagctggccagagccatctacagaaagtacatcctggacaacaacggcatcgtgagcagacagaccaagcccgccaccaagagcttcatcaagggctgcatcatgaagcagctgatcgaccccgccatgttcgaccaggcccagaccgagatccaggccaccatggaggagaacacctaccccagcttcctgaagagcgacatctacctggagtacaccagaaccggcagcgagagccccaaggtgtgcagcgaccagagcagcggcagcggcaccggcaagggcatcagcggctacctgcccaccctgaacgaggacgaggagtggaagtgcgaccaggacatggacgaggacgacggcagagacgccgccccccccggcagactgccccagaagctgctgctggagaccgccgcccccagagtgagcagcagcagaagatacagcgagggcagagagttcagatacggcagctggagagagcccgtgaacccctactacgtgaacgccggctacgccctggcccccgccaccagcgccaacgacagcgagcagcagagcctgagcagcgacgccgacaccctgagcctgaccgacagcagcgtggacggcatccccccctacagaatcagaaagcagcacagaagagagatgcaggagagcgtgcaggtgaacggcagagtgcccctgccccacatccccagaacctacagagtgcccaaggaggtgagagtggagccccagaagttcgccgaggagctgatccacagactggaggccgtgcagagaaccagagaggccgaggagaagctggaggagagactgaagagagtgagaatggaggaggagggcgaggacggcgaccccagcagcggcccccccggcccctgccacaagctgccccccgcccccgcctggcaccacttcccccccagatgcgtggacatgggctgcgccggcctgagagacgcccacgaggagaaccccgagagcatcctggacgagcacgtgcagagagtgctgagaacccccggcagacagagccccggccccggccacagaagccccgacagcggccacgtggccaagatgcccgtggccctgggcggcgccgccagcggccacggcaagcacgtgcccaagagcggcgccaagctggacgccgccggcctgcaccaccacagacacgtgcaccaccacgtgcaccacagcaccgccagacccaaggagcaggtggaggccgaggccaccagaagagcccagagcagcttcgcctggggcctggagccccacagccacggcgccagaagcagaggctacagcgagagcgtgggcgccgcccccaacgccagcgacggcctggcccacagcggcaaggtgggcgtggcctgcaagagaaacgccaagaaggccgagagcggcaagagcgccagcaccgaggtgcccggcgccagcgaggacgccgagaagaaccagaagatcatgcagtggatcatcgagggcgagaaggagatcagcagacacagaagaaccggccacggcagcagcggcaccagaaagccccagccccacgagaacagcagacccctgagcctggagcacccctgggccggcccccagctgagaaccagcgtgcagcccagccacctgttcatccaggaccccaccatgcccccccaccccgcccccaaccccctgacccagctggaggaggccagaagaagactggaggaggaggagaagagagccagcagagcccccagcaagcagagatacgtgcaggaggtgatgagaagaggcagagcctgcgtgagacccgcctgcgcccccgtgctgcacgtggtgcccgccgtgagcgacatggagctgagcgagaccgagaccagaagccagagaaaggtgggcggcggcagcgcccagccctgcgacagcatcgtggtggcctactacttctgcggcgagcccatcccctacagaaccctggtgagaggcagagccgtgaccctgggccagttcaaggagctgctgaccaagaagggcagctacagatactacttcaagaaggtgagcgacgagttcgactgcggcgtggtgttcgaggaggtgagagaggacgaggccgtgctgcccgtgttcgaggagaagatcatcggcaaggtggagaaggtggactag

SEQ ID NO: 138769 - protein, 647 aa, Artificial Sequence
  derived and/or modified sequence
MAEEEAPKKSRAAGGGASWELCAGALSARLAEEGSGDAGGRRRPPVDPRRLARQLLLLLWLLEAPLLLGVRAQAAGQGPGQGPGPGQQPPPPPQQQQSGQQYNGERGISVPDHGYCQPISIPLCTDIAYNQTIMPNLLGHTNQEDAGLEVHQFYPLVKVQCSAELKFFLCSMYAPVCTVLEQALPPCRSLCERARQGCEALMNKFGFQWPDTLKCEKFPVHGAGELCVGQNTSDKGTPTPSLLPEFWTSNPQHGGGGHRGGFPGGAGASERGKFSCPRALKVPSYLNYHFLGEKDCGAPCEPTKVYGLMYFGPEELRFSRTWIGIWSVLCCASTLFTVLTYLVDMRRFSYPERPIIFLSGCYTAVAVAYIAGFLLEDRVVCNDKFAEDGARTVAQGTKKEGCTILFMMLYFFSMASSIWWVILSLTWFLAAGMKWGHEAIEANSQYFHLAAWAVPAIKTITILALGQVDGDVLSGVCFVGLNNVDALRGFVLAPLFVYLFIGTSFLLAGFVSLFRIRTIMKHDGTKTEKLEKLMVRIGVFSVLYTVPATIVIACYFYEQAFRDQWERSWVAQSCKSYAIPCPHLQAGGGAPPHPPMSPDFTVFMIKYLMTLIVGITSGFWIWSGKTLNSWRKFYTRLTNSKQGETTV

SEQ ID NO: 138770 - DNA, 89 bp, Artificial Sequence
  derived and/or modified sequence
aaatggactcgaatggaatcatcatagaatggaatcgaatgcaatggaatggaatcttccggaatggaatggaatggaatggaatggag

SEQ ID NO: 138771 - DNA, 4341 bp, Artificial Sequence
  derived and/or modified sequence
agttgagggattgacacaaatggtcaggcggcggcggcggagaaggaggcggaggcgcaggggggagccgagcccgctgggctgcggagagttgcgctctctacggggccgcggccactagcgcggcgccgccagccgggagccagcgagccgagggccaggaaggcgggacacgaccccggcgcgccctagccacccgggttctccccgccgcccgcgcttcatgaatcgcaagtttccgcggcggcggcggctgcggtacgcagaacaggagccgggggagcgggccgaaagcggcttgggctcgacggagggcacccgcgcagaggtctccctggccgcagggggagccgccgccggccgtgcccctggcagccccagcggagcggcgccaagagaggagccgagaaagtatggctgaggaggaggcgcctaagaagtcccgggccgccggcggtggcgcgagctgggaactttgtgccggggcgctctcggcccggctggcggaggagggcagcggggacgccggtggccgccgccgcccgccagttgacccccggcgattggcgcgccagctgctgctgctgctttggctgctggaggctccgctgctgctgggggtccgggcccaggcggcgggccaggggccaggccaggggcccgggccggggcagcaaccgccgccgccgcctcagcagcaacagagcgggcagcagtacaacggcgagcggggcatctccgtcccggaccacggctattgccagcccatctccatcccgctgtgcacggacatcgcgtacaaccagaccatcatgcccaacctgctgggccacacgaaccaggaggacgcgggcctggaggtgcaccagttctaccctctagtgaaagtgcagtgttccgctgagctcaagttcttcctgtgctccatgtacgcgcccgtgtgcaccgtgctagagcaggcgctgccgccctgccgctccctgtgcgagcgcgcgcgccagggctgcgaggcgctcatgaacaagttcggcttccagtggccagacacgctcaagtgtgagaagttcccggtgcacggcgccggcgagctgtgcgtgggccagaacacgtccgacaagggcaccccgacgccctcgctgcttccagagttctggaccagcaaccctcagcacggcggcggagggcaccgtggcggcttcccggggggcgccggcgcgtcggagcgaggcaagttctcctgcccgcgcgccctcaaggtgccctcctacctcaactaccacttcctgggggagaaggactgcggcgcaccttgtgagccgaccaaggtgtatgggctcatgtacttcgggcccgaggagctgcgcttctcgcgcacctggattggcatttggtcagtgctgtgctgcgcctccacgctcttcacggtgcttacgtacctggtggacatgcggcgcttcagctacccggagcggcccatcatcttcttgtccggctgttacacggccgtggccgtggcctacatcgccggcttcctcctggaagaccgagtggtgtgtaatgacaagttcgccgaggacggggcacgcactgtggcgcagggcaccaagaaggagggctgcaccatcctcttcatgatgctctacttcttcagcatggccagctccatctggtgggtgatcctgtcgctcacctggttcctggcggctggcatgaagtggggccacgaggccatcgaagccaactcacagtattttcacctggccgcctgggctgtgccggccatcaagaccatcaccatcctggcgctgggccaggtggacggcgatgtgctgagcggagtgtgcttcgtggggcttaacaacgtggacgcgctgcgtggcttcgtgctggcgcccctcttcgtgtacctgtttatcggcacgtcctttctgctggccggctttgtgtcgctcttccgcatccgcaccatcatgaagcacgatggcaccaagaccgagaagctggagaagctcatggtgcgcattggcgtcttcagcgtgctgtacactgtgccagccaccatcgtcatcgcctgctacttctacgagcaggccttccgggaccagtgggaacgcagctgggtggcccagagctgcaagagctacgctatcccctgccctcacctccaggcgggcggaggcgccccgccgcacccgcccatgagcccggacttcacggtcttcatgattaagtaccttatgacgctgatcgtgggcatcacgtcgggcttctggatctggtccggcaagaccctcaactcctggaggaagttctacacgaggctcaccaacagcaaacaaggggagactacagtctgagacccggggctcagcccatgcccaggcctcggccggggcgcagcgatcccccaaagccagcgccgtggagttcgtgccaatcctgacatctcgaggtttcctcactagacaactctctttcgcaggctcctttgaacaactcagctcctgcaaaagcttccgtccctgaggcaaaaggacacgagggcccgactgccagagggaggatggacagacctcttgccctcacactctggtaccaggactgttcgcttttatgattgtaaatagcctgtgtaagatttttgtaagtatatttgtatttaaatgacgaccgatcacgcgtttttctttttcaaaagtttttaattatttagggcggtttaaccatttgaggcttttccttcttgcccttttcggagtattgcaaaggagctaaaactggtgtgcaaccgcacagcgctcctggtcgtcctcgcgcgcctctccctaccacgggtgctcgggacggctgggcgccagctccggggcgagttcagcactgcggggtgcgactagggctgcgctgccagggtcacttcccgcctcctccttttgccccctccccctccttctgtcccctccctttctttcctggcttgaggtaggggctcttaaggtacagaactccacaaaccttccaaatctggaggagggcccccatacattacaattcctcccttgctcggcggtggattgcgaaggcccgtcccttcgacttcctgaagctggatttttaactgtccagaactttcctccaacttcatgggggcccacgggtgtgggcgctggcagtctcagcctccctccacggtcaccttcaacgcccagacactcccttctcccaccttagttggttacagggtgagtgagataaccaatgccaaactttttgaagtctaatttttgaggggtgagctcatttcattctctagtgtctaaaacctggtatgggtttggccagcgtcatggaaagatgtggttactgagatttgggaagaagcatgaagctttgtgtgggttggaagagactgaagatatgggttataaaatgttaattctaattgcatacggatgcctggcaaccttgcctttgagaatgagacagcctgcgcttagattttaccggtctgtaaaatggaaatgttgaggtcacctggaaagctttgttaaggagttgatgtttgctttccttaacaagacagcaaaacgtaaacagaaattgaaaacttgaaggatatttcagtgtcatggacttcctcaaaatgaagtgctattttcttatttttaatcaaataactagacatatatcagaaactttaaaatgtaaaagttgtacactttcaacattttattacgattattattcagcagcacattctgaggggggaacaattcacaccaccaataataacctggtaagatttcaggaggtaaagaaggtggaataattgacggggagatagcgcctgaaataaacaaaatatgggcatgcatgctaaagggaaaatgtgtgcaggtctactgcattaaatcctgtgtgctcctcttttggatttacagaaatgtgtcaaatgtaaatctttcaaagccatttaaaaatattcactttagttctctgtgaagaagaggagaaaagcaatcctcctgattgtattgttttaaactttaagaatttatcaaaatgccggtacttaggacctaaatttatctatgtctgtcatacgctaaaatgatattggtctttgaatttggtatacatttattctgttcactatcacaaaatcatctatatttatagaggaatagaagtttatatatatataataccatatttttaatttcacaaataaaaaattcaaagttttgtacaaaattatatggattttgtgcctgaaaataatagagcttgagctgtctgaactattttacattttatggtgtctcatagccaatcccacagtgt

SEQ ID NO: 138772 - DNA, 1944 bp, Artificial Sequence
  derived and/or modified sequence
atggccgaggaagaggctccgaagaaaagccgtgccgcaggaggaggcgccagttgggagctctgtgcaggcgcactgagcgcccgactggcagaagaagggtccggagatgctgggggcaggagaagacccccagtggatcctcggcgtctcgcgcggcagctactactattgctttggctgctggaggctccactgctcttaggcgtgcgggctcaggcggcgggccaaggacccggccaaggcccaggccccggacagcagccaccaccacctcctcagcagcagcagtctggtcaacaatacaacggagagcggggcataagtgtgccagatcacggttattgtcaaccaatctccatacctctgtgcacagatattgcttataaccagactatcatgccaaacctcttaggccatacaaatcaggaagatgcaggcttggaggtgcaccagttttaccccctggttaaggtgcagtgttcagcggaactgaaattctttttgtgctctatgtacgcccccgtgtgcaccgtgctggaacaagctctgccgccgtgcagatctctatgtgagagggcaagacagggctgcgaagcgctcatgaacaaatttggctttcagtggcccgatactctgaaatgcgagaagttcccagtccatggagccggagagctttgcgtgggccagaatactagcgataaggggaccccgactcccagcctgttaccagagttttggaccagtaaccctcagcacggcggggggggacaccgggggggatttcccggaggcgccggcgcatcagaaagaggcaagttctcttgtcctagggcgcttaaggtgccttcttacctgaactatcacttcctaggcgagaaagactgcggcgctccttgcgaacccactaaagtttacggacttatgtatttcgggcctgaggagctgaggttcagccggacgtggatcgggatttggtctgtgctgtgctgcgcctctacactctttactgttctgacataccttgtggatatgcggcggttttcctaccccgagcgccccatcatcttcctctccggctgttacaccgcagtcgcagtcgcatatattgcaggattccttttggaggacagagtggtgtgcaacgacaagttcgcagaagatggcgctaggactgtcgcccaggggacgaagaaagagggctgcactattctgtttatgatgttgtacttcttcagtatggctagctctatttggtgggtcatcctgagtctgacgtggttcttggccgcagggatgaaatggggccatgaggctattgaagctaacagccagtacttccacctggccgcctgggctgtgcctgctattaagacaatcactattttggcccttggacaggtggacggtgatgtgctgtccggtgtctgtttcgtaggccttaataatgttgatgcactgaggggatttgtcctcgctcctttgttcgtctacctcttcattggaacctctttcttgctggccggattcgtgagtctgttccggatccggacaataatgaagcacgacggtaccaagaccgagaaactagaaaagctgatggtgaggatcggggtgttctccgtcctctacactgtccctgccaccattgtgatcgcgtgctacttctacgagcaggcatttcgggatcaatgggagcggtcctgggttgctcagtcatgcaagtcttacgctattccttgccctcacctgcaggctggcgggggtgcacccccccatcccccaatgtctccagactttacggtgtttatgatcaaatatctgatgaccttaattgtcggaatcacaagtggattctggatttggtccggaaagaccctcaacagttggcgtaagttctatactcggcttactaactccaagcaaggagaaacaacagtgtag

SEQ ID NO: 138773 - DNA, 78 bp, Artificial Sequence
  derived and/or modified sequence
atgagggcaaagtggcgaaaaaagcggatgcggaggttgaaaagaaaaagacgcaagatgcggcagcggtctaaatag

SEQ ID NO: 138774 - DNA, 1944 bp, Artificial Sequence
  derived and/or modified sequence
atggccgaggaggaggcccccaagaagagcagagctgctgggggcggggcctcctgggagctgtgtgccggggccctgagcgcccggctggccgaggagggcagcggagatgctgggggcagaagaagacctcctgtggacccccggcggctggcccggcagctgctgctgctgctgtggctgctggaggcccccctgctgctgggcgtgcgggcccaggccgccggccagggccctggccagggccctggccctggccagcagcccccacctccaccccagcagcagcagagcggccagcagtacaatggagagcggggcatctctgtgcctgaccacggctactgccagcccatcagcatccccctgtgcacagacatcgcctacaaccagaccatcatgcccaacctgctgggccacaccaaccaggaggatgctggcctggaggtgcaccagttctaccccctggtgaaggtgcagtgcagcgctgagctgaagttcttcctgtgcagcatgtatgcccctgtgtgcaccgtgctggagcaggccctgcccccctgccgcagcctgtgtgagcgggcccggcagggctgtgaggccctgatgaacaagtttggcttccagtggccagacaccctgaagtgtgagaagtttcctgtgcatggagctggggagctgtgtgtgggccagaacaccagtgacaagggcacccccacccccagcctgctgcctgagttctggaccagcaacccccagcacggcggcggcggccaccggggcggcttccctggaggagctggggccagcgagcggggcaagttcagctgcccccgggccctgaaggtgcccagctacctgaactaccacttcctgggggagaaggactgtggggccccctgtgagcccaccaaggtgtatggcctgatgtactttggacctgaggagctgcgcttcagcaggacctggattggcatctggagcgtgctgtgctgtgccagcaccctcttcaccgtgctgacctacctggtggacatgaggcgcttctcctacccagagcggcccatcatcttcctgagcggctgctacacagctgtggccgtggcctacatcgccggcttcctgctggaggacagagtggtgtgcaatgacaagtttgctgaagatggagccaggacagtggcccagggcaccaagaaggagggctgcaccatcctcttcatgatgctgtacttcttctccatggccagcagcatctggtgggtgatcctgagcctgacctggttcctggccgccggcatgaagtggggccacgaggccatcgaggccaacagccagtacttccacctggccgcctgggccgtgcctgccatcaagaccatcaccatcctggccctgggccaggtggatggagatgtgctgagcggcgtgtgctttgtgggcctgaacaacgtggatgccctgcggggctttgtgctggcccccctgtttgtgtacctgttcatcggcaccagcttcctgctggccggctttgtgtccctcttccgcatccgcaccatcatgaagcatgatggcaccaagacagagaagctggagaagctgatggtgagaattggagtcttctctgtgctgtacacagtgcctgccaccatcgtcatcgcctgctacttctatgagcaggccttccgggaccagtgggagaggtcctgggtggcccagagctgcaagagctatgccatcccctgcccccacctgcaggccggcggcggggccccaccccacccccccatgagcccagacttcaccgtcttcatgatcaagtacctgatgaccctcatcgtgggcatcaccagcggcttctggatctggagcggcaagaccctgaacagctggaggaagttctacacccggctgaccaacagcaagcagggcgagaccaccgtgtag

SEQ ID NO: 138775 - DNA, 1944 bp, Artificial Sequence
  derived and/or modified sequence
atggccgaggaggaggcccccaagaagagccgggccgccggcggcggggcctcctgggaactgtgtgcaggtgctctatctgctcggctcgcggaagagggatctggagacgctggcggccgtcggagacccccggtcgatcctcgacggctggcgagacagctgctcctgctgctgtggcttcttgaggcacctctcctgcttggcgttcgcgcacaggctgccgggcaggggccaggccagggcccaggaccaggccagcaaccacctcccccccctcagcagcaacagtccgggcagcagtacaatggggagagggggatctcggtgccagatcatggttactgtcaaccaatcagtatcccactgtgcactgatattgcatataaccagaccattatgcctaatctattaggccatacgaaccaggaggatgccggcctggaggttcaccagttctatccattggttaaagtacagtgctccgcggagctgaaattcttcttatgtagcatgtacgcaccagtgtgcaccgtgttagagcaggcacttcccccttgcaggtccctgtgcgagagagctcgacaggggtgcgaggcccttatgaacaagtttgggtttcagtggccggataccctcaaatgcgagaagttccccgtgcacggtgccggagagctgtgtgtgggacagaatacttcggataaaggcactcctacccctagtctcttaccggagttttggacatcaaatccccaacatggcgggggaggccataggggcggatttcccggcggcgctggtgctagcgagagaggaaaattcagttgccccagggccctgaaagtaccctcatatctcaattaccacttcctgggggaaaaagattgtggggccccttgtgagcccaccaaagtttacggtcttatgtattttggccctgaagagctgcgcttctcacgcacttggattggcatatggtctgtgctatgctgtgccagtaccctctttacagtgctgacctacttggtcgatatgagaagattttcttacccagaacggcctatcatattcctctctggctgttacacagctgttgccgtcgcatatatcgccggattcctcctggaagaccgcgtggtatgcaacgataaattcgcagaggacggagcccggacagtggcccaagggactaaaaaagaaggctgcaccattcttttcatgatgctgtacttcttctcaatggcctccagcatttggtgggtgattctgagcctgacttggttcctggctgccgggatgaaatgggggcatgaagcaatcgaggctaactcacagtactttcatctggccgcttgggccgttccagcaattaaaaccattaccatactagctcttggtcaggtagacggggatgtcttaagtggtgtctgcttcgttggactaaacaatgtggacgctcttcgaggttttgttctggctcccctctttgtttacctcttcatcgggacttctttcctcctagccggcttcgtgagcctgtttcggattcggaccataatgaagcatgacggcaccaagacggaaaagcttgaaaagctgatggtgagaatcggagtcttttcagttctttatacagtaccagctacgatcgtgatcgcctgctacttctatgagcaggcctttcgggatcagtgggagcgatcgtgggtggctcaatcctgtaagagctacgcaatcccatgccctcatcttcaggcgggagggggcgcaccaccccacccgccaatgtccccggattttacggttttcatgatcaaatatctgatgaccctcatcgttggaattacctcaggcttctggatctggtcaggcaaaaccctcaatagttggcgaaaattttatacacgcctgacaaattccaagcagggagaaacgacggtttag

SEQ ID NO: 138776 - DNA, 1944 bp, Artificial Sequence
  derived and/or modified sequence
atggccgaagaggaggcacccaagaaatcaagagctgcaggaggtggcgcatcttgggagctctgtgcaggggctctgtcagcccgactggctgaggaaggctcaggtgacgcaggaggcaggaggagacctcccgtggatcctcggagactcgccagacagctgcttctgttgctatggctgctggaagcgccactcctactcggcgttcgcgctcaagctgccggtcaggggccagggcagggcccagggccaggccagcagccccctccaccaccacaacagcaacagtccggccaacagtacaatggcgaacggggaatctccgtacccgaccatggctattgtcagcccatcagtatccctctttgcaccgacatcgcttacaaccagacgataatgccaaacctgctgggccatactaaccaggaggatgcaggtctggaagtgcaccagttttaccccctggtgaaagtccagtgttcggctgagctgaagttctttctttgttccatgtacgcacccgtttgcactgtgcttgagcaagcactacccccttgtcgatccttgtgcgagcgggctcgtcaagggtgtgaagctctgatgaataaatttgggttccagtggcctgataccctgaaatgcgaaaaatttccagtccacggtgcgggagagctctgtgtgggtcagaataccagcgacaagggtacaccaacaccttcccttctaccagaattctggacctctaaccctcagcatggaggcggtgggcatcgcggtggttttccaggaggcgcaggtgccagcgaaagggggaagttcagctgccctagagcactcaaagtgcctagctatctcaattaccatttcctgggagaaaaggactgcggagcaccttgcgaacctactaaggtgtacgggcttatgtatttcgggcctgaggagttgcggtttagcaggacctggataggcatctggtcggtgctttgctgtgcaagtaccctctttacggtccttacttatctggtagacatgaggcggttcagttacccggaacggcctattattttcctgtcggggtgctatacagctgtggcagttgcctatattgccggttttttgctggaagatagggtggtgtgcaacgataaattcgcagaggacggcgctagaaccgttgcccaaggtacgaagaaagagggctgtacaatcttgttcatgatgctctatttcttttcaatggcgtcatctatctggtgggtaatcttgtctctgacatggttcctggccgctggaatgaaatggggccatgaagcaatagaagctaatagccagtacttccaccttgccgcttgggctgtgccagcaatcaaaacgatcaccattctggcattgggccaggttgatggggatgtgttgagcggagtctgtttcgtgggcctcaataatgtggacgcgctgcggggtttcgtcctcgcacctttgtttgtttatttgtttatcgggacaagctttctgctagccggattcgtgtccctgtttcgaatcaggaccatcatgaagcacgatggcactaagactgaaaagctggagaaactgatggtgaggattggggtgttctcggtgttatacactgttcccgctactattgtaatagcatgctacttctacgagcaagcatttagagatcagtgggagcgtagttgggtcgcgcaatcatgcaaatcctatgccatcccttgccctcatcttcaggccggagggggagctccccctcaccctccgatgtcacctgactttactgtgttcatgatcaagtacctgatgactcttattgtgggcatcacatccgggttttggatatggtcaggtaagactttgaactcatggaggaagttttataccaggttaactaattcaaagcagggggaaactaccgtgtag

SEQ ID NO: 138777 - DNA, 1944 bp, Artificial Sequence
  derived and/or modified sequence
atggccgaggaggaggcccccaagaagagcagagccgccggcggcggcgccagctgggagctgtgcgccggcgccctgagcgccagactggccgaggagggcagcggcgacgccggcggcagaagaagaccccccgtggaccccagaagactggccagacagctgctgctgctgctgtggctgctggaggcccccctgctgctgggcgtgagagcccaggccgccggccagggccccggccagggccccggccccggccagcagccccccccccccccccagcagcagcagagcggccagcagtacaacggcgagagaggcatcagcgtgcccgaccacggctactgccagcccatcagcatccccctgtgcaccgacatcgcctacaaccagaccatcatgcccaacctgctgggccacaccaaccaggaggacgccggcctggaggtgcaccagttctaccccctggtgaaggtgcagtgcagcgccgagctgaagttcttcctgtgcagcatgtacgcccccgtgtgcaccgtgctggagcaggccctgcccccctgcagaagcctgtgcgagagagccagacagggctgcgaggccctgatgaacaagttcggcttccagtggcccgacaccctgaagtgcgagaagttccccgtgcacggcgccggcgagctgtgcgtgggccagaacaccagcgacaagggcacccccacccccagcctgctgcccgagttctggaccagcaacccccagcacggcggcggcggccacagaggcggcttccccggcggcgccggcgccagcgagagaggcaagttcagctgccccagagccctgaaggtgcccagctacctgaactaccacttcctgggcgagaaggactgcggcgccccctgcgagcccaccaaggtgtacggcctgatgtacttcggccccgaggagctgagattcagcagaacctggatcggcatctggagcgtgctgtgctgcgccagcaccctgttcaccgtgctgacctacctggtggacatgagaagattcagctaccccgagagacccatcatcttcctgagcggctgctacaccgccgtggccgtggcctacatcgccggcttcctgctggaggacagagtggtgtgcaacgacaagttcgccgaggacggcgccagaaccgtggcccagggcaccaagaaggagggctgcaccatcctgttcatgatgctgtacttcttcagcatggccagcagcatctggtgggtgatcctgagcctgacctggttcctggccgccggcatgaagtggggccacgaggccatcgaggccaacagccagtacttccacctggccgcctgggccgtgcccgccatcaagaccatcaccatcctggccctgggccaggtggacggcgacgtgctgagcggcgtgtgcttcgtgggcctgaacaacgtggacgccctgagaggcttcgtgctggcccccctgttcgtgtacctgttcatcggcaccagcttcctgctggccggcttcgtgagcctgttcagaatcagaaccatcatgaagcacgacggcaccaagaccgagaagctggagaagctgatggtgagaatcggcgtgttcagcgtgctgtacaccgtgcccgccaccatcgtgatcgcctgctacttctacgagcaggccttcagagaccagtgggagagaagctgggtggcccagagctgcaagagctacgccatcccctgcccccacctgcaggccggcggcggcgcccccccccacccccccatgagccccgacttcaccgtgttcatgatcaagtacctgatgaccctgatcgtgggcatcaccagcggcttctggatctggagcggcaagaccctgaacagctggagaaagttctacaccagactgaccaacagcaagcagggcgagaccaccgtgtag

SEQ ID NO: 138778 - protein, 706 aa, Artificial Sequence
  derived and/or modified sequence
MEMFTFLLTCIFLPLLRGHSLFTCEPITVPRCMKMAYNMTFFPNLMGHYDQSIAAVEMEHFLPLANLECSPNIETFLCKAFVPTCIEQIHVVPPCRKLCEKVYSDCKKLIDTFGIRWPEELECDRLQYCDETVPVTFDPHTEFLGPQKKTEQVQRDIGFWCPRHLKTSGGQGYKFLGIDQCAPPCPNMYFKSDELEFAKSFIGTVSIFCLCATLFTFLTFLIDVRRFRYPERPIIYYSVCYSIVSLMYFIGFLLGDSTACNKADEKLELGDTVVLGSQNKACTVLFMLLYFFTMAGTVWWVILTITWFLAAGRKWSCEAIEQKAVWFHAVAWGTPGFLTVMLLAMNKVEGDNISGVCFVGLYDLDASRYFVLLPLCLCVFVGLSLLLAGIISLNHVRQVIQHDGRNQEKLKKFMIRIGVFSGLYLVPLVTLLGCYVYEQVNRITWEITWVSDHCRQYHIPCPYQAKAKARPELALFMIKYLMTLIVGISAVFWVGSKKTCTEWAGFFKRNRKRDPISESRRVLQESCEFFLKHNSKVKHKKKHYKPSSHKLKVISKSMGTSTGATANHGTSAVAITSHDYLGQETLTEIQTSPETSMREVKADGASTPRLREQDCGEPASPAASISRLSGEQVDGKGQAGSVSESARSEGRISPKSDITDTGLAQSNNLQVPSSSEPSSLKGSTSLLVHPVSGVRKEQGGGCHSDT

SEQ ID NO: 138779 - DNA, 3788 bp, Artificial Sequence
  derived and/or modified sequence
gacctggcggcgcagtctcgcgggatcgctcagctctcgctccccgtgcggctctcgaggcagctccagtcccggacgcaaccccggagccgtctcaggtccctggggggaacggtgggttagacggggacgggaagggacagcggccttcgaccgccccccgagtaattgacccaggactcattttcaggaaagcctgaaaatgagtaaaatagtgaaatgaggaatttgaacattttatctttggatggggatcttctgaggatgcaaagagtgattcatccaagccatgtggtaaaatcaggaatttgaagaaaatggaaatgtttacatttttgttgacgtgtatttttctacccctcctaagagggcacagtctcttcacctgtgaaccaattactgttcccagatgtatgaaaatggcctacaacatgacgtttttccctaatctgatgggtcattatgaccagagtattgccgcggtggaaatggagcattttcttcctctcgcaaatctggaatgttcaccaaacattgaaactttcctctgcaaagcatttgtaccaacctgcatagaacaaattcatgtggttccaccttgtcgtaaactttgtgagaaagtatattctgattgcaaaaaattaattgacacttttgggatccgatggcctgaggagcttgaatgtgacagattacaatactgtgatgagactgttcctgtaacttttgatccacacacagaatttcttggtcctcagaagaaaacagaacaagtccaaagagacattggattttggtgtccaaggcatcttaagacttctgggggacaaggatataagtttctgggaattgaccagtgtgcgcctccatgccccaacatgtattttaaaagtgatgagctagagtttgcaaaaagttttattggaacagtttcaatattttgtctttgtgcaactctgttcacattccttacttttttaattgatgttagaagattcagatacccagagagaccaattatatattactctgtctgttacagcattgtatctcttatgtacttcattggatttttgctaggcgatagcacagcctgcaataaggcagatgagaagctagaacttggtgacactgttgtcctaggctctcaaaataaggcttgcaccgttttgttcatgcttttgtattttttcacaatggctggcactgtgtggtgggtgattcttaccattacttggttcttagctgcaggaagaaaatggagttgtgaagccatcgagcaaaaagcagtgtggtttcatgctgttgcatggggaacaccaggtttcctgactgttatgcttcttgctatgaacaaagttgaaggagacaacattagtggagtttgctttgttggcctttatgacctggatgcttctcgctactttgtactcttgccactgtgcctttgtgtgtttgttgggctctctcttcttttagctggcattatttccttaaatcatgttcgacaagtcatacaacatgatggccggaaccaagaaaaactaaagaaatttatgattcgaattggagtcttcagcggcttgtatcttgtgccattagtgacacttctcggatgttacgtctatgagcaagtgaacaggattacctgggagataacttgggtctctgatcattgtcgtcagtaccatatcccatgtccttatcaggcaaaagcaaaagctcgaccagaattggctttatttatgataaaatacctgatgacattaattgttggcatctctgctgtcttctgggttggaagcaaaaagacatgcacagaatgggctgggttttttaaacgaaatcgcaagagagatccaatcagtgaaagtcgaagagtactacaggaatcatgtgagtttttcttaaagcacaattctaaagttaaacacaaaaagaagcactataaaccaagttcacacaagctgaaggtcatttccaaatccatgggaaccagcacaggagctacagcaaatcatggcacttctgcagtagcaattactagccatgattacctaggacaagaaactttgacagaaatccaaacctcaccagaaacatcaatgagagaggtgaaagcggacggagctagcacccccaggttaagagaacaggactgtggtgaacctgcctcgccagcagcatccatctccagactctctggggaacaggtcgacgggaagggccaggcaggcagtgtatctgaaagtgcgcggagtgaaggaaggattagtccaaagagtgatattactgacactggcctggcacagagcaacaatttgcaggtccccagttcttcagaaccaagcagcctcaaaggttccacatctctgcttgttcacccggtttcaggagtgagaaaagagcagggaggtggttgtcattcagatacttgaagaacattttctctcgttactcagaagcaaatttgtgttacactggaagtgacctatgcactgttttgtaagaatcactgttacattcttcttttgcacttaaagttgcattgcctactgttatactggaaaaaatagagttcaagaataatatgactcatttcacacaaaggttaatgacaacaatatacctgaaaacagaaaatgtgcaggttaataatatttttttaatagtgtgggaggacagagttagaggaatcttccttttctatttatgaagattctactcttggtaagagtattttaagatgtactatgctattttacttttttgatataaaatcaagatatttctttgctgaagtatttaaatcttatccttgtatctttttatacatatttgaaaataagcttatatgtatttgaacttttttgaaatcctattcaagtatttttatcatgctattgtgatattttagcactttggtagcttttacactgaatttctaagaaaattgtaaaatagtcttcttttatactgtaaaaaaagatataccaaaaagtcttataataggaatttaactttaaaaacccacttattgataccttaccatctaaaatgtgtgatttttatagtctcgttttaggaatttcacagatctaaattatgtaactgaaataaggtgcttactcaaagagtgtccactattgattgtattatgctgctcactgatccttctgcatatttaaaataaaatgtcctaaagggttagtagacaaaatgttagtcttttgtatattaggccaagtgcaattgacttcccttttttaatgtttcatgaccacccattgattgtattataaccacttacagttgcttatattttttgttttaacttttgttttttaacatttagaatattacattttgtattatacagtacctttctcagacattttgtagaattcatttcggcagctcactaggattttgctgaacattaaaaagtgtgatagcgatattagtgccaatcaaatggaaaaaaggtagttttaataaacaagacacaacgtttttatacaacatactttaaaatattaaggagttttcttaattttgtttcctattaagtattattctttgggcaagattttctgatgcttttgattttctctcaatttagcatttgcttttggtttttttctctatttagcattctgttaaggcacaaaaactatgtactgtatgggaaatgttgtaaatattaccttttccacattttaaacagacaactttgaatacaaaaactttgttttgtgtgatcttttcattaataaaattatctttgt

SEQ ID NO: 138780 - DNA, 3719 bp, Artificial Sequence
  derived and/or modified sequence
cctttcgaactcaagtcacttgggcaattggctttacaaagcaaattggctccgtttaaggattcttgactcctgaaatccgcaaggaagtgggttcttttagagccagcgccaagagcttcaaaaaatccttctaagtaattgacccaggactcattttcaggaaagcctgaaaatgagtaaaatagtgaaatgaggaatttgaacattttatctttggatggggatcttctgaggatgcaaagagtgattcatccaagccatgtggtaaaatcaggaatttgaagaaaatggaaatgtttacatttttgttgacgtgtatttttctacccctcctaagagggcacagtctcttcacctgtgaaccaattactgttcccagatgtatgaaaatggcctacaacatgacgtttttccctaatctgatgggtcattatgaccagagtattgccgcggtggaaatggagcattttcttcctctcgcaaatctggaatgttcaccaaacattgaaactttcctctgcaaagcatttgtaccaacctgcatagaacaaattcatgtggttccaccttgtcgtaaactttgtgagaaagtatattctgattgcaaaaaattaattgacacttttgggatccgatggcctgaggagcttgaatgtgacagattacaatactgtgatgagactgttcctgtaacttttgatccacacacagaatttcttggtcctcagaagaaaacagaacaagtccaaagagacattggattttggtgtccaaggcatcttaagacttctgggggacaaggatataagtttctgggaattgaccagtgtgcgcctccatgccccaacatgtattttaaaagtgatgagctagagtttgcaaaaagttttattggaacagtttcaatattttgtctttgtgcaactctgttcacattccttacttttttaattgatgttagaagattcagatacccagagagaccaattatatattactctgtctgttacagcattgtatctcttatgtacttcattggatttttgctaggcgatagcacagcctgcaataaggcagatgagaagctagaacttggtgacactgttgtcctaggctctcaaaataaggcttgcaccgttttgttcatgcttttgtattttttcacaatggctggcactgtgtggtgggtgattcttaccattacttggttcttagctgcaggaagaaaatggagttgtgaagccatcgagcaaaaagcagtgtggtttcatgctgttgcatggggaacaccaggtttcctgactgttatgcttcttgctatgaacaaagttgaaggagacaacattagtggagtttgctttgttggcctttatgacctggatgcttctcgctactttgtactcttgccactgtgcctttgtgtgtttgttgggctctctcttcttttagctggcattatttccttaaatcatgttcgacaagtcatacaacatgatggccggaaccaagaaaaactaaagaaatttatgattcgaattggagtcttcagcggcttgtatcttgtgccattagtgacacttctcggatgttacgtctatgagcaagtgaacaggattacctgggagataacttgggtctctgatcattgtcgtcagtaccatatcccatgtccttatcaggcaaaagcaaaagctcgaccagaattggctttatttatgataaaatacctgatgacattaattgttggcatctctgctgtcttctgggttggaagcaaaaagacatgcacagaatgggctgggttttttaaacgaaatcgcaagagagatccaatcagtgaaagtcgaagagtactacaggaatcatgtgagtttttcttaaagcacaattctaaagttaaacacaaaaagaagcactataaaccaagttcacacaagctgaaggtcatttccaaatccatgggaaccagcacaggagctacagcaaatcatggcacttctgcagtagcaattactagccatgattacctaggacaagaaactttgacagaaatccaaacctcaccagaaacatcaatgagagaggtgaaagcggacggagctagcacccccaggttaagagaacaggactgtggtgaacctgcctcgccagcagcatccatctccagactctctggggaacaggtcgacgggaagggccaggcaggcagtgtatctgaaagtgcgcggagtgaaggaaggattagtccaaagagtgatattactgacactggcctggcacagagcaacaatttgcaggtccccagttcttcagaaccaagcagcctcaaaggttccacatctctgcttgttcacccggtttcaggagtgagaaaagagcagggaggtggttgtcattcagatacttgaagaacattttctctcgttactcagaagcaaatttgtgttacactggaagtgacctatgcactgttttgtaagaatcactgttacattcttcttttgcacttaaagttgcattgcctactgttatactggaaaaaatagagttcaagaataatatgactcatttcacacaaaggttaatgacaacaatatacctgaaaacagaaaatgtgcaggttaataatatttttttaatagtgtgggaggacagagttagaggaatcttccttttctatttatgaagattctactcttggtaagagtattttaagatgtactatgctattttacttttttgatataaaatcaagatatttctttgctgaagtatttaaatcttatccttgtatctttttatacatatttgaaaataagcttatatgtatttgaacttttttgaaatcctattcaagtatttttatcatgctattgtgatattttagcactttggtagcttttacactgaatttctaagaaaattgtaaaatagtcttcttttatactgtaaaaaaagatataccaaaaagtcttataataggaatttaactttaaaaacccacttattgataccttaccatctaaaatgtgtgatttttatagtctcgttttaggaatttcacagatctaaattatgtaactgaaataaggtgcttactcaaagagtgtccactattgattgtattatgctgctcactgatccttctgcatatttaaaataaaatgtcctaaagggttagtagacaaaatgttagtcttttgtatattaggccaagtgcaattgacttcccttttttaatgtttcatgaccacccattgattgtattataaccacttacagttgcttatattttttgttttaacttttgttttttaacatttagaatattacattttgtattatacagtacctttctcagacattttgtagaattcatttcggcagctcactaggattttgctgaacattaaaaagtgtgatagcgatattagtgccaatcaaatggaaaaaaggtagttttaataaacaagacacaacgtttttatacaacatactttaaaatattaaggagttttcttaattttgtttcctattaagtattattctttgggcaagattttctgatgcttttgattttctctcaatttagcatttgcttttggtttttttctctatttagcattctgttaaggcacaaaaactatgtactgtatgggaaatgttgtaaatattaccttttccacattttaaacagacaactttgaatacaaaaa

SEQ ID NO: 138781 - DNA, 2774 bp, Artificial Sequence
  derived and/or modified sequence
tctcgctccccgtgcggctctcgaggcagctccagtcccggacgcaaccccggagccgtctcaggtccctggggggaacggtgggttagacggggacgggaagggacagcggccttcgaccgccccccgagtaattgacccaggactcattttcaggaaagcctgaaaatgagtaaaatagtgaaatgaggaatttgaacattttatctttggatggggatcttctgaggatgcaaagagtgattcatccaagccatgtgatgtatgaaaatggcctacaacatgacgtttttccctaatctgatgggtcattatgaccagagtattgccgcggtggaaatggagcattttcttcctctcgcaaatctggaatgttcaccaaacattgaaactttcctctgcaaagcatttgtaccaacctgcatagaacaaattcatgtggttccaccttgtcgtaaactttgtgagaaagtatattctgattgcaaaaaattaattgacacttttgggatccgatggcctgaggagcttgaatgtgacagattacaatactgtgatgagactgttcctgtaacttttgatccacacacagaatttcttggtcctcagaagaaaacagaacaagtccaaagagacattggattttggtgtccaaggcatcttaagacttctgggggacaaggatataagtttctgggaattgaccagtgtgcgcctccatgccccaacatgtattttaaaagtgatgagctagagtttgcaaaaagttttattggaacagtttcaatattttgtctttgtgcaactctgttcacattccttacttttttaattgatgttagaagattcagatacccagagagaccaattatatattactctgtctgttacagcattgtatctcttatgtacttcattggatttttgctaggcgatagcacagcctgcaataaggcagatgagaagctagaacttggtgacactgttgtcctaggctctcaaaataaggcttgcaccgttttgttcatgcttttgtattttttcacaatggctggcactgtgtggtgggtgattcttaccattacttggttcttagctgcaggaagaaaatggagttgtgaagccatcgagcaaaaagcagtgtggtttcatgctgttgcatggggaacaccaggtttcctgactgttatgcttcttgctatgaacaaagttgaaggagacaacattagtggagtttgctttgttggcctttatgacctggatgcttctcgctactttgtactcttgccactgtgcctttgtgtgtttgttgggctctctcttcttttagctggcattatttccttaaatcatgttcgacaagtcatacaacatgatggccggaaccaagaaaaactaaagaaatttatgattcgaattggagtcttcagcggcttgtatcttgtgccattagtgacacttctcggatgttacgtctatgagcaagtgaacaggattacctgggagataacttgggtctctgatcattgtcgtcagtaccatatcccatgtccttatcaggcaaaagcaaaagctcgaccagaattggctttatttatgataaaatacctgatgacattaattgttggcatctctgctgtcttctgggttggaagcaaaaagacatgcacagaatgggctgggttttttaaacgaaatcgcaagagagatccaatcagtgaaagtcgaagagtactacaggaatcatgtgagtttttcttaaagcacaattctaaagttaaacacaaaaagaagcactataaaccaagttcacacaagctgaaggtcatttccaaatccatgggaaccagcacaggagctacagcaaatcatggcacttctgcagtagcaattactagccatgattacctaggacaagaaactttgacagaaatccaaacctcaccagaaacatcaatgagagaggtgaaagcggacggagctagcacccccaggttaagagaacaggactgtggtgaacctgcctcgccagcagcatccatctccagactctctggggaacaggtcgacgggaagggccaggcaggcagtgtatctgaaagtgcgcggagtgaaggaaggattagtccaaagagtgatattactgacactggcctggcacagagcaacaatttgcaggtccccagttcttcagaaccaagcagcctcaaaggttccacatctctgcttgttcacccggtttcaggagtgagaaaagagcagggaggtggttgtcattcagatacttgaagaacattttctctcgttactcagaagcaaatttgtgttacactggaagtgacctatgcactgttttgtaagaatcactgttacattcttcttttgcacttaaagttgcattgcctactgttatactggaaaaaatagagttcaagaataatatgactcatttcacacaaaggttaatgacaacaatatacctgaaaacagaaaatgtgcaggttaataatatttttttaatagtgtgggaggacagagttagaggaatcttccttttctatttatgaagattctactcttggtaagagtattttaagatgtactatgctattttacttttttgatataaaatcaagatatttctttgctgaagtatttaaatcttatccttgtatctttttatacatatttgaaaataagcttatatgtatttgaacttttttgaaatcctattcaagtatttttatcatgctattgtgatattttagcacttt

SEQ ID NO: 138782 - DNA, 2121 bp, Artificial Sequence
  derived and/or modified sequence
atggagatgtttacctttctgctgacgtgcatatttctacctctgctgagaggacactccctgtttacatgcgaaccgatcaccgtaccaagatgcatgaagatggcgtacaacatgacattttttcctaaccttatgggccactacgaccagtccatagccgctgtcgaaatggaacattttctcccattagctaacctggagtgcagtccgaatattgaaacattcctgtgtaaggcctttgtccctacctgcattgagcagatacatgtggtacctccatgtcggaaactatgtgagaaggtgtattctgactgcaaaaagctcatcgatacattcggcataaggtggccagaggagctggagtgcgaccgacttcagtactgcgatgagaccgtgcctgttaccttcgatcctcacacagaatttctcgggccgcagaagaagacagaacaagttcagcgagatatcggattctggtgtccccgccatctcaagacttccggcggtcaggggtataaatttctaggcatagaccagtgtgcacctccttgccctaatatgtattttaagagcgacgaactcgagttcgcgaagtcatttataggcactgtgtccatcttctgtttgtgtgcaactcttttcaccttcttgacattcctgatagacgtccgtcgcttccgctaccctgagcggcctataatctactacagtgtgtgttacagtatcgtttcactgatgtactttatagggtttttactcggcgatagcaccgcctgcaacaaggccgacgagaagttggagctcggagatacagtcgtattagggtcccaaaataaagcttgcaccgtcctattcatgctcttatattttttcacaatggccggcacagtgtggtgggttatattgaccatcacttggttcctggccgccggccggaagtggtcatgtgaggccattgaacagaaggccgtgtggttccatgctgttgcgtgggggactccgggcttcttgaccgtcatgctattagcaatgaacaaagttgaaggcgataacataagtggtgtgtgctttgtgggcctctacgaccttgatgctagtaggtacttcgtgcttctacccctgtgtctctgcgtgttcgtcggtctgagtcttcttctggccggaattatctctcttaatcatgtgcggcaggtaatccagcatgacggacggaaccaggagaaactcaagaagttcatgatcagaatcggagtgttcagcggcctgtaccttgtccctctggtaactttgttagggtgttacgtatatgaacaggtgaataggattacctgggagatcacttgggtgtccgaccattgtcgtcagtaccacatcccatgcccgtaccaggccaaggccaaggcacgccctgagctggccttgtttatgataaagtatttgatgacactgatcgtcggtatctcagcagtcttttgggttggctcgaagaaaacttgtacggagtgggctgggttctttaagcggaacagaaagcgcgaccctatatccgaaagcaggcgagtgctccaggagtcatgcgaattcttcctgaaacacaattccaaagtcaaacacaagaaaaaacactacaagccttcatcccacaaactgaaagtgatctcaaagtcaatgggcacatcaaccggcgcgactgctaatcacggaacgtctgctgtggcaattacttctcatgactacctgggccaggaaaccctgacggagattcagaccagccccgagactagtatgagagaagtcaaggctgatggcgctagtactccccgcttacgggaacaagattgtggtgagcctgcctctccagcggcaagcattagtagattgagcggggaacaggtagacgggaaagggcaggctggcagcgtcagcgagtctgctagatcagaaggacggatatctccaaagtcagatatcacagacaccggtctagcgcaatctaacaatctacaggtccccagcagcagcgagccaagtagtcttaagggctccacaagcctcctggtgcacccagtgtctggggtgaggaaagagcaaggtggcggttgtcatagtgatacatag

SEQ ID NO: 138783 - DNA, 2121 bp, Artificial Sequence
  derived and/or modified sequence
atggaaatgttcacattcttactcacctgtatcttcctcccacttctgcgtgggcactcgctgtttacctgcgagcccattacagtaccacgctgcatgaagatggcctacaacatgaccttcttccccaatctgatgggtcattatgaccagtcaattgctgccgtggagatggagcattttcttccccttgctaacctcgagtgttctcccaatatcgagaccttcttgtgcaaggcctttgtcccaacttgcatagaacagatccacgtcgtacccccatgccgaaaactgtgcgagaaggtctactcagactgcaagaagctgatcgatacctttggaattcgatggcccgaggaactggaatgtgatcgattgcaatattgcgacgaaacggttcccgtgacgttcgaccctcatactgagttcttagggccccagaagaagaccgaacaggtgcagcgggatatcggtttttggtgtccccgacatttaaaaaccagtggcgggcagggatacaagtttctcggcatagatcaatgtgcccctccctgtcctaacatgtacttcaaatcagatgagcttgagtttgccaagtcattcattggcacagtgagtatattctgtctttgcgcaacccttttcactttccttactttcctcatcgacgtccgcagatttcgctatcctgagcggcctattatctactatagcgtgtgctacagcattgtctcactcatgtacttcatagggtttctgctcggcgacagtacagcctgtaataaagctgatgagaaactcgagctcggagatacagttgtcctgggttcacagaataaggcttgcactgtcttgtttatgctcttatatttctttaccatggctggcaccgtgtggtgggtgatcctaacaattacttggtttctcgctgctggaagaaagtggtcatgtgaagccatcgagcagaaggcagtgtggttccacgcagtcgcatggggaacacccggttttctgacggtcatgctgctggctatgaataaggtcgagggcgacaacatctccggagtctgctttgtgggtctatatgatctcgatgcctctcggtacttcgttcttctgccgctctgcttgtgcgtgttcgtgggcctctctcttctgttagctgggatcatttccttaaaccatgtacgacaggtgatccagcacgacggtagaaaccaggagaaactcaagaagttcatgatccgcataggagtgttctccgggctgtaccttgtgcccttggtaaccttattggggtgttatgtctacgagcaggtaaatagaatcacttgggagatcacttgggtcagtgatcactgcagacagtatcatattccatgtccatatcaggccaaggccaaagctagacccgagttagccctttttatgattaaatatctgatgacccttatcgtgggaatatctgcagtgttctgggtggggtccaagaagacgtgtaccgagtgggccgggttcttcaaaaggaatcgaaagcgcgatcctatttcagagagtaggcgagtgctgcaggagtcgtgtgagttcttcctgaaacacaacagcaaggtgaagcataaaaagaaacactacaaaccttcttcccacaagttgaaagtcattagcaagtcgatgggcacctcaaccggcgccacagccaaccatgggacaagtgctgttgcaattacttcccatgattacctcggacaggagacgctgacggagattcaaaccagcccagagacctctatgagagaagtgaaggcagatggagctagtacaccccggcttagagagcaggactgtggggaaccagcatctcccgcggcatccatttcgagactcagcggcgaacaagttgatggaaagggacaagcgggttcagtgtcggagtctgctcgaagcgaggggcgcatttcccctaagagcgacatcactgacactggcctcgcacagtcaaacaatcttcaagtaccttcctcgtccgaaccttcctcactcaagggttcaacatcactgcttgtccaccccgtgtccggagtccgaaaagagcagggtgggggttgtcattctgatacatag

SEQ ID NO: 138784 - DNA, 2121 bp, Artificial Sequence
  derived and/or modified sequence
atggagatgttcaccttcctgctgacctgcatcttcctgcccctgctgcggggccacagcctcttcacctgtgagcccatcaccgtgccccgctgcatgaagatggcctacaacatgaccttcttccccaacctgatgggccactatgaccagagcattgctgctgtggagatggagcacttcctgcccctggccaacctggagtgcagccccaacatcgagaccttcctgtgcaaggcctttgtgcccacctgcatcgagcagatccacgtggtgcccccctgcaggaagctgtgtgagaaggtgtacagcgactgcaagaagctgattgacaccttcggcatccgctggccagaggagctggagtgtgaccggctgcagtactgtgatgagaccgtgcctgtgacctttgacccccacacagagttcctgggcccccagaagaagacagagcaggtgcagagggacatcggcttctggtgccccaggcacctgaagaccagcggcggccagggctacaagttcctgggcatcgaccagtgtgccccaccctgccccaacatgtacttcaagagtgatgagctggagtttgccaagagcttcatcggcaccgtgtccatcttctgcctgtgtgccaccctcttcaccttcctgaccttcctgattgatgtgcggcgcttccgctacccagagcggcccatcatctactacagcgtgtgctacagcatcgtgtccctgatgtacttcatcggcttcctgctgggggacagcacagcctgcaacaaggcagatgagaagctggagctgggggacacagtggtgctgggcagccagaacaaggcctgcaccgtgctcttcatgctgctgtacttcttcaccatggccggcaccgtgtggtgggtgatcctgaccatcacctggttcctggccgccggcaggaagtggagctgtgaggccatcgagcagaaggctgtgtggttccacgctgtggcctggggcaccccaggcttcctgactgtgatgctgctggccatgaacaaggtggagggggacaacatcagcggcgtgtgctttgtgggcctgtatgacctggatgccagccgctactttgtgctgctgcccctgtgcctgtgtgtgtttgtgggcctgagcctgctgctggccggcatcatcagcctgaaccacgtgcggcaggtgatccagcatgatggaagaaaccaggagaagctgaagaagttcatgatcagaattggagtcttcagcggcctgtacctggtgcccctggtgaccctgctgggctgctacgtgtatgagcaggtgaaccgcatcacctgggagatcacctgggtgtctgaccactgccggcagtaccacatcccctgcccctaccaggccaaggccaaggcccggcctgagctggccctcttcatgatcaagtacctgatgaccctgattgtgggcatctctgctgtgttctgggtgggcagcaagaagacctgcacagagtgggccggcttcttcaagaggaacaggaagagggaccccatcagcgagagccggcgggtgctgcaggagagctgtgagttcttcctgaagcacaacagcaaggtgaagcacaagaagaagcactacaagcccagcagccacaagctgaaggtgatcagcaagtccatgggcaccagcactggagccacagccaaccacggcaccagcgctgtggccatcaccagccatgactacctgggccaggagaccctgacagagatccagaccagccctgagacctccatgagggaggtgaaggcagatggagccagcaccccccggctgcgggagcaggactgtggggagcccgccagccctgctgccagcatcagccggctgtctggagagcaggtggatggcaagggccaggccggctctgtgtctgagagcgcccggtctgagggccgcatcagccccaagagtgacatcacagacaccggcctggcccagagcaacaacctgcaggtgcccagcagcagcgagcccagcagcctgaagggcagcaccagcctgctggtgcaccctgtgtctggagtgaggaaggagcagggcggcggctgccacagcgacacctag

SEQ ID NO: 138785 - DNA, 2121 bp, Artificial Sequence
  derived and/or modified sequence
atggagatgttcaccttcctgctgacctgcatcttcctgcccctgctccgtgggcatagtctgtttacttgtgagcctattaccgtgccccgttgcatgaaaatggcatacaatatgacattctttcccaacttgatggggcactacgaccagagcattgccgccgtcgaaatggaacattttctacccctggcgaacctggaatgcagcccgaacatcgagacctttctctgcaaggcttttgtccccacctgtattgagcagattcatgtggtgccaccttgcagaaagctatgtgaaaaagtttattctgattgcaagaagctgatagataccttcggaattcgttggcctgaggagctggaatgtgaccgactgcaatattgcgatgagacagttcccgtgaccttcgatcctcacactgaattcctgggaccgcaaaagaaaacagaacaggtgcagcgagatattggattctggtgccccagacacctaaagacatctggagggcagggttacaagtttttgggtatcgaccaatgcgctcccccgtgccccaatatgtacttcaaatccgacgaattagaatttgccaaatccttcataggaaccgtgagtatcttttgcctatgtgcaacgttgttcaccttccttaccttcctgattgatgtacgacggtttcgatatcccgaacggccaattatctactactctgtgtgttattcgatcgtgtccctgatgtattttattggatttctactaggggacagtaccgcttgcaataaagccgatgaaaaactggagctaggggatacagtcgtgctaggaagccagaacaaggcttgtacagtgttgttcatgctgctgtatttcttcacaatggcaggcaccgtttggtgggttatactcacaatcacctggtttctggctgcagggaggaaatggagctgcgaggcgatagaacaaaaggcagtttggttccatgccgtggcatggggaacgcccggcttcttgacagtaatgctcttggccatgaataaggtggagggcgataacatttccggcgtctgcttcgtcggactgtatgacctggacgcctctcgctatttcgtgttactgcccctgtgtctctgcgtgtttgtcggcttgtccctcttgttggctggcatcatctctctaaaccatgtacgccaagtgatccagcatgatggccgcaaccaggaaaaactcaaaaaatttatgatccgaatcggggtcttcagcgggttgtatctggttccgctagtaaccctgttgggctgttatgtgtacgaacaggtcaatcgtatcacatgggagatcacctgggtgagtgaccattgccggcagtaccatattccctgtccataccaggccaaggctaaggctagaccagaattggccctgttcatgatcaagtatcttatgacgctgatagtgggcattagcgccgtgttctgggtgggcagcaagaagacttgtacagaatgggcaggattctttaagaggaaccggaaaagggaccccatatctgagagcagaagagtcctgcaggaaagctgcgagttctttctaaagcacaattccaaagtgaaacacaaaaaaaaacactacaaaccttcttcccacaaactcaaggtcatttctaaatccatgggcacgagcactggagccacagctaatcatgggactagcgccgtagcgattacaagtcatgattatctgggacaggaaacactgaccgaaatccagacttctccagagacgagcatgcgggaagtgaaggccgacggagcttcaacaccaagattacgggagcaggactgcggcgaaccagctagtccagccgcatccattagcaggctgagtggggagcaagtggacggaaagggccaggccgggagcgtctcagagagcgcgcgttcagaagggaggatcagccccaaaagtgacatcaccgataccggacttgcacagagcaataacctgcaagtcccaagcagctctgaaccttccagcctgaagggaagtaccagcctactggtgcatccggtaagtggcgtgcgcaaggaacaggggggcgggtgccattctgatacatag

SEQ ID NO: 138786 - DNA, 2121 bp, Artificial Sequence
  derived and/or modified sequence
atggagatgttcaccttcctgctgacctgcatcttcctgcccctgcttcgaggacacagtctttttacttgcgagccaataacagtgcctcggtgtatgaagatggcctacaacatgacatttttccccaatctgatgggccattatgatcaatccatagcagcagtagagatggagcacttccttccattggcaaatctagaatgttcaccgaacatagaaaccttcctgtgcaaagcatttgtaccaacatgtattgaacaaattcatgtagttcctccttgtcggaagttatgtgaaaaggtgtattccgactgtaagaagcttattgatacattcggaatccggtggcccgaggagttagaatgtgatcggttacagtattgcgatgaaaccgtgcccgtaacctttgatccccacactgaattcttgggcccacagaagaagactgagcaggtacagcgagatatcggcttttggtgcccacgacatttgaagacctccggaggacaaggctataagtttttgggaattgaccagtgcgcaccaccttgtccgaacatgtatttcaaatcagacgaactggagtttgcaaagtcttttataggaacagtgtctattttctgcttatgtgccaccctattcaccttcctgacctttcttatagatgttcggaggtttcgctatcctgaacggcctatcatctattacagcgtttgctattcgattgtgtcactgatgtattttatcggatttctattgggagatagtacagcctgcaataaagccgacgagaagcttgagttgggtgatactgtggtcttaggatcccagaacaaggcttgcactgttttgttcatgctgctgtacttctttaccatggccggcaccgtgtggtgggtgattctgactatcacctggttcctggcggccggcaggaagtggtcatgcgaggctatcgaacagaaagcagtctggttccacgcggtggcgtggggcacccccggctttttgacagttatgctcctggctatgaacaaagtcgagggtgacaatatttcaggcgtatgcttcgtggggctttatgatctcgatgcatcccgctatttcgttctgcttccactgtgtctctgcgtcttcgtagggctcagcttgctgttggctggaattatcagcctgaatcatgtgcgccaggtcatacagcacgatggccggaatcaggagaagctgaaaaaatttatgatcaggattggtgtgttttccggcctctacctggtgcctctcgtgacactgttaggttgttacgtttatgaacaagtgaaccgcatcacttgggaaattacctgggttagcgaccactgccggcaatatcatatcccatgcccctaccaggctaaggctaaagctcgcccagagttagcacttttcatgatcaaatatttgatgaccctgatcgtgggaataagcgctgtgttctgggtggggtctaaaaagacctgcacagagtgggcagggttttttaaacggaacaggaaacgggaccctataagcgagagccggagggtattacaggaatcatgtgagttcttcctgaaacacaacagtaaggttaagcacaagaagaaacactataaaccctcttcacacaagctgaaggtaatttccaagtccatgggtaccagcactggggctacagcgaatcatggtacctccgccgtcgcgataacctcacacgattatctcggccaggagacacttaccgagatccagacatctcccgagaccagcatgagggaagtcaaggcggatggtgcttctactccccgattgagggaacaggattgtggggaaccggcgtcccctgcagcaagtatctctaggttgagcggtgaacaggtggacggtaagggccaggcaggaagcgtgtctgagagcgctcgaagcgagggcagaatctcccccaaaagcgatataacggacaccggactggctcagagcaataacctccaagtacctagctcatctgagccttcgagtttgaagggttcgacgtcgctccttgtgcacccggtgtctggcgtacgcaaagaacagggaggcggatgtcatagcgacacctag

SEQ ID NO: 138787 - DNA, 2121 bp, Artificial Sequence
  derived and/or modified sequence
atggagatgttcacctttctcctcacttgcatttttctgccattgctgaggggtcacagtctgtttacctgcgagcccataacggttccccgatgtatgaaaatggcgtataacatgaccttctttccaaacctgatgggacactatgaccagagtatcgctgctgtggaaatggagcacttcctgcccctggccaacttagagtgcagtcccaacattgaaactttcctttgtaaggctttcgtgcccacttgcatcgagcagattcacgttgtgccaccatgccgaaagctctgtgaaaaagtgtattccgattgcaaaaagttgattgataccttcgggatccggtggcctgaggagcttgaatgtgaccgcctgcaatactgcgacgaaaccgtacctgttactttcgatccccataccgagttcctcggccctcaaaagaaaaccgaacaggtgcaaagggacatcggattctggtgtccaagacacctcaagacaagcgggggtcagggttacaagtttctcgggattgaccagtgtgctccaccctgtccaaatatgtacttcaagagcgatgaactcgaattcgctaaaagcttcatcggtaccgtttccattttctgtttgtgcgctactctgtttacctttctgactttccttatcgatgtgagaagattcaggtatccagaacggcctataatttactattcagtgtgctactccatcgtgagcttaatgtactttattggtttcctgctgggggacagtaccgcgtgtaataaagccgacgaaaagctcgaactcggtgatactgtcgtgctgggcagccagaacaaagcttgcacagtgctcttcatgttgctttatttcttcacaatggccggtacggtttggtgggtgattctcacaattacatggttccttgcagcaggacgcaagtggtcctgcgaggcaatcgagcaaaaggccgtctggttccacgctgtggcttggggcacccccggattcctgacggtgatgctgctggcgatgaacaaagtggaaggtgacaatatcagcggagtgtgcttcgtcggcttgtacgatctggacgctagtaggtacttcgtgctactacccttgtgtctgtgcgtctttgtcgggctctccttactcctagcaggcatcattagtcttaatcacgttcggcaagtgatccagcatgacgggagaaaccaggagaagctgaagaaattcatgatacggatcggagtcttctccggtctttatctggtgcctttagtgacccttctcggatgttatgtatatgagcaggtgaatagaatcacctgggagatcacatgggtttccgaccattgccgccagtatcatattccttgtccctaccaagctaaggccaaggctcggccagaactcgccctattcatgattaagtacctgatgacactaattgtcgggatctcagctgtgttttgggtgggtagcaagaaaacttgcactgagtgggcagggttttttaagcgtaaccggaagagggatccgattagcgaatcgcgcagggttctacaggaatcatgcgaattctttttaaagcataacagcaaggtgaaacataagaaaaagcattataaaccttctagccataagctgaaagtcatctctaaatccatgggcacgagcacaggtgcaaccgccaaccacggcacatctgctgttgccataaccagccatgattatctggggcaggagactttaaccgagatacagacaagccccgagaccagcatgagagaggtgaaagcagacggcgcttccacaccccgactacgcgagcaggattgcggagagcccgcaagcccagctgcctccatcagcagactttccggggagcaagttgacggtaaaggtcaagccggatccgtgagcgagtccgcgcgaagcgaaggaagaatctctccgaaatccgacataactgacaccgggctggctcagtccaacaatctccaggtgcctagttcgagcgaaccatccagcttaaaaggctcaacaagtctgctggtgcaccccgtcagtggagtgcgcaaagagcagggagggggttgccattccgacacctag

SEQ ID NO: 138788 - DNA, 2121 bp, Artificial Sequence
  derived and/or modified sequence
atggagatgtttacctttcttctgacttgcatttttttgcctttgcttcggggtcactccctatttacgtgcgaaccaatcaccgtccctcgttgtatgaagatggcctacaacatgacttttttccccaatttgatgggacactatgatcagtctattgccgctgtcgagatggaacactttctgcccctggccaatttagaatgtagcccgaatattgagacatttctctgtaaagcatttgtcccaacttgtatcgagcagatacacgtagtgccaccctgcaggaagctgtgcgaaaaggtttacagtgactgcaaaaaacttatcgataccttcggcataagatggcctgaggaactggaatgcgatcgccttcagtactgcgatgagactgtcccagtgactttcgacccgcatactgaattcctcggtccacagaaaaaaaccgagcaggtgcagcgggacatcggattttggtgcccacggcatcttaaaacatcaggcggacaaggctataagttcctaggcattgaccaatgcgcgccaccgtgccccaatatgtatttcaagtctgatgagctagagttcgccaaatcttttatcggcacagtgtcgatattctgtctttgcgctactttgtttaccttcctgaccttccttatagatgtcagacgattccgctaccctgagaggccaataatctattattccgtgtgctattcaattgtttctctcatgtactttatcggatttctgctgggggattccactgcatgtaataaggccgacgagaagctggaattaggagacacagtagtactggggtctcagaacaaggcgtgtacagtgctctttatgctcctttatttttttacaatggcaggcactgtatggtgggtaatattaacaatcacctggtttttagccgcaggcaggaaatggtcctgcgaggctattgaacaaaaagcagtttggtttcatgccgtcgcatggggcacccccggtttcctcaccgtgatgttactggccatgaacaaagttgaaggagacaacataagcggagtctgctttgtagggctgtatgatctggacgcatcacgatatttcgtcctccttcctctgtgtctctgtgtgtttgtcggactgtcccttctgctggcaggcattataagtctgaaccatgttagacaggttattcagcatgacgggaggaaccaggagaagcttaaaaaatttatgataagaataggcgttttcagcggattatacttggttccactggtcacactcctgggttgttacgtctacgagcaggttaaccgcataacctgggaaatcacttgggtgagcgaccactgtagacagtatcatatcccgtgcccttaccaggctaaggcaaaggctcggcctgagctggccctctttatgatcaaatatttaatgacactcatcgtcgggattagcgccgtgttttgggtggggagtaaaaagacatgtacagagtgggccggtttctttaaacgcaatcgaaagcgcgaccccatttccgagagtaggagagttctccaggagtcttgcgagttctttttgaaacacaactccaaggtgaagcacaaaaaaaagcactacaaaccttcttcccacaaattgaaggttattagcaaatcgatgggcacaagcacaggcgcaacagcgaaccatggcacttccgctgtagcaattaccagtcatgattaccttggtcaagaaaccctgaccgaaattcaaacatcacctgaaaccagtatgcgtgaagtgaaggcagacggcgcttccactccacgcctgcgcgagcaggactgtggtgaaccagcttctcctgcagcttcgatcagccggctgagtggggagcaggtggacggtaaaggccaagccggttctgtgagcgaatccgctcggagtgagggacgtatttccccaaagtcagacatcaccgacacgggtctggcccagagtaataacctgcaggtcccgtccagctcagagccaagcagcctgaaggggtctacatctctcctcgttcacccagtgtcaggggtaagaaaggagcaaggaggtggatgccactcagatacttag

SEQ ID NO: 138789 - DNA, 2121 bp, Artificial Sequence
  derived and/or modified sequence
atggagatgttcaccttcctgctgacctgcatcttcctgcccctgctgagaggccacagcctgttcacctgcgagcccatcaccgtgcccagatgcatgaagatggcctacaacatgaccttcttccccaacctgatgggccactacgaccagagcatcgccgccgtggagatggagcacttcctgcccctggccaacctggagtgcagccccaacatcgagaccttcctgtgcaaggccttcgtgcccacctgcatcgagcagatccacgtggtgcccccctgcagaaagctgtgcgagaaggtgtacagcgactgcaagaagctgatcgacaccttcggcatcagatggcccgaggagctggagtgcgacagactgcagtactgcgacgagaccgtgcccgtgaccttcgacccccacaccgagttcctgggcccccagaagaagaccgagcaggtgcagagagacatcggcttctggtgccccagacacctgaagaccagcggcggccagggctacaagttcctgggcatcgaccagtgcgcccccccctgccccaacatgtacttcaagagcgacgagctggagttcgccaagagcttcatcggcaccgtgagcatcttctgcctgtgcgccaccctgttcaccttcctgaccttcctgatcgacgtgagaagattcagataccccgagagacccatcatctactacagcgtgtgctacagcatcgtgagcctgatgtacttcatcggcttcctgctgggcgacagcaccgcctgcaacaaggccgacgagaagctggagctgggcgacaccgtggtgctgggcagccagaacaaggcctgcaccgtgctgttcatgctgctgtacttcttcaccatggccggcaccgtgtggtgggtgatcctgaccatcacctggttcctggccgccggcagaaagtggagctgcgaggccatcgagcagaaggccgtgtggttccacgccgtggcctggggcacccccggcttcctgaccgtgatgctgctggccatgaacaaggtggagggcgacaacatcagcggcgtgtgcttcgtgggcctgtacgacctggacgccagcagatacttcgtgctgctgcccctgtgcctgtgcgtgttcgtgggcctgagcctgctgctggccggcatcatcagcctgaaccacgtgagacaggtgatccagcacgacggcagaaaccaggagaagctgaagaagttcatgatcagaatcggcgtgttcagcggcctgtacctggtgcccctggtgaccctgctgggctgctacgtgtacgagcaggtgaacagaatcacctgggagatcacctgggtgagcgaccactgcagacagtaccacatcccctgcccctaccaggccaaggccaaggccagacccgagctggccctgttcatgatcaagtacctgatgaccctgatcgtgggcatcagcgccgtgttctgggtgggcagcaagaagacctgcaccgagtgggccggcttcttcaagagaaacagaaagagagaccccatcagcgagagcagaagagtgctgcaggagagctgcgagttcttcctgaagcacaacagcaaggtgaagcacaagaagaagcactacaagcccagcagccacaagctgaaggtgatcagcaagagcatgggcaccagcaccggcgccaccgccaaccacggcaccagcgccgtggccatcaccagccacgactacctgggccaggagaccctgaccgagatccagaccagccccgagaccagcatgagagaggtgaaggccgacggcgccagcacccccagactgagagagcaggactgcggcgagcccgccagccccgccgccagcatcagcagactgagcggcgagcaggtggacggcaagggccaggccggcagcgtgagcgagagcgccagaagcgagggcagaatcagccccaagagcgacatcaccgacaccggcctggcccagagcaacaacctgcaggtgcccagcagcagcgagcccagcagcctgaagggcagcaccagcctgctggtgcaccccgtgagcggcgtgagaaaggagcagggcggcggctgccacagcgacacctag

SEQ ID NO: 138790 - protein, 574 aa, Artificial Sequence
  derived and/or modified sequence
MRDPGAAAPLSSLGLCALVLALLGALSAGAGAQPYHGEKGISVPDHGFCQPISIPLCTDIAYNQTILPNLLGHTNQEDAGLEVHQFYPLVKVQCSPELRFFLCSMYAPVCTVLDQAIPPCRSLCERARQGCEALMNKFGFQWPERLRCENFPVHGAGEICVGQNTSDGSGGPGGGPTAYPTAPYLPDLPFTALPPGASDGRGRPAFPFSCPRQLKVPPYLGYRFLGERDCGAPCEPGRANGLMYFKEEERRFARLWVGVWSVLCCASTLFTVLTYLVDMRRFSYPERPIIFLSGCYFMVAVAHVAGFLLEDRAVCVERFSDDGYRTVAQGTKKEGCTILFMVLYFFGMASSIWWVILSLTWFLAAGMKWGHEAIEANSQYFHLAAWAVPAVKTITILAMGQVDGDLLSGVCYVGLSSVDALRGFVLAPLFVYLFIGTSFLLAGFVSLFRIRTIMKHDGTKTEKLEKLMVRIGVFSVLYTVPATIVLACYFYEQAFREHWERTWLLQTCKSYAVPCPPGHFPPMSPDFTVFMIKYLMTMIVGITTGFWIWSGKTLQSWRRFYHRLSHSSKGETAV

SEQ ID NO: 138791 - DNA, 1725 bp, Artificial Sequence
  derived and/or modified sequence
atgagagaccccggcgccgccgcccccctgagcagcctgggcctgtgcgccctggtgctggccctgctgggcgccctgagcgccggcgccggcgcccagccctaccacggcgagaagggcatcagcgtgcccgaccacggcttctgccagcccatcagcatccccctgtgcaccgacatcgcctacaaccagaccatcctgcccaacctgctgggccacaccaaccaggaggacgccggcctggaggtgcaccagttctaccccctggtgaaggtgcagtgcagccccgagctgagattcttcctgtgcagcatgtacgcccccgtgtgcaccgtgctggaccaggccatccccccctgcagaagcctgtgcgagagagccagacagggctgcgaggccctgatgaacaagttcggcttccagtggcccgagagactgagatgcgagaacttccccgtgcacggcgccggcgagatctgcgtgggccagaacaccagcgacggcagcggcggccccggcggcggccccaccgcctaccccaccgccccctacctgcccgacctgcccttcaccgccctgccccccggcgccagcgacggcagaggcagacccgccttccccttcagctgccccagacagctgaaggtgcccccctacctgggctacagattcctgggcgagagagactgcggcgccccctgcgagcccggcagagccaacggcctgatgtacttcaaggaggaggagagaagattcgccagactgtgggtgggcgtgtggagcgtgctgtgctgcgccagcaccctgttcaccgtgctgacctacctggtggacatgagaagattcagctaccccgagagacccatcatcttcctgagcggctgctacttcatggtggccgtggcccacgtggccggcttcctgctggaggacagagccgtgtgcgtggagagattcagcgacgacggctacagaaccgtggcccagggcaccaagaaggagggctgcaccatcctgttcatggtgctgtacttcttcggcatggccagcagcatctggtgggtgatcctgagcctgacctggttcctggccgccggcatgaagtggggccacgaggccatcgaggccaacagccagtacttccacctggccgcctgggccgtgcccgccgtgaagaccatcaccatcctggccatgggccaggtggacggcgacctgctgagcggcgtgtgctacgtgggcctgagcagcgtggacgccctgagaggcttcgtgctggcccccctgttcgtgtacctgttcatcggcaccagcttcctgctggccggcttcgtgagcctgttcagaatcagaaccatcatgaagcacgacggcaccaagaccgagaagctggagaagctgatggtgagaatcggcgtgttcagcgtgctgtacaccgtgcccgccaccatcgtgctggcctgctacttctacgagcaggccttcagagagcactgggagagaacctggctgctgcagacctgcaagagctacgccgtgccctgcccccccggccacttcccccccatgagccccgacttcaccgtgttcatgatcaagtacctgatgaccatgatcgtgggcatcaccaccggcttctggatctggagcggcaagaccctgcagagctggagaagattctaccacagactgagccacagcagcaagggcgagaccgccgtgtag

SEQ ID NO: 138792 - DNA, 1725 bp, Artificial Sequence
  derived and/or modified sequence
atgcgggacccaggcgccgcagcacccctgagtagcctcggcctgtgcgcacttgtgctggctttattaggcgcccttagcgccggagccggcgcacagccttaccatggggagaaagggatatccgttccagaccatgggttttgtcagcccatcagcatacctctgtgcaccgatatagcatacaatcaaacaatcctgcccaatctgctggggcatacaaaccaggaggacgctggattggaggtccaccagttttacccactggtgaaggttcagtgcagtcctgagctgagatttttcctgtgttctatgtacgccccagtgtgtactgtcttggaccaagctatccctccatgtagatccctgtgtgagcgtgctagacagggctgtgaagcattgatgaacaaatttgggttccagtggccagaacgacttcgctgtgagaattttccagtacacggggccggtgagatttgtgtgggccagaacaccagtgatggctcagggggacccggcggcggccctacagcctatccaacagccccctatctacctgatttaccctttactgctctgcctcctggcgcttccgatggacgtggccgaccagcttttcctttctcctgccctcgccaactgaaagtgcccccttatctgggttaccgttttcttggcgagcgggactgcggagcaccatgcgaacccgggcgtgctaacggactcatgtacttcaaggaagaggaacgtaggttcgcgaggctgtgggtgggtgtatggtctgtactgtgctgcgcctcgaccttgttcaccgttctaacttacctggttgacatgcgaagatttagttaccccgaaaggcctataatattcctctctggatgttattttatggtggcagttgcccatgtggccgggtttttgcttgaggaccgagcggtgtgtgtggagcgttttagcgatgatggatatcgaactgtggcccagggtactaaaaaagagggatgcacaatccttttcatggttctctactttttcgggatggcatcctctatatggtgggtcatcctgtccctcacctggttcctggcagctggtatgaagtgggggcacgaagctattgaggccaattctcagtactttcatttggcagcctgggccgtgcccgctgttaagacaatcacgattctggctatgggacaagtggatggagacctgctctccggcgtctgttatgtgggcttatcctctgtggatgcactacgggggttcgtgctagcaccactgtttgtctaccttttcattggcactagctttttgctagcaggcttcgtgtcactgttccgcattcgaactattatgaagcatgatggcaccaagaccgaaaaactggaaaaactcatggtgaggatcggcgtgttcagcgtactgtacactgtacccgccacaatcgtgttagcctgctacttttacgaacaggcttttagggaacactgggaacggacctggttgctgcagacttgcaaatcatacgcagttccatgcccccccgggcactttccccctatgtccccagatttcaccgtgttcatgattaaatatctcatgactatgatcgtgggcatcaccaccgggttttggatttggtctggtaagaccttgcagagttggaggaggttctatcaccggctgagccacagtagtaagggagaaaccgccgtatag

SEQ ID NO: 138793 - DNA, 3851 bp, Artificial Sequence
  derived and/or modified sequence
ctctcccaaccgcctcgtcgcactcctcaggctgagagcaccgctgcactcgcggccggcgatgcgggaccccggcgcggccgctccgctttcgtccctgggcctctgtgccctggtgctggcgctgctgggcgcactgtccgcgggcgccggggcgcagccgtaccacggagagaagggcatctccgtgccggaccacggcttctgccagcccatctccatcccgctgtgcacggacatcgcctacaaccagaccatcctgcccaacctgctgggccacacgaaccaagaggacgcgggcctcgaggtgcaccagttctacccgctggtgaaggtgcagtgttctcccgaactccgctttttcttatgctccatgtatgcgcccgtgtgcaccgtgctcgatcaggccatcccgccgtgtcgttctctgtgcgagcgcgcccgccagggctgcgaggcgctcatgaacaagttcggcttccagtggcccgagcggctgcgctgcgagaacttcccggtgcacggtgcgggcgagatctgcgtgggccagaacacgtcggacggctccgggggcccaggcggcggccccactgcctaccctaccgcgccctacctgccggacctgcccttcaccgcgctgcccccgggggcctcagatggcagggggcgtcccgccttccccttctcatgcccccgtcagctcaaggtgcccccgtacctgggctaccgcttcctgggtgagcgcgattgtggcgccccgtgcgaaccgggccgtgccaacggcctgatgtactttaaggaggaggagaggcgcttcgcccgcctctgggtgggcgtgtggtccgtgctgtgctgcgcctcgacgctctttaccgttctcacctacctggtggacatgcggcgcttcagctacccagagcggcccatcatcttcctgtcgggctgctacttcatggtggccgtggcgcacgtggccggcttccttctagaggaccgcgccgtgtgcgtggagcgcttctcggacgatggctaccgcacggtggcgcagggcaccaagaaggagggctgcaccatcctcttcatggtgctctacttcttcggcatggccagctccatctggtgggtcattctgtctctcacttggttcctggcggccggcatgaagtggggccacgaggccatcgaggccaactcgcagtacttccacctggccgcgtgggccgtgcccgccgtcaagaccatcactatcctggccatgggccaggtagacggggacctgctgagcggggtgtgctacgttggcctctccagtgtggacgcgctgcggggcttcgtgctggcgcctctgttcgtctacctcttcataggcacgtccttcttgctggccggcttcgtgtccctcttccgtatccgcaccatcatgaaacacgacggcaccaagaccgagaagctggagaagctcatggtgcgcatcggcgtcttcagcgtgctctacacagtgcccgccaccatcgtcctggcctgctacttctacgagcaggccttccgcgagcactgggagcgcacctggctcctgcagacgtgcaagagctatgccgtgccctgcccgcccggccacttcccgcccatgagccccgacttcaccgtcttcatgatcaagtacctgatgaccatgatcgtcggcatcaccactggcttctggatctggtcgggcaagaccctgcagtcgtggcgccgcttctaccacagacttagccacagcagcaagggggagactgcggtatgagccccggcccctccccacctttcccaccccagccctcttgcaagaggagaggcacggtagggaaaagaactgctgggtgggggcctgtttctgtaactttctccccctctactgagaagtgacctggaagtgagaagttctttgcagatttggggcgaggggtgatttggaaaagaagacctgggtggaaagcggtttggatgaaaagatttcaggcaaagacttgcaggaagatgatgataacggcgatgtgaatcgtcaaaggtacgggccagcttgtgcctaatagaaggttgagaccagcagagactgctgtgagtttctcccggctccgaggctgaacggggactgtgagcgatccccctgctgcagggcgagtggcctgtccagacccctgtgaggccccgggaaaggtacagccctgtctgcggtggctgctttgttggaaagagggagggcctcctgcggtgtgcttgtcaagcagtggtcaaaccataatctcttttcactggggccaaactggagcccagatgggttaatttccagggtcagacattacggtctctcctcccctgccccctcccgcctgtttttcctcccgtactgctttcaggtcttgtaaaataagcatttggaagtcttgggaggcctgcctgctagaatcctaatgtgaggatgcaaaagaaatgatgataacattttgagataaggccaaggagacgtggagtaggtatttttgctactttttcattttctggggaaggcaggaggcagaaagacgggtgttttatttggtctaataccctgaaaagaagtgatgacttgttgcttttcaaaacaggaatgcatttttccccttgtctttgttgtaagagacaaaagaggaaacaaaagtgtctccctgtggaaaggcataactgtgacgaaagcaacttttataggcaaagcagcgcaaatctgaggtttcccgttggttgttaatttggttgagataaacattcctttttaaggaaaagtgaagagcagtgtgctgtcacacaccgttaagccagaggttctgacttcgctaaaggaaatgtaagaggttttgttgtctgttttaaataaatttaattcggaacacatgatccaacagactatgttaaaatattcagggaaatctctcccttcatttactttttcttgctataagcctatatttaggtttcttttctatttttttctcccatttggatcctttgaggtaaaaaaacataatgtcttcagcctcataataaaggaaagttaattaaaaaaaaaaagcaaagagccattttgtcctgttttcttggttccatcaatctgtttattaaacatcatccatatgctgaccctgtctctgtgtggttgggttgggaggcgatcagcagataccatagtgaacgaagaggaaggtttgaaccatgggccccatctttaaagaaagtcattaaaagaaggtaaacttcaaagtgattctggagttctttgaaatgtgctggaagacttaaatttattaatcttaaatcatgtactttttttctgtaatagaactcggattcttttgcatgatggggtaaagcttagcagagaatcatgggagctaacctttatcccacctttgacactaccctccaatcttgcaacactatcctgtttctcagaacagtttttaaatgccaatcatagagggtactgtaaagtgtacaagttactttatatatgtaatgttcacttgagtggaactgctttttacattaaagttaaaatcgatcttgtgtttcttcaaccttcaaaactatctcatctgtcagatttttaaaactccaacacaggttttggcatcttttgtgctgtatcttttaagtgcatgtgaaatttgtaaaatagagataagtacagtatgtatattttgtaaatctcccatttttgtaagaaaatatatattgtatttatacatttttactttggatttttgttttgttggctttaaaggtctaccccactttatcacatgtacagatcacaaataaatttttttaaatac

SEQ ID NO: 138794 - DNA, 1725 bp, Artificial Sequence
  derived and/or modified sequence
atgagggaccccggggctgctgcccccctgagcagcctgggcctgtgtgccctggtgctggccctgctgggcgccctgtctgctggggccggggcccagccctaccacggggagaagggcatctctgtgcctgaccacggcttctgccagcccatcagcatccccctgtgcacagacatcgcctacaaccagaccatcctgcccaacctgctgggccacaccaaccaggaggatgctggcctggaggtgcaccagttctaccccctggtgaaggtgcagtgcagccctgagctgcgcttcttcctgtgcagcatgtatgcccctgtgtgcaccgtgctggaccaggccatccccccctgccgcagcctgtgtgagcgggcccggcagggctgtgaggccctgatgaacaagtttggcttccagtggccagagcggctgcgctgtgagaacttccctgtgcacggggccggggagatctgtgtgggccagaacaccagtgatggcagcggcggccctgggggcggccccacagcctaccccacagccccctacctgcctgacctgcccttcaccgccctgcccccaggggccagtgatggccggggccggcctgccttccccttcagctgcccccggcagctgaaggtgcccccctacctgggctaccgcttcctgggggagcgggactgtggggccccctgtgagcccggccgggccaacggcctgatgtacttcaaggaggaggagaggagatttgcccggctgtgggtgggcgtgtggagcgtgctgtgctgtgccagcaccctcttcaccgtgctgacctacctggtggacatgaggcgcttctcctacccagagcggcccatcatcttcctgagcggctgctacttcatggtggccgtggcccacgtggccggcttcctgctggaggacagagctgtgtgtgtggagcgcttcagtgatgatggctacagaacagtggcccagggcaccaagaaggagggctgcaccatcctcttcatggtgctgtacttcttcggcatggccagcagcatctggtgggtgatcctgagcctgacctggttcctggccgccggcatgaagtggggccacgaggccatcgaggccaacagccagtacttccacctggccgcctgggccgtgcctgctgtgaagaccatcaccatcctggccatgggccaggtggatggagacctgctgagcggcgtgtgctacgtgggcctgagctctgtggatgccctgcggggctttgtgctggcccccctgtttgtgtacctgttcatcggcaccagcttcctgctggccggctttgtgtccctcttccgcatccgcaccatcatgaagcatgatggcaccaagacagagaagctggagaagctgatggtgagaattggagtcttctctgtgctgtacacagtgcctgccaccatcgtgctggcctgctacttctatgagcaggccttccgggagcactgggagaggacctggctgctgcagacctgcaagagctatgctgtgccctgccccccaggccacttcccccccatgagcccagacttcaccgtcttcatgatcaagtacctgatgaccatgattgtgggcatcaccaccggcttctggatctggagcggcaagaccctgcagagctggaggcgcttctaccaccggctgagccacagcagcaaaggagaaacagctgtgtag

SEQ ID NO: 138795 - DNA, 1725 bp, Artificial Sequence
  derived and/or modified sequence
atgcgggaccccggcgccgccgcccccctgagcagcctgggcctgtgcgctctcgtcctggctctccttggagcgctctcagctggcgctggcgcccagccataccatggtgaaaagggcatttctgtgccggaccacggcttctgtcagcctatatccataccactatgcacagacatagcatacaaccaaaccatcctacctaacctcctggggcacacaaaccaggaggacgcaggccttgaggttcatcagttctacccccttgtgaaagtgcagtgtagccctgaactgagattttttctgtgctcaatgtatgctcccgtgtgtactgtgttagatcaagcaattcctccgtgtcggtcgctgtgcgaaagggctcggcaagggtgcgaggccctgatgaacaaatttgggttccagtggcccgagcgtctgcggtgtgaaaactttccggtacacggggccggcgagatctgtgtcggccagaatacttccgacgggagtgggggcccggggggaggacccacagcatatcccacagccccatacctgccggaccttcctttcacagcactacccccgggcgctagcgatgggcgtggacgaccagccttcccattctcttgcccaaggcagctgaaggttccgccctatctcggttatagatttctcggggagagagactgtggcgcaccgtgcgagcctggccgggcgaatggcctcatgtacttcaaggaagaagaacgaaggtttgcccggctttgggttggcgtgtggtcagttttgtgctgtgcctcaacactattcaccgtactaacttaccttgtggatatgcgcaggttctcctaccccgagcggccaatcatattcttaagcggatgctattttatggtcgctgtggcccacgtcgctggctttctgctagaggacagagccgtgtgcgttgagaggttcagcgatgatgggtatagaacagtggcccaaggaaccaagaaggagggatgcactatcttgtttatggtcctctatttcttcgggatggcctcctctatctggtgggttattttatctctgacctggttcttggccgcaggcatgaagtggggacatgaggctatcgaagcaaattcccagtacttccacctagccgcgtgggccgtgcctgcagtgaagacaattaccattctggctatgggccaggtggatggcgacctcctaagcggggtgtgttatgtcggtctcagctcggttgatgcgcttcggggattcgtgttagccccactgtttgtttacttgtttatcgggacaagctttctgttagccgggtttgtgagcctctttagaatacggacgattatgaaacatgacggcacaaagaccgaaaaactggagaagctcatggtgaggataggtgtcttttccgttctctacaccgtccccgctactatcgtattagcttgctacttttacgaacaagcattcagagaacactgggaaagaacatggctgctgcagacatgcaagtcctatgccgttccctgccccccaggacacttccctcccatgtccccagactttacagtttttatgattaagtacctcatgacaatgattgttggaattaccacaggattttggatttggagcggaaagaccttgcaatcatggcgtcgattctaccaccggctgagccattcatctaaaggggagacagcggtctag

SEQ ID NO: 138796 - DNA, 1725 bp, Artificial Sequence
  derived and/or modified sequence
atgagagatccgggagcagcggctcccctctcttccttgggactttgtgcccttgtgctcgccctgctgggggctctgagcgccggtgccggtgctcagccttatcacggagaaaaagggatttctgtacccgaccatggcttttgccagcccatttcaatccctttgtgtactgacatcgcctacaaccaaactatcttgcctaatctgctcgggcacaccaatcaagaagatgcagggttagaggttcaccagttttatcctctcgtcaaggttcagtgcagtccggaactaagattcttcctgtgttcaatgtacgctccagtctgcacggtgctggatcaggccattccgccatgccgctcactttgcgagcgcgcaagacaaggctgcgaggctctgatgaacaaattcggtttccagtggccggaacggctgcgctgtgaaaactttccagtccacggagccggagaaatctgcgtgggtcaaaacacaagcgacggaagcggcggaccaggtgggggaccgacggcttatcccactgcaccctacctacccgacctgccttttaccgctctccctcccggtgcctcagatggtaggggccgtcctgctttcccattttcctgtccccgtcagctgaaagttccgccatatctcgggtacaggttcctgggtgagagggattgcggtgccccttgcgagcccggtcgggcaaacgggctgatgtatttcaaggaggaggagcgtaggtttgcccgactgtgggtgggtgtctggtccgtcctgtgctgtgcatccaccctcttcaccgtattgacatatctggtcgatatgcggcgtttcagctaccccgagcggccaataatcttcctcagcgggtgttattttatggtggcagtagctcacgtggctggcttcctgttggaggatagggccgtctgcgtcgagagattttccgatgatggatatagaaccgtggcgcaaggcactaagaaagagggctgcaccatcctgttcatggtgctctatttcttcggcatggcttcttctatttggtgggtaatcctttcactaacttggtttctggcagccggaatgaagtggggccacgaggccatcgaggcgaatagccagtattttcacttggccgcttgggccgttccggcagtgaaaaccattaccatcctcgcgatggggcaggttgacggggacttgttatcaggagtgtgctatgtgggcctgtcaagtgtggatgcccttagagggtttgtgctggccccacttttcgtatacttatttattggtacctccttcttgctggctgggttcgttagcctatttaggattagaaccattatgaaacatgacggcactaagaccgaaaagctcgagaagttaatggttagaataggggttttctccgtactgtatactgtccctgcgacaatcgtgctcgcgtgttacttttacgagcaggcgttccgcgagcattgggaaagaacatggctcctacagacctgtaagagctacgcggtaccctgccctcctggccactttccccctatgtcacctgatttcactgtgtttatgataaaatacttgatgactatgatcgtggggattacaactggcttttggatttggtctggcaagaccctgcagtcgtggcggcgattctatcatcgattgtcacactcctcaaaaggcgagacagctgtgtag

SEQ ID NO: 138797 - protein, 591 aa, Artificial Sequence
  derived and/or modified sequence
MAVAPLRGALLLWQLLAAGGAALEIGRFDPERGRGAAPCQAVEIPMCRGIGYNLTRMPNLLGHTSQGEAAAELAEFAPLVQYGCHSHLRFFLCSLYAPMCTDQVSTPIPACRPMCEQARLRCAPIMEQFNFGWPDSLDCARLPTRNDPHALCMEAPENATAGPAEPHKGLGMLPVAPRPARPPGDLGPGAGGSGTCENPEKFQYVEKSRSCAPRCGPGVEVFWSRRDKDFALVWMAVWSALCFFSTAFTVLTFLLEPHRFQYPERPIIFLSMCYNVYSLAFLIRAVAGAQSVACDQEAGALYVIQEGLENTGCTLVFLLLYYFGMASSLWWVVLTLTWFLAAGKKWGHEAIEAHGSYFHMAAWGLPALKTIVILTLRKVAGDELTGLCYVASTDAAALTGFVLVPLSGYLVLGSSFLLTGFVALFHIRKIMKTGGTNTEKLEKLMVKIGVFSILYTVPATCVIVCYVYERLNMDFWRLRATEQPCAAAAGPGGRRDCSLPGGSVPTVAVFMLKIFMSLVVGITSGVWVWSSKTFQTWQSLCYRKIAAGRARAKACRAPGSYGRGTHCHYKAPTVVLHMTKTDPSLENPTHL

SEQ ID NO: 138798 - DNA, 2342 bp, Artificial Sequence
  derived and/or modified sequence
gctctggctcagcggcggctccggtggcagcggcggtggcggctaggcgggctcggcggctcctgtccctcgggcggctgcccgctcgctgcccagggcgcccggacacacgtgggcggctcagcgatggcccgcgccccgcgacgtggcgggcaggcaccggggcgcgggaccgctgagcccgagtgagccggggccgcgctcccgccttcggcccgggcctcccgggatggccgtggcgcctctgcggggggcgctgctgctgtggcagctgctggcggcgggcggcgcggcactggagatcggccgcttcgacccggagcgcgggcgcggggctgcgccgtgccaggcggtggagatccccatgtgccgcggcatcggctacaacctgacccgcatgcccaacctgctgggccacacgtcgcagggcgaggcggctgccgagctagcggagttcgcgccgctggtgcagtacggctgccacagccacctgcgcttcttcctgtgctcgctctacgcgcccatgtgcaccgaccaggtctcgacgcccattcccgcctgccggcccatgtgcgagcaggcgcgcctgcgctgcgcgcccatcatggagcagttcaacttcggctggccggactcgctcgactgcgcccggctgcccacgcgcaacgacccgcacgcgctgtgcatggaggcgcccgagaacgccacggccggccccgcggagccccacaagggcctgggcatgctgcccgtggcgccgcggcccgcgcgccctcccggagacctgggcccgggcgcgggcggcagtggcacctgcgagaaccccgagaagttccagtacgtggagaagagccgctcgtgcgcaccgcgctgcgggcccggcgtcgaggtgttctggtcccggcgcgacaaggacttcgcgctggtctggatggccgtgtggtcggcgctgtgcttcttctccaccgccttcactgtgctcaccttcttgctggagccccaccgcttccagtaccccgagcgccccatcatcttcctctccatgtgctacaacgtctactcgctggccttcctgatccgtgcggtggccggagcgcagagcgtggcctgtgaccaggaggcgggcgcgctctacgtgatccaggagggcctggagaacacgggctgcacgctggtcttcctactgctctactacttcggcatggccagctcgctctggtgggtggtcctgacgctcacctggttcctggctgccgggaagaaatggggccacgaggccatcgaggcccacggcagctatttccacatggctgcctggggcctgcccgcgctcaagaccatcgtcatcctgaccctgcgcaaggtggcgggtgatgagctgactgggctttgctacgtggccagcacggatgcagcagcgctcacgggcttcgtgctggtgcccctctctggctacctggtgctgggcagtagtttcctcctgaccggcttcgtggccctcttccacatccgcaagatcatgaagacgggcggcaccaacacagagaagctggagaagctcatggtcaagatcggggtcttctccatcctctacacggtgcccgccacctgcgtcatcgtttgctatgtctacgaacgcctcaacatggacttctggcgccttcgggccacagagcagccatgcgcagcggccgcggggcccggaggccggagggactgctcgctgccagggggctcggtgcccaccgtggcggtcttcatgctcaaaattttcatgtcactggtggtggggatcaccagcggcgtctgggtgtggagctccaagactttccagacctggcagagcctgtgctaccgcaagatagcagctggccgggcccgggccaaggcctgccgcgcccccgggagctacggacgtggcacgcactgccactataaggctcccaccgtggtcttgcacatgactaagacggacccctctttggagaaccccacacacctctagccacacaggcctggcgcggggtggctgctgccccctccttgccctccacgccctgccccctgcatcccctagagacagctgactagcagctgcccagctgtcaaggtcaggcaagtgagcaccggggactgaggatcagggcgggaccccgtgaggctcattaggggagatgggggtctcccctaatgcgggggctggaccaggctgagtccccacagggtcctagtggaggatgtggaggggcggggcagaggggtccagccggagtttatttaatgatgtaatttattgttgcgttcctctggaagctgtgactggaataaacccccgcgtggca

SEQ ID NO: 138799 - DNA, 1776 bp, Artificial Sequence
  derived and/or modified sequence
atggccgtggcccccctgcgcggagcactgctcctgtggcagctgttggctgctggaggagcagccttggagatcggaaggtttgacccggagaggggaaggggcgctgccccttgccaggctgttgagattcctatgtgcagaggcatcggatataaccttacaaggatgcccaaccttctgggccatacctcccagggcgaggccgctgctgaattagccgaattcgcaccactggtgcaatatggctgccactcacatcttcgtttcttcttatgttccctgtatgccccaatgtgcacggaccaggttagtactcctatacctgcatgtaggcccatgtgtgagcaagcacgccttaggtgtgcccccatcatggagcaatttaactttggatggcctgacagcttagattgtgcaagactgcccacgcgcaacgatccgcacgccctttgtatggaagctccagaaaacgcaaccgccggcccggcagagcctcataaagggctgggtatgcttcccgtggcgccacggcctgctagacctcccggcgatcttggacccggcgccggaggctccgggacatgtgaaaatccagagaagtttcagtatgtggagaaatctcgatcgtgtgcacctagatgtggccctggcgtcgaggtattttggtctaggcgcgacaaagacttcgccttggtctggatggccgtctggagcgctctttgcttcttttccaccgcattcactgtgctgacatttctactggagccccatcgctttcaatatccggagcgtcccatcattttcctctcgatgtgctacaacgtttacagcctggcattcctgatccgggccgtggccggtgcacagagtgtcgcttgcgatcaggaggcaggagccctgtatgtgatccaggagggtttggagaacacagggtgtacactcgtcttcctgctgctgtattatttcggaatggcgtccagcctctggtgggttgttctgactttaacctggttcctggccgctgggaaaaagtgggggcacgaagcaatagaggcccacggctcttacttccacatggctgcctggggcctgcctgctctcaaaactattgtgatattaacgctgcgtaaggtggcaggagacgagctcacaggcctgtgttacgtggcttctactgacgctgccgccctgacagggttcgttcttgtgcccctgtccggttatcttgttctgggtagcagtttcctgcttaccggcttcgtagctttatttcacattcggaagatcatgaagaccggaggcacgaacaccgagaagcttgagaagctcatggtgaaaataggggtgtttagtatactctacactgtgcccgccacctgtgttatcgtgtgttatgtttacgaacgcctaaatatggacttctggagattacgagccacggaacagccttgtgccgccgctgctggacccggagggcgcagagattgttccctgccaggcggaagcgtgccaactgtagcagtgttcatgctgaagatatttatgagtctggtcgttggtatcacctccggtgtgtgggtgtggtcctccaagaccttccaaacttggcagagcctctgctaccggaagattgccgctggtcgcgccagggctaaagcatgtcgcgcgcctggtagttatggcaggggcacccattgccactacaaggcacctactgtggtcttgcacatgaccaaaactgacccctcactagagaacccaactcatctctag

SEQ ID NO: 138800 - DNA, 1365 bp, Artificial Sequence
  derived and/or modified sequence
atgcctgcccaccgggaccctgatgtgcagggccaccggctgcagcacgacagctatgcccagccagatggcccccgggagcccgcccggggcagccaccctgtggcccgggtgcgggctgctggaggagtgcggctgccccggcccccacccctgctgcctgtgctggccgtgcgggcagatgtgcacagagctggcctgtacccccacccccggctgcccggccacgtgcgggccggccctgcccaggtgctgcctgactatggagctgtgcagctgcaggtggcccggctgcccggcctgcctgagaccccccagcaggagcggccccagctgcctgtgcatggaggagcccagcagaggctgggccgggcccaccctggcctgggccctgtgcctgctgctgtgcctgctgctgctgccccccagagagctggggccccagctgagggccggggcccccgggcccggcggctgcggcagcccggccaggtgcccccaagaggagaggagcgggtggtgcgggccgccctgcacgcccggcggggccgggtgctggagccccggggccaggccctgcggagcggcctggccggccacctgggcggcgctgtgctgctgctgcagaggctgcaccgggcccacctgccccaccggcccggccccctgcccctgccccgggccccccaccacctgcccctgcacgtgctgctgcggctgctgcggggcctgccccacccccccctgcggcggcggcgggagcaccggctgcggcccggccagaggcctgccctgtgccaccctgggggcactggagagcaccggctgcacgccggcctgcccggccccctgctgctgcggcacggccagctggccgtggtgggcggcccccacgcccacctggtgcctggaagacggcaggaggtgggcccccggggccacaggagccagcagcagctgctgcccccaggcagcctgggccaccctggaggagaggaccacccagaccccggccacgcccagggcggcggcggccgggcccaccggggcctgctgcggggccagcacggccggcagagggcccaccggctgcgggcccacagccctggcctgctgcccggccacagacatgtgctgcaccccctgggcctgcggggccctgtgccccacccagaaggagatgaagatggccggcgggagcacggccaggccggggaggcccacggggcctaccgggccctgctgtgtgctgtgcacagagctggccacctgtgtgaccggctgctgctgctgcggaccccccagcacggcctgctggaggaccccggcggggccgcccaggtgcagaatgagcagcctgactag

SEQ ID NO: 138801 - DNA, 1776 bp, Artificial Sequence
  derived and/or modified sequence
atggctgtggcccccctgcggggggccctgctgctgtggcagctgctggccgccggcggggccgccctggagatcggccgctttgatcctgagcggggccgcggggccgccccctgccaggccgtggagatccccatgtgccggggcatcggctacaacctgaccaggatgcccaacctgctgggccacaccagccagggcgaggccgctgctgagctggccgagtttgcccccctggtgcagtatggctgccacagccacctgcgcttcttcctgtgcagcctgtatgcccccatgtgcacagaccaggtgtccacccccatcccagcctgccggcccatgtgtgagcaggcccggctgcgctgtgcccccatcatggagcagttcaactttggctggccagacagcctggactgtgcccggctgcccaccagaaatgacccccacgccctgtgcatggaggccccagaaaatgccacagctggccctgctgagccccacaagggcctgggcatgctgcctgtggcccccaggcctgcccggcccccaggggacctgggccctggggccggcggcagcggcacctgtgaaaatcctgagaagttccagtatgtggagaagagccgcagctgtgccccccgctgtggccctggggtggaggtgttctggagcagaagagacaaggactttgccctggtgtggatggctgtgtggagcgccctgtgcttcttcagcacagccttcaccgtgctgaccttcctgctggagccccaccgcttccagtacccagagcggcccatcatcttcctgtccatgtgctacaacgtgtacagcctggccttcctgatccgggctgtggccggggcccagagcgtggcctgtgaccaggaggccggggccctgtatgtgatccaggagggcctggagaacacaggctgcaccctggtgttcctgctgctgtactacttcggcatggccagcagcctgtggtgggtggtgctgaccctgacctggttcctggccgccggcaagaagtggggccacgaggccatcgaggcccacggcagctacttccacatggccgcctggggcctgcctgccctgaagaccatcgtcatcctgaccctgaggaaggtggccggagatgagctgaccggcctgtgctacgtggccagcacagatgctgctgccctgactggatttgtgctggtgcccctgagcggctacctggtgctgggcagcagcttcctgctgactggatttgtggccctcttccacatcaggaagatcatgaagacaggaggcaccaacacagagaagctggagaagctgatggtgaagattggagtcttcagcatcctgtacacagtgcctgccacctgtgtgattgtgtgctacgtgtatgaaaggctgaacatggacttctggaggctgcgggccacagagcagccctgtgccgctgctgctggccctgggggccggcgggactgcagcctgcccggcggctctgtgcccaccgtggccgtgttcatgctgaagatcttcatgagcctggtggtgggcatcaccagcggcgtgtgggtgtggagcagcaagaccttccagacctggcagagcctgtgctacaggaagattgctgctggccgggcccgggccaaggcctgccgggcccctggcagctatggccggggcacccactgccactacaaggcccccaccgtggtgctgcacatgaccaagacagaccccagcctggagaaccccacccacctgtag

SEQ ID NO: 138802 - DNA, 1776 bp, Artificial Sequence
  derived and/or modified sequence
atggccgtggcccccctgcggggcgccctgctgctgtggcagctgctcgctgcaggaggggccgcccttgaaattggtaggtttgaccctgaaaggggaagaggagcagcaccatgccaagccgttgaaatccctatgtgccggggaattggttacaatctcacgcggatgcctaatttgctcgggcatacttcccagggggaagctgcagccgagctcgcagagttcgcccctctggtacagtacggatgccactcgcaccttcgctttttcctttgctcactgtatgcccccatgtgtactgaccaggtgtctacaccgatccctgcatgtcgtccaatgtgcgagcaggcacggctgcgctgcgctcctataatggaacaatttaactttgggtggccagatagcttggactgtgcaaggcttcctacaagaaatgacccacacgcactgtgtatggaagcgccagagaacgccacggccgggcctgccgagccccataagggcctcggcatgctgcccgttgctcctagacctgctagaccccctggcgacctgggcccaggagcaggaggttctggaacatgcgagaatcccgaaaagtttcaatatgtggagaaatctcggagctgcgctccgcgctgtggtccgggagtggaggtcttctggagtaggagggataaggattttgccctggtgtggatggccgtgtggtctgctttgtgcttttttagcaccgcgtttactgtactcactttcctgctcgaaccccaccgtttccaatatccagaaaggccgattatattcctgagcatgtgctacaacgtatatagcctggcattcctgatcagagccgtcgcaggggcccagagcgtggcgtgtgatcaagaagcaggggctctttacgtaatccaagaagggttggaaaacacgggatgcacgctggtctttttgctcctgtattacttcggcatggccagcagcctgtggtgggtcgtgctgactctgacgtggtttttggcggctggtaagaagtgggggcatgaagcgatagaagcgcacggtagctactttcatatggctgcctggggactgcccgcccttaaaaccatagtgattctaacgctcagaaaagtggctggggatgagctgaccggtctgtgctatgtagcctctactgacgcagctgcattgacgggctttgttctggttcccctgagcgggtacttggtgctaggttcttcatttctgttaacaggattcgtggccttgtttcatattaggaagattatgaagaccggaggtaccaacacggagaagctggaaaagttgatggtgaagattggtgtcttcagcatactgtacacagtacccgctacctgtgtcatcgtgtgctatgtgtacgaaaggctcaatatggacttctggcgcctgcgcgccacagaacagccttgtgccgccgccgccgggcccggtgggcgacgggattgcagcctgcctggcggatctgttccgacagttgccgtcttcatgttaaagatattcatgtccctggtcgtggggattacctccggggtatgggtatggtcatccaagacgtttcagacttggcagtcgctgtgctataggaagatcgcagctggccgagcccgtgctaaagcatgcagggcccccgggagttacggtcgcggaacacattgccactataaggcccctactgtcgtgcttcacatgaccaagacagaccctagcttggagaaccccacccatctctag

SEQ ID NO: 138803 - DNA, 1776 bp, Artificial Sequence
  derived and/or modified sequence
atggccgtcgcgccattgagaggcgcactcctactgtggcagctgctggcggctgggggagccgctcttgagataggtaggttcgacccggagagagggagaggcgctgccccttgccaagcggtcgagattccgatgtgccggggtatcggctataatctgactcgtatgcccaatctgttaggacacaccagccaaggggaggccgctgctgagctagctgagttcgcgccattagtgcagtatgggtgtcattcccatctacgcttttttctctgcagcctgtatgctcctatgtgtacagatcaggtttctaccccgattcccgcatgtagacccatgtgcgagcaggctagattacgatgtgccccaattatggagcagttcaacttcggctggccagatagcctcgattgcgccagactgccaacccgcaacgatcctcacgccttatgcatggaggcccctgagaatgctacagcgggacccgctgagccacataagggcctaggtatgctcccagtggctccacggcctgctcgcccaccaggcgaccttggacctggcgctggcggatcgggaacatgcgagaatccagagaagttccaatacgtagagaagtcacgctcttgtgctccgagatgtgggcctggagtggaagtgttttggtctaggcgcgataaggattttgcactggtgtggatggccgtgtggtcagccctgtgtttcttctcaacggctttcacagtgctgactttcctgctcgagccccaccgatttcagtaccccgagcgacccatcattttcctgtctatgtgctataacgtgtatagcctggctttcttgatccgggcagtagctggggcacaatctgtcgcatgtgatcaggaagccggagctttgtacgtcattcaagaagggctggaaaacaccgggtgtacgttggtatttctcctgctttattactttgggatggcttcttctctgtggtgggtcgtgctgaccttgacctggttcctcgctgccggtaagaagtggggacatgaggctatagaggcacacggcagctatttccacatggcggcttggggcctccctgccctgaaaaccattgtcattctcacactgaggaaagtcgcaggcgatgagctgacagggctgtgttacgtggctagtactgacgccgctgccctcaccggctttgttcttgttcccctgtccggttacctggtgctgggtagctctttccttctgacgggattcgttgccttgtttcatattagaaagattatgaagacagggggaaccaacactgaaaagctggagaaattgatggttaaaatcggcgtttttagcatcctctacacagtgccggctacctgcgttatagtatgctatgtgtacgagcggctgaatatggacttttggagactaagagccactgaacagccttgcgctgcggctgccggtcctgggggtaggcgagactgtagtttaccaggaggaagcgtgcccacagtggccgtgttcatgctgaaaatctttatgagcctggtggtcggaattacctctggggtgtgggtctggtcctcaaaaacattccagacttggcagagcctgtgctaccgcaagattgcggctgggcgtgctagagctaaagcgtgcagggccccaggcagctatgggagaggaacccattgccactataaggccccaaccgtcgtgctgcatatgactaagacagatccctctttggagaaccccacacacctgtag

SEQ ID NO: 138804 - DNA, 1776 bp, Artificial Sequence
  derived and/or modified sequence
atggccgtggcccccctgagaggcgccctgctgctgtggcagctgctggccgccggcggcgccgccctggagatcggcagattcgaccccgagagaggcagaggcgccgccccctgccaggccgtggagatccccatgtgcagaggcatcggctacaacctgaccagaatgcccaacctgctgggccacaccagccagggcgaggccgccgccgagctggccgagttcgcccccctggtgcagtacggctgccacagccacctgagattcttcctgtgcagcctgtacgcccccatgtgcaccgaccaggtgagcacccccatccccgcctgcagacccatgtgcgagcaggccagactgagatgcgcccccatcatggagcagttcaacttcggctggcccgacagcctggactgcgccagactgcccaccagaaacgacccccacgccctgtgcatggaggcccccgagaacgccaccgccggccccgccgagccccacaagggcctgggcatgctgcccgtggcccccagacccgccagaccccccggcgacctgggccccggcgccggcggcagcggcacctgcgagaaccccgagaagttccagtacgtggagaagagcagaagctgcgcccccagatgcggccccggcgtggaggtgttctggagcagaagagacaaggacttcgccctggtgtggatggccgtgtggagcgccctgtgcttcttcagcaccgccttcaccgtgctgaccttcctgctggagccccacagattccagtaccccgagagacccatcatcttcctgagcatgtgctacaacgtgtacagcctggccttcctgatcagagccgtggccggcgcccagagcgtggcctgcgaccaggaggccggcgccctgtacgtgatccaggagggcctggagaacaccggctgcaccctggtgttcctgctgctgtactacttcggcatggccagcagcctgtggtgggtggtgctgaccctgacctggttcctggccgccggcaagaagtggggccacgaggccatcgaggcccacggcagctacttccacatggccgcctggggcctgcccgccctgaagaccatcgtgatcctgaccctgagaaaggtggccggcgacgagctgaccggcctgtgctacgtggccagcaccgacgccgccgccctgaccggcttcgtgctggtgcccctgagcggctacctggtgctgggcagcagcttcctgctgaccggcttcgtggccctgttccacatcagaaagatcatgaagaccggcggcaccaacaccgagaagctggagaagctgatggtgaagatcggcgtgttcagcatcctgtacaccgtgcccgccacctgcgtgatcgtgtgctacgtgtacgagagactgaacatggacttctggagactgagagccaccgagcagccctgcgccgccgccgccggccccggcggcagaagagactgcagcctgcccggcggcagcgtgcccaccgtggccgtgttcatgctgaagatcttcatgagcctggtggtgggcatcaccagcggcgtgtgggtgtggagcagcaagaccttccagacctggcagagcctgtgctacagaaagatcgccgccggcagagccagagccaaggcctgcagagcccccggcagctacggcagaggcacccactgccactacaaggcccccaccgtggtgctgcacatgaccaagaccgaccccagcctggagaaccccacccacctgtag

SEQ ID NO: 138805 - protein, 126 aa, Artificial Sequence
  derived and/or modified sequence
MPEPAKSAPAPKKGSKKAVTKAQKKDGKKRKRSRKESYSVYVYKVLKQVHPDTGISSKAMGIMNSFVNDIFERIAGEASRLAHYNKRSTITSREIQTAVRLLLPGELAKHAVSEGTKAVTKYTSSK

SEQ ID NO: 138806 - protein, 126 aa, Artificial Sequence
  derived and/or modified sequence
MPEPVKSAPVPKKGSKKAINKAQKKDGKKRKRSRKESYSVYVYKVLKQVHPDTGISSKAMGIMNSFVNDIFERIAGEASRLAHYNKRSTITSREIQTAVRLLLPGELAKHAVSEGTKAVTKYTSSK

SEQ ID NO: 138807 - DNA, 381 bp, Artificial Sequence
  derived and/or modified sequence
atgcccgaacctgtgaagtctgctcccgtgccaaaaaagggtagcaagaaagcaatcaataaagctcagaagaaagatggtaaaaagagaaaacggtctagaaaggaaagctactccgtatatgtgtataaagtcctgaagcaggtacacccagacactggcatcagctcaaaagctatgggaatcatgaacagcttcgtgaatgacatcttcgagaggattgcaggagaggcctctcggctcgctcattataataaaaggtcaacaattacatcacgggaaatccaaaccgcagtccgactgctgctgcccggcgagctagcaaagcacgctgtcagtgaagggaccaaggccgttaccaagtataccagctccaagtag

SEQ ID NO: 138808 - DNA, 446 bp, Artificial Sequence
  derived and/or modified sequence
atgcctgaaccagtcaaatctgctccagtccctaaaaaaggctccaagaaggccattaacaaggctcagaagaaggatggaaagaagcgcaaacgcagccgcaaggagagctactctgtgtatgtgtacaaggtgctgaagcaggtccaccccgacaccggcatctcttccaaggctatgggaatcatgaactccttcgtcaacgacatctttgagcgtatcgccggagaagcgtcacgcctggcgcattacaacaagcgctcgaccatcacttcgagggagatccagacggccgtgcgcctactgctacccggggaattggccaagcacgccgtgtccgagggcaccaaggccgtcaccaagtataccagctccaagtgagcctctcgctgcagtaacagttccgccgtgacccacaccccaaaggctcttttcagagccgtcca

SEQ ID NO: 138809 - DNA, 381 bp, Artificial Sequence
  derived and/or modified sequence
atgcctgagcctgtgaagagcgcccctgtgcccaagaagggcagcaagaaggccatcaacaaggcccagaagaaggatggcaagaagaggaagaggagcaggaaggagagctacagcgtgtatgtgtacaaggtgctgaagcaggtgcacccagacaccggcatcagcagcaaggccatgggcatcatgaacagctttgtgaatgacatctttgaaagaattgctggggaggccagccggctggcccactacaacaagaggagcaccatcaccagccgggagatccagacagctgtgcggctgctgctgcccggggagctggccaagcatgctgtgtctgagggcaccaaggctgtgaccaagtacaccagcagcaagtag

SEQ ID NO: 138810 - DNA, 381 bp, Artificial Sequence
  derived and/or modified sequence
atgcccgagcccgtgaagagcgcccccgtgcccaagaagggcagcaaaaaagctataaataaggcacagaagaaggatggaaagaaacggaagcggagcagaaaagaatcctacagcgtctacgtatataaggtgcttaagcaggtccatccggacactggtatatcctccaaggccatgggaataatgaactcttttgtaaacgacatcttcgagcgcattgcgggcgaagcaagccggcttgcacattacaacaagagaagtaccatcacatctcgagagattcagactgccgtacggctcttgctacccggtgaactggctaagcacgctgtgtcagagggcacaaaagccgtaacaaagtacaccagctctaagtag

SEQ ID NO: 138811 - DNA, 381 bp, Artificial Sequence
  derived and/or modified sequence
atgcccgagcccgtgaagagtgcacccgtgcctaagaagggcagcaagaaggccattaacaaggcgcagaaaaaggatggcaaaaaaagaaagaggtctcgcaaagaaagctattccgtttacgtgtacaaggtcctgaaacaggtgcatcctgataccggaatctctagcaaggcgatgggcatcatgaactcctttgtcaatgacatattcgagcgaatcgccggagaagccagccgcctggcccactacaataagcgttctacaattacctctagggagattcagaccgccgtgagattgctactacccggagagctggccaaacatgcagtatccgagggcactaaggccgttaccaagtatacatcctctaagtag

SEQ ID NO: 138812 - DNA, 381 bp, Artificial Sequence
  derived and/or modified sequence
atgcccgagcccgtgaagagcgcccccgtgcccaagaagggcagcaagaaggccatcaacaaggcccagaagaaggacggcaagaagagaaagagaagcagaaaggagagctacagcgtgtacgtgtacaaggtgctgaagcaggtgcaccccgacaccggcatcagcagcaaggccatgggcatcatgaacagcttcgtgaacgacatcttcgagagaatcgccggcgaggccagcagactggcccactacaacaagagaagcaccatcaccagcagagagatccagaccgccgtgagactgctgctgcccggcgagctggccaagcacgccgtgagcgagggcaccaaggccgtgaccaagtacaccagcagcaagtag

SEQ ID NO: 138813 - protein, 126 aa, Artificial Sequence
  derived and/or modified sequence
MPDPAKSAPAPKKGSKKAVTKAQKKDGKKRKRSRKESYSVYVYKVLKQVHPDTGISSKAMGIMNSFVNDIFERIAGEASRLAHYNKRSTITSREIQTAVRLLLPGELAKHAVSEGTKAVTKYTSSK

SEQ ID NO: 138814 - protein, 136 aa, Artificial Sequence
  derived and/or modified sequence
MARTKQTARKSTGGKAPRKQLATKAARKSAPATGGVKKPHRYRPGTVALREIRRYQKSTELLIRKLPFQRLVREIAQDFKTDLRFQSSAVMALQEACEAYLVGLFEDTNLCAIHAKRVTIMPKDIQLARRIRGERA

SEQ ID NO: 138815 - DNA, 411 bp, Artificial Sequence
  derived and/or modified sequence
atggcacggaccaaacagaccgcccggaaatctaccggaggaaaggccccccgcaagcaactcgctacgaaagctgcaaggaaatcagctccggcgacgggtggcgtcaagaaaccccatcggtataggcccggaacggtggctctccgagagattcgccgctatcagaaatctactgagctcctgattaggaagcttccattccagcggctggtaagagagatcgctcaggactttaaaacagatttgagattccagtccagtgcggtaatggcgttgcaagaggcctgcgaggcttacctggtgggtctgttcgaggatactaacctttgcgccatccacgcgaaaagggtgaccatcatgcccaaagatatccaactggcccgtcgaatcagaggcgaaagggcctag

SEQ ID NO: 138816 - DNA, 411 bp, Artificial Sequence
  derived and/or modified sequence
atggcgaggactaaacagactgccagaaaaagtactgggggaaaggcgccccggaagcaattagcaacgaaggcagcgagaaaatcagcaccagctacaggcggtgtgaaaaaaccgcaccgatacagacctggtacagtcgccctgagggagattagaagataccagaagagcacagagctcttgataagaaagctgcctttccagagactggtccgcgagatcgcgcaggactttaaaacagatctacggttccaatcttccgcggttatggcgcttcaggaggcctgcgaggcatacctggttggcctgtttgaagacactaacctttgtgccattcacgccaagcgggtaacaatcatgcctaaagacattcagcttgcccggcgcatccgaggagagcgagcttag

SEQ ID NO: 138817 - DNA, 411 bp, Artificial Sequence
  derived and/or modified sequence
atggccaggactaagcagactgcccgcaagagcaccggaggaaaggctccgagaaaacagctggccactaaggccgcacgaaaaagcgcccccgcaactggaggcgtgaagaaaccacaccgataccgtcccggcaccgttgccttaagagagatcaggcgttaccagaagagtaccgaactgctgattcggaagttgccatttcagcgactggtccgagaaattgcccaagactttaaaacagacctaaggtttcagagcagtgccgtgatggctctgcaagaggcatgcgaagcatacctggtcggtctcttcgaagatacaaatctatgtgcaatacatgccaagagagtcactataatgcccaaagacatccagctggccaggcgcatcagaggagagcgggcctag

SEQ ID NO: 138818 - DNA, 411 bp, Artificial Sequence
  derived and/or modified sequence
atggcgcggacaaaacagacagcccgcaaaagcacgggtggcaaagctccaaggaagcagctggctaccaaggctgctaggaagtccgcacccgctactgggggagtgaagaaacctcaccgataccgccccggaacagtcgcgttacgagaaatcaggaggtatcagaagtcaacggagctccttataaggaagttgccctttcagcggcttgtgcgtgagatcgcgcaggattttaaaactgacctgagattccaaagctccgccgtgatggcgcttcaggaggcttgcgaagcctatctggttgggttattcgaggacaccaacttgtgcgcgatccatgcaaaaagggtcaccattatgccgaaagatattcagctggccagaaggattagaggagagcgcgcgtag

SEQ ID NO: 138819 - DNA, 411 bp, Artificial Sequence
  derived and/or modified sequence
atggcaaggacgaagcagacggccaggaagagcacaggtggcaaggctcctcgtaaacagctggcgacaaaggccgcaaggaaaagtgcacccgccacggggggagttaagaagccacacagatataggccaggcactgtcgcattgcgtgagatccgccgataccaaaaatccacagagctcctcattcggaagcttccctttcagcggcttgtgcgggaaattgcacaggatttcaagaccgacttgaggttccagtccagcgcggtgatggccttacaggaggcttgtgaggcgtacctggtgggacttttcgaagacacaaacttatgtgctattcacgctaagcgggtgacgatcatgcctaaggatattcagcttgcacggcgcatacgaggcgaacgggcatag

SEQ ID NO: 138820 - DNA, 411 bp, Artificial Sequence
  derived and/or modified sequence
atggccaggaccaaacagaccgcccggaagagcacaggcggcaaggcacccagaaagcagctggccacaaaagcagccagaaagagtgcacctgccacaggcggtgtgaagaaaccccaccgatatagacccgggacagtggctcttcgcgaaattagaagatatcagaaaagcactgaattgctaatccgaaagctgccctttcaacgcctggtcagagaaatcgcgcaggactttaagacagacctgcggttccagtcatctgccgtgatggcgctgcaggaagcctgtgaagcttatctcgtgggcctgttcgaggatacaaatctgtgtgcaatccacgccaagcgcgtgaccattatgccaaaagacatccaactggccagacgaattaggggagaaagggcatag

SEQ ID NO: 138821 - DNA, 411 bp, Artificial Sequence
  derived and/or modified sequence
atggctaggacaaagcagactgcaagaaaatccacgggtggtaaggcccctcggaaacaattggctaccaaggccgccagaaaaagcgcaccagccacgggcggagtgaaaaagcctcacagatacaggcccggtaccgtcgcattgagggagatccgccgctaccagaagtccaccgaattactgatccggaaactgccttttcagaggttggttagggaaattgcccaggattttaaaactgacctcaggtttcagtcctccgccgtcatggcactacaggaagcttgtgaagcatatctggtcggcctgtttgaggatacgaatttgtgtgccatacacgcaaaacgggtgactattatgcccaaagatatccagcttgcgaggcgaattcggggcgagcgagcctag

SEQ ID NO: 138822 - DNA, 411 bp, Artificial Sequence
  derived and/or modified sequence
atggctcggaccaagcagactgcccgaaagagtaccggcggtaaagcacctcgaaagcagttggccaccaaggctgctcgaaaatccgcaccagccactggtggtgtcaagaaaccacaccgttatcggcctggaactgtcgcattgcgggagatcaggaggtatcagaaaagtacagagctcctgatccgaaagctgcctttccagagacttgtcagagagatcgcccaggacttcaagactgacttacggttccagagtagtgccgtcatggctctgcaggaagcttgcgaggcctacctcgtgggactattcgaagacacgaatctgtgcgctattcatgctaaacgcgtgactatcatgccaaaagatattcaattggcaaggcgaatcaggggcgagagggcctag

SEQ ID NO: 138823 - DNA, 411 bp, Artificial Sequence
  derived and/or modified sequence
atggccaggactaagcagacagctcgaaagtctacaggcggtaaggctccacggaaacagctggcaacgaaagcagccagaaagagcgcccctgctacgggtggggtaaagaaaccccatcgctacaggccaggaactgttgcgctgagagaaattagacgctaccagaagtccaccgagcttttaatccgcaaactgccgtttcagaggctcgtgcgggagattgcacaggattttaaaaccgatcttcgctttcagagctccgcagtgatggccctacaagaggcatgcgaggcatacctggtggggctgtttgaggatactaacctgtgcgccattcacgccaaaagagtgactatcatgcccaaggatatacagttagctaggagaatcaggggcgagagggcatag

SEQ ID NO: 138824 - DNA, 411 bp, Artificial Sequence
  derived and/or modified sequence
atggccaggactaaacagactgctcggaagagcactgggggaaaggctcccagaaagcagctggctactaaggccgctcggaagtcggcgccagcgacaggaggagtgaagaagccacatcggtaccgtccaggcactgtggccctgagggagatccgaagatatcagaaaagtaccgagctgttaattcgcaagctccccttccagcggttggtgagagaaattgcacaggacttcaagacagatctgcgattccagagttcggccgtgatggccctgcaggaggcttgtgaggcatacctggtgggactgttcgaggatactaatctctgtgccatccacgccaaacgcgtgaccattatgcctaaagacatacaattggcacggagaatcaggggcgagcgcgcatag

SEQ ID NO: 138825 - DNA, 411 bp, Artificial Sequence
  derived and/or modified sequence
atggctagaacgaaacagactgcccggaagagcaccgggggaaaggctccgagaaaacagctggcaaccaaggctgctcgaaaatcggcaccggctacaggcggggtaaagaaaccccacaggtacagacccggcaccgtagccctacgcgagattcggcggtaccagaaatccacagaacttctgattcggaagctgccgttccagagactggttcgcgagattgcgcaggactttaagactgatctgcgtttccagagtagcgccgtcatggccttgcaggaggcatgtgaagcatacctggtcggtctgttcgaagacaccaacctatgtgcaatccacgccaaacgcgtgacaatcatgccaaaagatattcagcttgcgcggcgtatcaggggggagagggcatag

SEQ ID NO: 138826 - DNA, 469 bp, Artificial Sequence
  derived and/or modified sequence
atggctcgcactaagcaaactgctcggaagtctactggtggcaaggcgccacgcaaacagttggccactaaggcagcccgcaaaagcgctccggccaccggcggcgtgaaaaagccccaccgctaccggccgggcaccgtggctctgcgcgagatccgccgttatcagaagtccactgaactgcttattcgtaaactacctttccagcgcctggtgcgcgagattgcgcaggactttaaaacagacctgcgtttccagagctccgctgtgatggctctgcaggaggcgtgcgaggcctacttggtagggctatttgaggacactaacctgtgcgccatccacgccaagcgcgtcactatcatgcccaaggacatccagctcgcccgccgcatccgcggagagagggcgtgattactgtggtctctctgacggtccaagcaaaggctcttttcagagccaccaccttttc

SEQ ID NO: 138827 - DNA, 472 bp, Artificial Sequence
  derived and/or modified sequence
atggctcgtactaaacagacagctcggaaatccaccggcggtaaagcgccacgcaagcagctggctaccaaggctgctcgcaagagcgcgccggctaccggcggcgtgaaaaagcctcaccgttaccgcccgggcactgtggctctgcgcgagatccgccgctaccaaaagtcgaccgagttgctgattcggaagctgccgttccagcgcctggtgcgagaaatcgcccaagacttcaagaccgatcttcgcttccagagctctgcggtgatggcgctgcaggaggcttgtgaggcctacttggtagggctctttgaggacacaaacctttgcgccatccatgctaagcgagtgactattatgcccaaagacatccagctcgctcgccgcattcgcggagaaagagcgtaaatgtaaagtcactttttcatcagtcttaaaacccaaaggctcttttcagagccacccactt

SEQ ID NO: 138828 - DNA, 459 bp, Artificial Sequence
  derived and/or modified sequence
atggctcgtacgaagcaaacagctcgcaagtctaccggcggcaaagctccgcgcaagcagcttgctactaaagcagcccgtaagagcgctccggccaccggtggcgtgaagaaacctcatcgctaccgcccgggcaccgtggccttgcgcgaaatccgtcgctaccagaagtccaccgagctgctgatccggaagctgccgttccagcgcctggtgcgagaaatcgcccaggacttcaaaaccgacctgcgtttccagagctctgcggtgatggcgctgcaggaggcttgtgaggcctacctggtgggactcttcgaagacaccaatctgtgcgctattcacgctaaacgcgtcaccatcatgcccaaagatatccagctggcacgtcgcatccgtggggaaagggcataagtctgcccgtttcttcctcattgaaaaggctcttttcagagccactca

SEQ ID NO: 138829 - DNA, 411 bp, Artificial Sequence
  derived and/or modified sequence
atggctcgtaccaagcagactgctcgcaagtccacgggtgggaaagcgccacgcaagcagctggccaccaaggctgctcgaaagagcgctccagccaccggcggcgtgaagaagccccaccgttaccggcccggcacggtggctctgcgcgagatccgccgctaccagaagtcgaccgagctgctgattcgcaaactgccattccagcgtctagtccgtgagatcgcgcaggacttcaagactgatctgcgttttcagagctcggcggtgatggcgctgcaggaggcctgcgaggcctacctggtggggctgtttgaggacaccaacctatgcgccattcacgccaagcgagtgactatcatgcccaaggacatccagcttgctcgccgcattcgtggggagagggcgtaa

SEQ ID NO: 138830 - DNA, 865 bp, Artificial Sequence
  derived and/or modified sequence
acttttacatttttgtcttcattgcttaacatcgtttttaagaattcaaaatgtccggacgcggcaagcaaggcggaaaggcccgagctaaggctaagacccgctcttcgcgggccggactccagttccctgtgggccgcgtacaccgcttgctccgcaagggcaactactccgagcgagtcggggccggcgcgccagtgtatctggcggcggtgttggagtacctgaccgccgagatcctggagctggcgggcaacgccgcccgcgacaacaagaagacccgcatcatcccccgacacctgcagctggccatccgcaacgacgaggagctaaacaagttgctgggtaaagtcacaattgctcagggcggtgttctgcccaacatccaggctgtactgctccccaagaagactgagagtcaccacaaggccaaggcagggtttagaagttcgcaatggctcgtaccaagcagactgctcgcaagtccacgggtgggaaagcgccacgcaagcagctggccaccaaggctgctcgaaagagcgctccagccaccggcggcgtgaagaagccccaccgttaccggcccggcacggtggctctgcgcgagatccgccgctaccagaagtcgaccgagctgctgattcgcaaactgccattccagcgtctagtccgtgagatcgcgcaggacttcaagactgatctgcgttttcagagctcggcggtgatggcgctgcaggaggcctgcgaggcctacctggtggggctgtttgaggacaccaacctatgcgccattcacgccaagcgagtgactatcatgcccaaggacatccagcttgctcgccgcattcgtggggagagggcgtaa

SEQ ID NO: 138831 - DNA, 462 bp, Artificial Sequence
  derived and/or modified sequence
atggcgcgtactaagcagacggctcgtaaatccacaggcggtaaagcaccgcgcaaacagctggccactaaggcagctcgcaagagcgctccggccacgggcggcgtgaagaagccccatcgctaccgccctggcaccgtggctctgcgcgagatccgtcgctaccagaagtctaccgagcttctaatccggaagctgccgtttcagcgcctggtgcgagaaatagctcaggacttcaagaccgacctgcgcttccagagttccgcggtgatggcgctgcaggaggcctgcgaggcctacttggtggggcttttcgaggacaccaacctgtgcgctattcatgccaaacgcgtgaccatcatgcctaaagacatccagcttgcccgccgcattcgtggggagagggcgtgaattgttttgagtacaaaccttaaatccaaaggctcttctcagagccaacca

SEQ ID NO: 138832 - DNA, 466 bp, Artificial Sequence
  derived and/or modified sequence
ctatggcacgcacgaagcaaacagctcgtaagtccactggcggcaaagccccgcgcaagcagctggccactaaggcggctcgcaaaagcgcgccagccaccggtggcgtgaagaagccccaccgctacaggcctggtactgtcgccctccgtgaaatccgccgctatcagaaatcgactgagctactgattcgcaagctaccattccagcgtctggtacgtgagatcgcgcaggacttcaagaccgacctgcgcttccagagctcggctgtgatggcgctgcaggaggcctgcgaggcttacctggtggggctctttgaggacaccaacctgtgtgctatccacgccaagcgagtgactatcatgcccaaggacatccagctcgctcgccgcattcgcggagagagggcataagttgtactgagggtgtgcgccaacttaaaccaaaggctcttttcagagccacc

SEQ ID NO: 138833 - DNA, 467 bp, Artificial Sequence
  derived and/or modified sequence
atggcccgcaccaagcagactgcacgcaagtccaccggtggcaaagcgccgcgcaagcagctggccactaaggcggctcggaaaagcgcgccggccaccggcggcgtgaagaaacctcatcgctaccgtcccggcaccgtggctctgcgcgagattcgccgctatcagaagtcgactgagctgctgatccgcaagttgcctttccaacgcctggtgcgagaaatcgctcaggacttcaagacagatctgcgctttcagagttccgcggtgatggccctgcaggaggcctgcgaggcctacttggtggggctctttgaggataccaacctgtgtgccatccatgctaagcgagtgactatcatgcccaaggacattcagctcgctcgccgcattcgtggggagagagcgtagaggtttccgggcagtaattctatccaacttaaaaaggctcttttaagagccgccta

SEQ ID NO: 138834 - DNA, 473 bp, Artificial Sequence
  derived and/or modified sequence
ctctgaaggcatggcgcgtacgaagcagactgctcgcaagtccaccggcggcaaggctccgcgcaagcagctggccaccaaggcggctcggaagagcgctccggccaccggcggtgtcaagaagccccatcgctatcggcctggtacagtggctctccgcgagattcgccgctaccagaagtccaccgagctgctgatcagaaagctgccttttcagcgtctggtgcgtgagatcgcgcaggacttcaagaccgacttgcgcttccagagctccgcggtgatggcgctgcaagaggcatgcgaggcctacctggtggggctctttgaggacaccaacctgtgcgccatccacgccaagcgggtgactatcatgcccaaggacatccagctcgcacgtcgtatccgcggcgagagggcttgagtctcaaggactcactgattacatacccaaaggctcttttcagagccaccca

SEQ ID NO: 138835 - DNA, 477 bp, Artificial Sequence
  derived and/or modified sequence
ttagccatggcacgaacaaagcaaacagctcgcaagtccaccggcggcaaagcgccgcgcaagcagctggccaccaaggcggctcgcaagagcgctccggccaccggtggcgtcaagaagccccaccgctaccgccccggcaccgtggccctgcgcgagatccgccgctaccagaagtcgaccgagctgctaatccggaagctaccttttcagcgcttggtacgggagatcgcacaggactttaagaccgatctgcgcttccagagctcggcggtgatggcgctgcaggaggcttgcgaggcctacctggtggggctatttgaggataccaacctgtgcgccattcacgccaaacgcgtcactattatgcctaaagacatccagcttgcgcgccgcatccgaggggagagggcataaatattcctatcagcccaagaagtctgtccaaccccaaaaggctcttttcagagcccctca

SEQ ID NO: 138836 - DNA, 478 bp, Artificial Sequence
  derived and/or modified sequence
atggcccggacgaagcagacagctcgcaagtctaccggcggcaaggcaccgcggaagcagctggccaccaaggcagcgcgcaaaagcgctccagcgactggcggtgtgaagaagccccaccgctacaggccaggcaccgtggccttgcgtgagatccgccgttatcagaagtcgactgagctgctcatccgcaaactgccatttcagcgcctggtgcgagaaatcgcgcaggatttcaaaaccgaccttcgtttccagagctcggcggtgatggcgctgcaagaggcgtgcgaggcctatctggtgggtctctttgaagacaccaacctctgtgctattcacgccaagcgtgtcactattatgcctaaggacatccagcttgcgcgtcgtatccgtggcgagcgagcataatcccctgctctatcttgggtttcttaattgcttccaagcttccaaaggctcttttcagagccactta

SEQ ID NO: 138837 - DNA, 411 bp, Artificial Sequence
  derived and/or modified sequence
atggcccggaccaagcagacagccaggaagagcactggaggcaaggcccccaggaagcagctggccaccaaggccgccaggaagagcgccccagccactggaggagtgaagaagccccaccgctaccggcccggcaccgtggccctgcgggagatccgccgctaccagaagagcacagagctgctgatcaggaagctgcccttccagaggctggtgcgggagatcgcccaggacttcaagacagacctgcgcttccagagcagcgctgtgatggccctgcaggaggcctgtgaggcctacctggtgggcctgtttgaggacaccaacctgtgtgccatccacgccaagagggtgaccatcatgcccaaggacatccagctggcccggcgcatccggggggagcgggcctag

SEQ ID NO: 138838 - DNA, 411 bp, Artificial Sequence
  derived and/or modified sequence
atggcccggaccaagcagaccgcccggaagagcaccggcggcaaggcacccaggaaacagctggctaccaaggctgctagaaagtcagcccccgccaccggcggagtgaaaaagccacacagatataggcccggaaccgttgccctgagggaaattcgtcgttaccagaaatctacagagcttctgatccgcaagctgccgtttcagagactggtgagagagatagctcaggacttcaagactgatttaagattccagagttccgctgtcatggcactgcaggaggcctgcgaggcctatttggtgggtttatttgaggacaccaatctttgtgcgatacatgccaagcgcgtgaccatcatgcccaaggacattcaacttgcccgcaggatcaggggggaacgcgcttag

SEQ ID NO: 138839 - DNA, 411 bp, Artificial Sequence
  derived and/or modified sequence
atggcccggaccaagcagaccgcccggaagagcaccggcggcaaggctcctcggaagcagcttgctaccaaagccgctcggaaatccgcccctgctacaggcggcgttaagaagccccatagatacagacccggcaccgtcgctctccgggagattcgccggtaccagaagagcacagaattgctgatcagaaaacttccctttcagcgcctagttagggaaatcgcccaagacttcaagactgacctcaggttccagagttctgccgttatggctctacaagaggcttgcgaagcctatctagtggggctgttcgaggataccaacctgtgtgccatacatgctaagcgggtcactatcatgccaaaagacatccagttagctcggagaattaggggagagagggcttag

SEQ ID NO: 138840 - DNA, 411 bp, Artificial Sequence
  derived and/or modified sequence
atggcccggaccaagcagaccgcccggaagagcaccggcggcaaggctcctcgtaagcagttagctactaaagccgctaggaagtctgcccccgccacaggcggcgtgaaaaaaccccatcgctatagacctggaacagtcgcgctccgcgaaattagaaggtaccagaagtccactgaactgcttattaggaagttaccatttcagcgacttgtgcgcgaaatcgcacaagactttaaaacggacctgcgctttcaatcatctgccgtcatggccctgcaggaggcatgcgaggcatacctcgtgggcctcttcgaagacaccaacctgtgtgctatccacgccaagcgggtcaccattatgcctaaggacattcagcttgcccggcggattaggggtgagcgggcctag

SEQ ID NO: 138841 - DNA, 411 bp, Artificial Sequence
  derived and/or modified sequence
atggcccggaccaagcagaccgcccggaagagcaccggcggcaaggcccccaggaaacagcttgcaaccaaggctgctcgtaaatcggcccccgccaccggcggggtcaagaagccccaccgctaccgtcctggcactgtagcacttcgtgaaatccggcgctaccagaaaagcacagagttgctgattcgcaaactgccattccagcggctggtgcgcgagatagctcaagacttcaaaactgaccttcggtttcagtcctcggcagttatggcgctgcaggaggcctgcgaggcttaccttgtgggcctgttcgaggataccaatctctgcgcaatacacgcaaaaagggtcacaatcatgccaaaggatattcagcttgccagaagaattcggggcgagcgcgcttag

SEQ ID NO: 138842 - DNA, 411 bp, Artificial Sequence
  derived and/or modified sequence
atggcccggaccaagcagaccgcccggaagagcaccggcggcaaggcacctcggaagcagctggcaacaaaagcagccagaaaatccgcacccgcgaccggtggagttaagaagcctcataggtatcgccccgggactgtcgcgctgcgcgaaattagacggtatcaaaaaagcaccgagctcctgattagaaaactgcccttccagcgccttgtgagagagatcgcccaggattttaaaactgacctcaggtttcagagtagtgctgtgatggccctgcaggaagcatgcgaggcttacctcgtcggcctctttgaggacaccaacctgtgtgctattcatgctaaaagggttacgatcatgccaaaagacatccagctggctagacgtataaggggagaacgggcctag

SEQ ID NO: 138843 - DNA, 411 bp, Artificial Sequence
  derived and/or modified sequence
atggcccggaccaagcagaccgcccggaagagcaccggcggcaaggctcccaggaagcagcttgcaaccaaggctgcccgaaagagtgcccctgccacgggaggggtaaagaagccccaccgctaccgcccaggaacagtggctctccgagagatcaggaggtaccagaagagcacagagctactcatcaggaaactacccttccagcgcctggtgagggagattgcccaggacttcaagacagatctgcgtttccagtcctccgccgtcatggccttacaggaagcttgcgaggcatacttggttgggctgttcgaagacaccaatttatgtgctatccatgcgaagcgggtaaccattatgcctaaagacattcagcttgcgagaaggattagaggcgagagagcatag

SEQ ID NO: 138844 - DNA, 411 bp, Artificial Sequence
  derived and/or modified sequence
atggcccggaccaagcagaccgcccggaagagcaccggcggcaaggcaccaaggaaacagttggctacgaaggctgctaggaagtcagccccagcgacgggaggcgttaaaaagccccaccgctacagaccaggcaccgtggcactgcgggaaatcaggcgttaccagaagagtaccgagttgctcatcagaaaacttccttttcagaggttggtgagagaaatagcacaggactttaaaactgacctcaggttccagtcctctgccgtgatggccctccaggaggcatgcgaggcatatctcgttggactgtttgaggataccaatctatgtgccattcacgccaaacgggttaccattatgcctaaggatatccagcttgcacggaggatacggggggagagggcctag

SEQ ID NO: 138845 - DNA, 411 bp, Artificial Sequence
  derived and/or modified sequence
atggcccggaccaagcagaccgcccggaagagcaccggcggcaaggctccacgcaagcaactcgcaaccaaagctgccagaaaaagcgcccctgctactggcggggttaaaaagccccatcgttacagacctggaaccgtggcccttcgcgagatcagaagataccagaagagtacagagcttctgatccgcaagctgcctttccagaggctcgtgagagaaattgcacaggatttcaagactgacctcaggttccagagctccgccgtgatggcactccaagaagcctgtgaggcgtatctggtaggcttattcgaggataccaatctttgtgcaatccatgctaagcgtgtgaccatcatgcccaaagacattcagctcgctcggcgcattcgcggtgaaagggcatag

SEQ ID NO: 138846 - DNA, 411 bp, Artificial Sequence
  derived and/or modified sequence
atggcccggaccaagcagaccgcccggaagagcaccggcggcaaggcgcctcggaagcaactcgccaccaaagccgccaggaagagtgccccagcaacaggtggcgtcaagaaaccacaccgctatcgaccaggcacggtcgctctgagggaaatcagaagataccagaagtctaccgaattgttaattcgaaagctgcccttccaacgattagtaagagaaatcgcacaggattttaaaacggatttgaggtttcagtccagtgctgtgatggctctacaagaagcgtgcgaagcatacctagtgggccttttcgaggacaccaacctttgcgccattcacgccaaacgcgtaactatcatgccaaaagatatccagctagcccgccggatacggggggaacgtgcctag

SEQ ID NO: 138847 - DNA, 411 bp, Artificial Sequence
  derived and/or modified sequence
atggcccggaccaagcagaccgcccggaagagcaccggcggcaaggcaccccgcaagcagctcgctacaaaggctgcgcggaagtctgcgcctgcgacggggggcgttaaaaaaccacataggtatcggcctggaaccgtagcactcagagagatccggagataccaaaagtccactgaactcctgatcaggaagctcccatttcagcgcctggtcagagagattgcgcaggactttaagaccgatctacggttccagtcaagcgccgtcatggcactgcaggaggcctgcgaagcctacctggtgggcctgtttgaggacacaaacctgtgcgccatacacgcgaagcgagtgaccataatgccaaaggatatacaacttgctagacggatcagaggtgagagggcctag

SEQ ID NO: 138848 - DNA, 411 bp, Artificial Sequence
  derived and/or modified sequence
atggcccggaccaagcagaccgcccggaagagcaccggcggcaaggcgcctcgcaaacagctcgcaactaaggcagcacgaaagtccgcccccgccaccggtggggtaaaaaagccacacaggtatagaccagggactgtcgccttgcgcgaaattaggcgctaccagaagtccaccgagttactgattcgtaagctgccgtttcagaggctcgtccgcgagatcgcacaggatttcaaaaccgacttgcgatttcagagcagcgcggtgatggccctgcaggaggcctgcgaagcttacctggtgggcttatttgaagatactaacctctgtgctatacatgccaaacgtgtgaccataatgcccaaagacatccaactggctaggcgaattcgtggagagcgggcgtag

SEQ ID NO: 138849 - DNA, 411 bp, Artificial Sequence
  derived and/or modified sequence
atggccaggactaaacaaacagctcgaaagtccaccggcggaaaagccccacggaagcagctggctactaaagcagcgagaaagtctgctcctgcgaccggtggcgtgaagaaaccccacaggtacagaccaggtaccgtggcattgcgtgaaatcaggcgttaccagaagtccacagagctcctgatacgtaaactgcccttccaaagattggtccgggagattgcccaggacttcaagaccgacttacgcttccagagcagcgcagtgatggctctccaggaggcttgcgaagcttacctggtgggactttttgaggacaccaacctgtgcgccatccacgcaaagcgcgtcaccatcatgcctaaagatatccagctggcaaggcggattagaggagaacgtgcatag

SEQ ID NO: 138850 - DNA, 411 bp, Artificial Sequence
  derived and/or modified sequence
atggcaaggaccaaacaaaccgcacggaagagtaccggaggcaaggcccctcgaaagcaattagctaccaaggcagctagaaaaagcgcccctgctaccggcggtgtgaaaaagcctcatcggtatcggcctgggaccgtggctctgcgcgagatcagaaggtaccagaagtcaaccgagttgctcatcagaaaattgcccttccaacgccttgtgagagagatcgctcaagattttaagaccgatctaagattccagtcttccgcagtgatggcattacaggaggcttgcgaagcctacctggtcggattgttcgaggacaccaatctgtgcgccattcatgccaagcgtgttaccattatgccaaaagatatccagctggcccgaaggatcagaggggaacgggcttag

SEQ ID NO: 138851 - DNA, 411 bp, Artificial Sequence
  derived and/or modified sequence
atggctcgcactaaacagaccgcgaggaagagtaccggaggaaaggcaccacgaaagcagttagcaaccaaagctgcaagaaagtccgcacccgcaactggtggagttaaaaagcctcataggtacaggccaggcaccgtcgccttgcgagagatcaggcgctaccagaaaagcaccgaacttttaatccggaagctgcctttccagcgcctcgtgcgagagattgcacaggatttcaaaacagacctacggtttcaaagttcagccgtcatggcccttcaggaagcctgcgaggcatacctggtcggattgtttgaagacacaaatctttgtgccatccatgctaagcgagtcacaattatgcctaaagatattcagctggctcgacggattcgcggagagcgggcatag

SEQ ID NO: 138852 - DNA, 411 bp, Artificial Sequence
  derived and/or modified sequence
atggcacgcacgaagcagacagccaggaagagcactggcggtaaggctcccaggaagcagttggctacaaaggccgcacgtaagtccgctcccgctactggtggggtcaaaaagccccatagataccgaccaggcactgtcgccttacgcgagatccggcgatatcaaaaatccacagaactgctaatcaggaaactaccttttcagagacttgtccgggagatcgcccaggacttcaagacggatcttcgatttcagagcagtgccgtgatggctctgcaagaagcttgcgaggcgtacttggtcggcctgtttgaggacactaacctgtgcgcaatacacgccaaaagggtgactattatgccaaaggacatccagctcgctaggaggatacgtggagagagggcatag

SEQ ID NO: 138853 - DNA, 411 bp, Artificial Sequence
  derived and/or modified sequence
atggccagaaccaagcagacagctcgcaaatcaacagggggaaaggcccctagaaagcagctggcaacaaaggctgccagaaagagcgctccggctacagggggtgtcaaaaaaccacacagatataggcctggtactgtggccttgagagaaatccgcagataccaaaagtcaactgaactgttgattcgaaaacttcctttccaacgccttgtgcgagaaatcgctcaagacttcaagacggatctgcgattccaatcctcagctgtgatggctctgcaggaagcctgtgaagcatatctggtcggccttttcgaagatacaaatctgtgcgccatccacgccaagcgggtgaccattatgcctaaagatatacaactcgccaggcgcattcgaggggagagagcatag

SEQ ID NO: 138854 - DNA, 411 bp, Artificial Sequence
  derived and/or modified sequence
atggccagaaccaaacaaactgcgagaaaatcaaccggcggtaaggctcctcggaaacagctcgctacaaaggctgccaggaaaagtgcccctgctacagggggagtgaaaaagccacaccggtaccggccaggcacagtggccctgagggagatacggagatatcagaagtccacagagctgttgattcgcaagctgcccttccaacgcctcgtgcgcgaaattgcccaagatttcaaaactgacctcagattccagtcgtccgctgttatggctcttcaagaggcttgcgaggcatacctggttggattgtttgaagacactaatctgtgtgccatccatgccaagcgagtgaccatcatgcctaaagacatccagctcgcacgcagaatacgcggagaaagagcttag

SEQ ID NO: 138855 - DNA, 411 bp, Artificial Sequence
  derived and/or modified sequence
atggctcgaaccaagcaaactgcacgtaaatctactgggggaaaggccccacggaagcagctcgccacaaaggccgctcgcaaaagtgccccagcgactggcggtgtcaaaaagccccacaggtaccgaccgggtacagtggcccttcgcgaaatcaggagatatcagaagagcaccgagctactgattcggaaactcccttttcagcggctcgtgcgggaaattgcacaagactttaagactgaccttcgcttccagagctccgcagtaatggcccttcaggaagcttgtgaggcttacctagtcggacttttcgaggacactaatctgtgtgcaatccatgccaagagggtgacgattatgcccaaagatatccagcttgctaggcgaataagaggtgagcgtgcctag

SEQ ID NO: 138856 - DNA, 411 bp, Artificial Sequence
  derived and/or modified sequence
atggcgagaaccaagcagaccgctcgcaagtcaaccggcggtaaagctccgagaaaacagcttgctaccaaagccgcacggaaaagtgcgccagcaactggcggtgtcaagaaaccccatagataccggccaggcaccgtggccctgagggagatcagaagataccagaaaagcactgaactgttaatccgtaagcttccattccagcgcctggtgagagagattgcacaggattttaagacagatttacgctttcagtcttcagctgtgatggctctccaggaggcctgtgaagcctacctcgtggggctgttcgaggacacaaacctgtgcgccatccacgcgaaacgcgtgacaatcatgccgaaagatatccagctggccaggcgtatccgcggagagagagcctag

SEQ ID NO: 138857 - DNA, 411 bp, Artificial Sequence
  derived and/or modified sequence
atggcacgtactaagcaaacagctagaaagagtacaggcggtaaggcccctcggaagcagctggccactaaggccgcacgaaagtcagccccagcgacgggtggcgtgaaaaagccccaccgataccgtcctggaactgtcgcccttagggagatcagacgctaccagaagagcaccgagttgctcattagaaagctccccttccaaaggctggttagggaaatcgctcaggacttcaagacagacctgcgatttcaaagctcagctgtcatggctctccaagaagcttgtgaagcgtacctggtagggctttttgaggacacaaatctttgcgcaattcacgccaagagagtaacaatcatgccgaaggacattcaactggcacgcaggattagaggggagcgggcttag

SEQ ID NO: 138858 - DNA, 411 bp, Artificial Sequence
  derived and/or modified sequence
atggccaggactaaacagacagcgagaaagagcacagggggaaaggcacccaggaagcagttggctaccaaggcggctaggaagtctgcccctgctacaggaggcgtcaagaagccacatcggtaccggccaggtaccgtggcccttcgggagatccgcaggtaccagaagagcacagagcttttgattcgaaaactgccttttcagcgcttagtgagggagattgctcaggatttcaagacagatctccggttccaatcttctgccgttatggccctacaggaagcatgcgaggcctaccttgtagggctgttcgaggacaccaacctatgtgcaattcacgctaaaagagtcaccattatgcctaaggatattcagttggccagaaggataaggggggaaagggcctag

SEQ ID NO: 138859 - DNA, 411 bp, Artificial Sequence
  derived and/or modified sequence
atggcccgtaccaagcagaccgcacgcaaatccacaggcggtaaagctcccagaaagcagctagcaactaaagctgcgcgaaaaagtgctccggcaaccggcggagttaaaaaaccgcatcggtacagacccggtacggtcgcgctgagggagatcagacggtaccaaaaatccacggagttgctgatccgtaagctgcctttccagagactggtgagggaaatcgcgcaggacttcaagaccgacctgcgctttcagtccagcgctgtgatggcccttcaggaggcatgcgaggcatacttagtgggacttttcgaggacaccaacctttgcgctatccatgccaagcgggttaccataatgcctaaagacatacagttggccagacggatcagaggagagagggcctag

SEQ ID NO: 138860 - DNA, 411 bp, Artificial Sequence
  derived and/or modified sequence
atggccagaaccaagcagaccgccagaaagagcaccggcggcaaggcccccagaaagcagctggccaccaaggccgccagaaagagcgcccccgccaccggcggcgtgaagaagccccacagatacagacccggcaccgtggccctgagagagatcagaagataccagaagagcaccgagctgctgatcagaaagctgcccttccagagactggtgagagagatcgcccaggacttcaagaccgacctgagattccagagcagcgccgtgatggccctgcaggaggcctgcgaggcctacctggtgggcctgttcgaggacaccaacctgtgcgccatccacgccaagagagtgaccatcatgcccaaggacatccagctggccagaagaatcagaggcgagagagcctag

SEQ ID NO: 138861 - protein, 103 aa, Artificial Sequence [sequence omitted]

SEQ ID NO: 138862 - DNA, 312 bp, Artificial Sequence
  derived and/or modified sequence
atgagcggccggggcaagggcggcaagggcctgggcaagggcggcgcgaaaaggcatcggaaggtgctgcgggataatatccagggaattacaaagcccgctattcggcgcttggccagacggggaggggtgaaaagaattagcggcctgatttacgaagaaacgcgcggagtgctcaaggtctttcttgagaacgtcatacgggatgcagtcacttatacagaacacgcgaagcggaagactgtaaccgccatggacgtggtgtatgccctcaagcgccagggcagaactctgtatgggttcggcggatag

SEQ ID NO: 138863 - DNA, 312 bp, Artificial Sequence
  derived and/or modified sequence
atgtccggcaggggcaagggcggaaaaggcctgggaaaggggggagctaaacgccaccgcaaggtgctacgggataacattcaggggatcactaaacccgctatccggaggcttgcgaggcgagggggtgtgaaacggatttccggtctgatctatgaggaaactcggggtgtcctgaaagtgtttctggagaacgtaatcagagacgctgttacttataccgagcacgccaaacggaaaactgtcacagctatggacgtggtgtacgcacttaagagacaaggtcgtacactgtatggttttggaggctag

SEQ ID NO: 138864 - DNA, 312 bp, Artificial Sequence
  derived and/or modified sequence
atgtccgggaggggaaaagggggtaaaggactggggaaaggcggtgccaagcgtcatcgaaaggtgttgagagataacatccagggtattaccaagccggcaatacgcagacttgctcgtaggggcggagtgaagcgaatctcaggactgatctatgaggaaaccaggggtgtactcaaggtcttcctcgagaacgtgattagagatgccgtgacctataccgaacatgccaaacgtaaaaccgtgaccgcaatggatgtcgtttacgcactgaagcggcaaggtaggaccctgtacggcttcgggggatag

SEQ ID NO: 138865 - DNA, 312 bp, Artificial Sequence
  derived and/or modified sequence
atgtctggccgagggaagggcggaaaaggactgggcaaagggggagctaagcggcataggaaagttctccgagacaacatccaaggcattacgaaacccgcaatccggagactcgcacggagaggcggtgtgaagcgcataagtggcctgatttacgaggaaacacggggagtactgaaggtattcctcgagaacgtgattcgagacgccgtgacctataccgagcacgcaaagcggaagacagtcaccgctatggacgtggtttacgccttgaagcgacaggggcgaactctgtacggctttggcggttag

SEQ ID NO: 138866 - DNA, 312 bp, Artificial Sequence
  derived and/or modified sequence
atgagcggtaggggcaaggggggaaaaggactggggaagggtggggcaaagcgacaccgcaaggttttacgggacaacattcaaggtatcaccaaaccggctatccggaggctggccagacgtgggggagtcaaacggatctctggcctcatatacgaagagactcgaggtgtactgaaggtgtttctcgaaaacgtcatccgcgacgccgtgacttacactgagcacgcgaagagaaaaacagttacagcgatggatgtggtttacgccctgaagcgtcagggcagaacactttacggtttcgggggatag

SEQ ID NO: 138867 - DNA, 312 bp, Artificial Sequence
  derived and/or modified sequence
atgtctggacgcggaaagggcggtaaaggcctgggaaaggggggagccaaaaggcaccgcaaagtgctccgggacaacatacagggtattacgaagcctgcaattcgacggctggccagacggggaggagtgaagcgcatatctgggttgatttacgaggaaacccgcggagttctaaaagttttcttagagaacgtgattagggacgccgtgacctataccgagcacgctaagagaaagactgtcacagccatggacgtggtatacgccctgaaaaggcagggcagaacactttatggtttcggcggttag

SEQ ID NO: 138868 - DNA, 312 bp, Artificial Sequence
  derived and/or modified sequence
atgtctggtcggggaaaagggggtaaagggctgggaaagggaggcgctaagaggcacagaaaagtgctcagagataatatacagggaatcacaaagcccgctattcggagactggcgcgacgcggaggtgtcaagagaatcagcgggctgatctacgaggagacacgtggcgtactgaaggtgttcttggagaacgtcatcagggacgctgttacgtacacagagcacgctaaacgcaagaccgttacggccatggatgtggtgtatgcattaaaacggcaagggcgtaccctgtacgggtttgggggttag

SEQ ID NO: 138869 - DNA, 312 bp, Artificial Sequence
  derived and/or modified sequence
atgagtggacggggaaaggggggaaagggcctcggcaaaggaggggctaagcgccacagaaaggtgctcagggacaacattcagggaattactaagcccgctatacgacggcttgcaaggcgcggtggggtcaagaggatctccggattgatatatgaagagacgagaggcgtgctcaaggtattcctcgagaatgtaatcagggacgcggtcacttacaccgagcacgccaagcgtaaaacagttacagccatggacgtggtgtatgcactgaaaaggcaaggcaggacactgtacgggttcggcggatag

SEQ ID NO: 138870 - DNA, 312 bp, Artificial Sequence
  derived and/or modified sequence
atgtcagggagaggaaaagggggtaagggattgggcaaaggtggggcaaagcggcaccggaaggtccttcgcgataacatacagggtataactaagcctgccattcgacggctggcacgacgagggggagttaagaggatcagtggactaatttacgaggaaactaggggggtcctgaaagtcttcctggaaaatgtgattagagacgcggtgacttataccgaacacgctaaaagaaagacagtgacagccatggacgtggtctatgctttaaagagacagggacgcaccttatacggttttggagggtag

SEQ ID NO: 138871 - DNA, 312 bp, Artificial Sequence
  derived and/or modified sequence
atgtccggaagagggaagggcggcaagggcttaggtaagggcggagccaaaaggcatagaaaggttcttagagacaatattcaaggaattacaaaacctgctattagacggcttgcccgaagagggggggtgaagcggatcagcggattgatatatgaggagaccagaggggtgttgaaagtgtttttagagaacgttatcagagatgctgtgacgtacacggagcatgccaagcgcaagactgtgacggcaatggacgtggtgtacgccctgaaaagacaagggagaaccctgtatggatttggcgggtag

SEQ ID NO: 138872 - DNA, 312 bp, Artificial Sequence
  derived and/or modified sequence
atgtccggaagagggaagggaggcaaaggactggggaaaggaggcgcgaaaaggcatcggaaagtgcttcgggacaatatacagggaatcacaaagcccgccattagacgtctcgctagacggggaggggtgaaaagaatcagtggattgatctacgaagagactcgaggcgtactgaaagtattcctggaaaacgtgatccgcgatgcagtgacttatacagagcacgctaagagaaaaactgttaccgctatggatgtcgtgtacgctctgaagcgccaagggcgaaccctgtatggatttggaggctag

SEQ ID NO: 138873 - DNA, 312 bp, Artificial Sequence
  derived and/or modified sequence
atgtctggtaggggcaaggggggaaaagggctgggaaagggaggagccaagaggcaccggaaagtgctgagagacaacattcaagggattaccaaaccagccattcgcagactcgcgcgccgcggaggagtaaagagaattagcggactcatctacgaggaaacaaggggggtgctcaaggtgttcctcgaaaatgtcattcgggatgctgtcacatatacagagcatgcaaaaagaaaaaccgttacagccatggacgtggtctatgcactcaagagacagggacgaacactgtacggattcggaggatag

SEQ ID NO: 138874 - DNA, 312 bp, Artificial Sequence
  derived and/or modified sequence
atgagtggccgggggaaagggggcaaagggctgggtaaggggggagccaaacggcatcgaaaagtgttaagagacaacattcaggggattactaagccggctatcaggcgtcttgcgaggagggggggggttaagagaatctctggactgatttatgaggagacaaggggcgtgttgaaggtgttcctggaaaacgtgataagggatgccgtaacttatacagaacatgctaaaaggaagaccgtgactgcaatggacgtggtttatgccttaaagcgacaaggacgcacactttatggttttgggggctag

SEQ ID NO: 138875 - DNA, 312 bp, Artificial Sequence
  derived and/or modified sequence
atgtcgggcagaggcaaaggcggtaaagggctcgggaaaggaggagcgaaaagacacaggaaggtcctacgagacaatatccaaggcattactaagcccgctatccgacgtttagctcggcgaggcggcgtgaagaggatttcggggctcatttatgaggagacgcggggtgtcttaaaagtgtttctagagaacgtgattagggatgctgtgacctacacagaacatgccaaacgaaagacagtgacggccatggacgttgtatatgcattaaaacggcaagggcgcactctctatggttttggggggtag

SEQ ID NO: 138876 - DNA, 312 bp, Artificial Sequence
  derived and/or modified sequence
atgtccgggagaggaaaaggcgggaagggactgggcaaaggcggggcgaagagacaccggaaagtgcttcgggataatatccaaggaattacaaaacccgccattcggcggctggccagacgaggcggagttaagaggatatcaggtctgatctacgaggaaaccaggggggtgttaaaagtcttcctggaaaatgtcatccgagacgcggtaacctataccgagcatgctaagcgaaaaactgtgacggccatggatgttgtgtacgcacttaaaaggcagggtagaactctgtacggctttggaggctag

SEQ ID NO: 138877 - DNA, 312 bp, Artificial Sequence
  derived and/or modified sequence
atgagcggaaggggtaagggcggtaaaggcctaggaaaaggaggtgcaaagcggcaccgcaaagtactgagagacaacatccaggggattactaagccagccatccgaagacttgcacggcgcggcggggtgaagcgcatttccggcctaatctacgaagagacgcgcggagtcctgaaggttttcttagagaatgtcattagagatgccgtgacttacactgaacacgccaagagaaaaacagtgacagcaatggatgtggtatatgcactgaaaagacaagggcggacattatatggatttgggggttag

SEQ ID NO: 138878 - DNA, 312 bp, Artificial Sequence
  derived and/or modified sequence
atgtcaggaaggggcaaaggagggaaaggcctgggaaaaggcggagctaaacgacacagaaaagtgcttcgggacaacattcagggcatcacgaagcctgctatccggagacttgctagaagaggcggagtgaaaagaatctccggccttatttacgaagagacaagaggggtgctgaaagtttttctggagaacgtgattcgcgacgcagtgacgtacactgagcacgcaaaacgtaaaaccgtgacggccatggacgtggtttacgctttaaaaagacagggtaggacactctacggtttcggtggttag

SEQ ID NO: 138879 - DNA, 312 bp, Artificial Sequence
  derived and/or modified sequence
atgtcaggtagagggaaggggggtaaaggattgggcaaaggcggggccaaacggcaccgcaaagtcttgcgggataacatccagggcatcactaaaccagccatccgcaggctagcaaggcgaggaggagtgaagcggatatctggtctaatctacgaggagacgcgaggtgtgttgaaggtgttcctggaaaatgtaatccgcgatgccgtcacatatactgaacacgcaaaaagaaagacggtcaccgcaatggacgtagtatacgctttaaagagacagggaagaacattatatggcttcggaggctag

SEQ ID NO: 138880 - DNA, 312 bp, Artificial Sequence
  derived and/or modified sequence
atgagtgggagagggaagggagggaagggtcttggaaagggaggagctaaacggcataggaaggtactgcgggataatatacaaggaataaccaagcctgccatacgtagacttgcgcggcggggaggcgtcaagcggataagtggcctgatttacgaggagactaggggcgtgctgaaagtgttcctcgagaacgtcattagggacgcagtaacatacacggagcacgccaagagaaagactgtcactgctatggacgtagtgtacgctctgaaaagacagggtagaactttgtacggcttcggggggtag

SEQ ID NO: 138881 - DNA, 312 bp, Artificial Sequence
  derived and/or modified sequence
atgtctggtaggggcaaggggggaaaagggctgggaaagggaggagccaagaggcaccggaaagtgctgagagacaacattcaagggattaccaaaccagccattcgcagactcgcgcgccgcggaggagtaaagagaattagcggactcatctacgaggaaacaaggggggtgctcaaggtgttcctcgaaaatgtcattcgggatgctgtcacatatacagagcatgcaaaaagaaaaaccgttacagccatggacgtggtctatgcactcaagagacagggacgaacactgtacggattcggtgggtag

SEQ ID NO: 138882 - DNA, 312 bp, Artificial Sequence
  derived and/or modified sequence
atgtctggtagaggtaaaggcggcaaaggcttaggtaaggggggggctaagagacacaggaaggtattacgggacaacatccaggggataactaaaccggccatcagacgcctagcacggagaggcggagtcaaaagaatcagtggcctcatctatgaagagactagaggggtacttaaggtgttcctggagaacgtcatccgtgacgcagtcacatacactgaacatgcaaagcggaaaaccgtcacagcaatggacgtagtatacgcccttaaacgtcagggacggacgctatatggatttggcggttag

SEQ ID NO: 138883 - DNA, 312 bp, Artificial Sequence
  derived and/or modified sequence
atgtcaggacgaggaaagggtggaaagggacttggaaaagggggggcgaagaggcaccggaaagtattgcgtgacaatatccaggggatcaccaaaccagctatcaggagactggcccgacgcggcggagtgaaacgaatctctggtcttatctacgaagaaaccaggggggtgctaaaagtgtttctagaaaatgtcatccgggacgctgtcacatataccgagcacgccaaacgcaagacagtgactgccatggacgtggtgtatgctctcaaacggcagggccgcacactgtacgggttcggtggatag

SEQ ID NO: 138884 - DNA, 312 bp, Artificial Sequence
  derived and/or modified sequence
atgtccgggagaggaaaaggcgggaagggactgggcaaaggcggggcgaagagacaccggaaagtgcttcgggataatatccaaggaattacaaaacccgccattcggcggctggccagacgaggcggagttaagaggatatcaggtctgatctacgaggaaaccaggggggtgttaaaagtcttcctggaaaatgtcatccgagacgcggtaacctataccgagcatgctaagcgaaaaactgtgacggccatggatgttgtgtacgcacttaaaaggcagggtagaactctgtacggctttggcggctag

SEQ ID NO: 138885 - DNA, 312 bp, Artificial Sequence
  derived and/or modified sequence
atgagcggaaggggtaagggcggtaaaggcctaggaaaaggaggtgcaaagcggcaccgcaaagtactgagagacaacatccaggggattactaagccagccatccgaagacttgcacggcgcggcggggtgaagcgcatttccggcctaatctacgaagagacgcgcggagtcctgaaggttttcttagagaatgtcattagagatgccgtgacttacactgaacacgccaagagaaaaacagtgacagcaatggatgtggtatatgcactgaaaagacaagggcggacattatatggatttggcggatag

SEQ ID NO: 138886 - DNA, 312 bp, Artificial Sequence
  derived and/or modified sequence
atgtcaggaaggggcaaaggagggaaaggcctgggaaaaggcggagctaaacgacacagaaaagtgcttcgggacaacattcagggcatcacgaagcctgctatccggagacttgctagaagaggcggagtgaaaagaatctccggccttatttacgaagagacaagaggggtgctgaaagtttttctggagaacgtgattcgcgacgcagtgacgtacactgagcacgcaaaacgtaaaaccgtgacggccatggacgtggtttacgctttaaaaagacagggtaggacactctacggtttcggcggatag

SEQ ID NO: 138887 - DNA, 577 bp, Artificial Sequence
  derived and/or modified sequence
acagtgggcagcccgattttctgctgagtaggcgctgtgatttcagaatgtctgggcgaggtaaaggtggcaaggggctgggtaagggaggcgccaagcgccaccggaaggtgctgcgggacaatatccaaggcattacaaagccggcgattcgccgtctcgcccgacgtgggggcgtcaagcgcatttctggtctcatctacgaggagacccggggagtcctcaaagtcttcctggagaacgtgatccgtgacgcggtgacttacacggagcacgccaagcgcaagaccgtcacggccatggatgtggtgtacgcgctgaaacgccagggtcgcaccctttatggtttcggcggttgagctgtccccacagcttctctacagactccaaaaggcccttttcagggcccccaaactgtcacagaaagagctgttaacacttcctagataacgggtaaatatcaaccctttgatgtcgccttccggataccggaaatgggatattcgcggcccgagcatctgctcgggattagacttggcgggcacggggagaactagacctcaaggagggggttccg

SEQ ID NO: 138888 - DNA, 312 bp, Artificial Sequence
  derived and/or modified sequence
atgagcggcagaggcaagggcggcaagggcctgggcaagggcggcgccaagagacacagaaaggtgctgagagacaacatccagggcatcaccaagcccgccatcagaagactggccagaagaggcggcgtgaagagaatcagcggcctgatctacgaggagaccagaggcgtgctgaaggtgttcctggagaacgtgatcagagacgccgtgacctacaccgagcacgccaagagaaagaccgtgaccgccatggacgtggtgtacgccctgaagagacagggcagaaccctgtacggcttcggcggctag

SEQ ID NO: 138889 - DNA, 312 bp, Artificial Sequence
  derived and/or modified sequence
atgtctggtagaggcaagggaggaaaggggctgggaaagggcggcgccaagcgtcataggaaagtcctgcgggataacatacagggcatcacaaagcctgctatacggagattagctcgccgggggggcgtgaaacggattagtgggctgatttacgaagagacgaggggcgtgttgaaggtgttcttagagaacgtgatcagggatgcggtgacatacacagagcacgcaaagcgaaagaccgtcacagccatggatgtcgtgtatgcgttgaagcggcagggacgcacattatatggctttggtgggtag

SEQ ID NO: 138890 - DNA, 312 bp, Artificial Sequence
  derived and/or modified sequence
atgtccggacggggaaagggaggcaagggactggggaaaggaggagcaaagaggcaccggaaggtcctccgtgacaacattcagggaatcactaagcccgccattcgcagactggcccggcgcggaggcgtcaaacgaatctcaggtctcatatatgaggaaactaggggggtcctgaaggtctttttggaaaatgtcatccgtgatgcagtcacatatacagaacatgccaagcgcaagaccgtcaccgccatggatgtcgtctatgccctgaaacgtcaggggagaacactgtatggatttgggggctag

SEQ ID NO: 138891 - DNA, 312 bp, Artificial Sequence
  derived and/or modified sequence
atgtccggccggggaaaaggcggcaaaggactggggaaaggtggggccaagaggcatagaaaagtactccgggacaacatccaggggattacgaagcctgccatcagaaggttggcaaggcgtgggggcgtgaagcgcattagcggcctcatctatgaggagacgcggggggtgctcaaggtgtttcttgaaaatgtgataagagacgcagtgacgtacacggagcacgcgaaacggaaaacagtcaccgccatggatgtagtttacgcactcaaaagacagggtagaacgctctacggattcggaggctag

SEQ ID NO: 138892 - DNA, 312 bp, Artificial Sequence
  derived and/or modified sequence
atgtcaggccgtggtaagggtggaaaggggctcgggaagggaggtgctaagcgtcaccgcaaagttctgcgcgataacatccaaggcattaccaaacctgccatccgcagactggcccgacgtggcggggtaaaaaggatttcgggactaatctatgaggaaacaaggggcgtgcttaaagtgttcttagaaaatgttattcgcgatgcagtgacgtacacagagcacgcgaagagaaaaacagtgactgccatggacgtggtctatgcccttaagcgtcagggcaggacgctttacgggttcgggggatag

SEQ ID NO: 138893 - DNA, 312 bp, Artificial Sequence
  derived and/or modified sequence
atgtctggcagaggtaaaggtgggaaaggactgggtaagggaggcgccaaaaggcacagaaaggttctcagggacaatattcaggggataacgaagcccgccatacggcgtttagctcggcgaggaggtgttaaaagaatctctgggctaatctatgaggagacaagaggcgttctcaaggtctttctggagaacgtgatacgggacgcggtgacatacactgagcatgctaagcgtaagactgttacggctatggacgtggtgtatgcactgaagagacagggccgtacactttatgggtttggaggatag

SEQ ID NO: 138894 - DNA, 312 bp, Artificial Sequence
  derived and/or modified sequence
atgtccggccgtgggaaaggaggaaaagggctgggcaaaggtggtgccaaacgccacagaaaggtactgcgggataatatccagggtatcaccaagccagcaattcgccggctggcaagacggggtggcgtgaaacggatttccggcctaatatatgaggagactagaggagtgttgaaagtgttcctggaaaacgtgattagagacgcagtgacctacacggagcacgcaaaacgaaaaacagtcacagccatggatgtggtgtatgctctgaaaagacagggtaggaccctatatgggttcgggggctag

SEQ ID NO: 138895 - DNA, 312 bp, Artificial Sequence
  derived and/or modified sequence
atgtctggcagagggaaaggcggtaagggtttggggaagggaggagccaagagacacagaaaggtgctgagagacaatattcaaggcattactaaaccagccatccggcgcctcgcccggcgcggcggagtcaaacgtatatctggactgatctacgaagagacccggggagtgctgaaagttttcctcgaaaacgtcatccgcgacgccgtaacttatactgagcacgcaaaacgcaagactgtaactgcaatggacgttgtatatgctttgaagaggcagggaaggaccctgtacggatttggcggttag

SEQ ID NO: 138896 - DNA, 1918 bp, Artificial Sequence
  derived and/or modified sequence
acagtgggcagcccgattttctgctgagtaggcgctgtgatttcagaatgtctgggcgaggtaaaggtggcaaggggctgggtaagggaggcgccaagcgccaccggaaggtgctgcgggacaatatccaaggcattacaaagccggcgattcgccgtctcgcccgacgtgggggcgtcaagcgcatttctggtctcatctacgaggagacccggggagtcctcaaagtcttcctggagaacgtgatccgtgacgcggtgacttacacggagcacgccaagcgcaagaccgtcacggccatggatgtggtgtacgcgctgaaacgccagggtcgcaccctttatggtttcggcggttgagctgtccccacagcttctctacagactccaaaaggcccttttcagggcccccaaactgtcacagaaagagctgttaacacttcctagataacggaccaagtctagctctgccaccgaggctggagtgcagtggcacgatctcgcctccgcctcccgggttcaagcgattcacctgcctcagcttccggagtagctgggattacaggcctgcgccaccacgcctggctaatttttgtattttttttttttttggtagatacggggtttcaccatgttggccaggctggtcttgaactcctggcctcaagtgattcacccgcctccgcctcccaaagtgctggcatttcaggcgtgagccaccacgcttggtcttgctctagctattctaaacatgaagaagtcatatagcttccttggtgcggtgggctgaagtcactctaagggagtttcccagccccaggggttaaagaactggagtcaagattggaacccagctggcgaaggattccgcaccgctagatcttgacatttgcctcttcttctgccaggaaggctcccctgttcctttttgctgacgtgtcatttctaagtactttctcctactccataaagacttcaagtgagtacacaatactggtgttagtttaatttctaagacagtgagacactcggagaagttcaattttctttaatgcaagtgaaaaattgagttacttaaaagaaatagagtctggcatactttcgtgccctcgatatttgttgcatgaccaaatgagtgattttgggtttcacataaattaaggatgaaagttagggccccgatggaggatagaaatactgtagatatttgtatgacaattaaaactcttccttaagtatttaacttatatggaattgtttaaatatttcatggttttggggtttttttttatttttgtagtggtctcaattctttgattagaatagaacttatattttcccttgtagcatagttatttttttgtttgtgttttgttctttataaaatataacctaattatctaaacccaagaaatatttatttttgtctgtgactctgagtcctatggtatagtaagtacccagtcctgacagtaatcatatcttccaaaccaaaactgggtcacacggttcaataactgaacagaatatctcaaactgaaaacgatcaagattttctgaagtttactattaatagtaaaattgcttactaaaaatgttaaagaacttgatttaaaactctgtaatgcctcacttaaaatgtgaatgaggggggcggggtgggggtggctataatgccagcactttgggaaggctgaggcagtaggattgctggaggccaggagtttgagaccagcatggccaacatagtgagaccccatctctacataaaataagaattataaaatgtaaagtgaatggaatgcattgaaatttgatcctgtagcaaagtcatcccttttgaattttgaacatttgtttaatgcctcttttccaagcatattttgaatattcagagataaatgagcaagttactgcca

SEQ ID NO: 138897 - DNA, 312 bp, Artificial Sequence
  derived and/or modified sequence
atgagcggcagaggtaagggcgggaaggggctgggcaaggggggagcgaagagacacagaaaggtgctgagagataacatccagggcataacgaaaccagcgatccgccgcctggcccgaagaggtggcgtcaagcgaatcagcggtctgatatatgaggagacaaggggagtgctgaaagtcttcctggagaacgtgatcagggacgccgtgacatacaccgaacatgcaaagcggaagaccgttacagctatggacgtcgtttacgctctgaagaggcagggaaggactctgtacggtttcggaggctag

SEQ ID NO: 138898 - DNA, 931 bp, Artificial Sequence
  derived and/or modified sequence
agcggtcatgtccggcagaggaaagggcggaaaaggcttaggcaaagggggcgctaagcgccaccgcaaggtcttgagagacaacattcagggcatcaccaagcctgccattcggcgtctagctcggcgtggcggcgttaagcggatctctggcctcatttacgaggagacccgcggtgtgctgaaggtgttcctggagaatgtgattcgggacgcagtcacctacaccgagcacgccaagcgcaagaccgtcacagccatggatgtggtgtacgcgctcaagcgccaggggcgcaccctgtacggcttcggaggctaggccgccgctccagctttgcacgtttcgatcccaaaggccctttttagggccgaccacttgctcatctgaggagttggacacttgactgcgtaaagtgcaacagtaacgatgttggaaggcttatgattttactgtgtatgtatttgggagaagaaattctgtcagctcccaaaggataaaccagcagttgctttattggtcttcagatgtggctgcaaacacttgagactgaactaagcttaaaacacggtacttagcaatcgggttgccagcaaagcactggatgcaagccttgccttccagaagcttaccagtcgggttgccagcaaagcagtggatgcaagacttgccctccaggagcttaccatcacaacgaagaagacaaataaatgcataatatatagacgacataaatccatactgtacacatttaagaataaacagtccagtagtaagaggcagtacatattcaatctgctgagaaatgtagacaataactactataagaatcctaatgctacagaagtcactggctgctgggaaaccggggaaaacttggctatggacgtgggggcttgtgtcggactctgaataaagagcagaatgattggc

SEQ ID NO: 138899 - DNA, 312 bp, Artificial Sequence
  derived and/or modified sequence
atgagcggccggggcaagggcggcaagggcctgggcaaaggaggagccaagaggcacaggaaggtgctgcgggacaacatccagggcatcaccaagccagccatccggcggctggcccggcggggcggcgtgaagaggatcagcggcctcatctatgaggagacccggggcgtgctgaaggtgttcctggagaatgtcatcagagatgctgtgacctacacagagcacgccaagaggaagacagtgacagccatggatgtggtgtatgccctgaagaggcagggccgcaccctgtatggctttggaggatag

SEQ ID NO: 138900 - DNA, 312 bp, Artificial Sequence
  derived and/or modified sequence
atgagcggccggggcaagggcggcaagggcctgggcaagggcggcgctaaaagacatcgcaaggttcttcgcgacaacattcaggggattaccaaaccagcaatccgccgcttggcgcgacgaggaggcgtgaagcgcattagcggcctgatatatgaggagacgcggggtgtcctaaaggtgtttctggagaatgtgatacgtgatgctgttacttacaccgagcatgccaaaagaaagacggtcactgccatggacgtcgtgtacgccctgaagcgccagggtagaactctctacggattcggaggctag

SEQ ID NO: 138901 - DNA, 312 bp, Artificial Sequence
  derived and/or modified sequence
atgagcggccggggcaagggcggcaagggcctgggcaagggcggcgccaagcggcacaggaaggttctgcgagacaacatacaggggattaccaagcctgctatccgtcggctcgctaggcgtggcggagtcaagcggatttcaggtctcatctatgaggagacccgcggtgtcctgaaagttttccttgagaacgtaatccgtgacgctgttacgtacaccgagcatgcgaagaggaaaacagttaccgcaatggacgtggtgtatgctctgaaaagacagggacgcacactgtacggctttggcggatag

SEQ ID NO: 138902 - DNA, 312 bp, Artificial Sequence
  derived and/or modified sequence
atgagcggccggggcaagggcggcaagggcctgggcaagggcggcgctaaacgacacaggaaagtgttaagagataacatacaggggattacaaaacccgcaattcggcgcctcgcacgtaggggaggcgtgaaacggatctcaggcttgatctacgaagagacacgcggagtgctcaaggtgttcctcgaaaatgtgatcagagacgcggtgacctatacagagcacgccaagagaaagacggtcactgcgatggatgttgtctacgctttaaagagacagggccgtacgctctatggatttggcggatag

SEQ ID NO: 138903 - DNA, 312 bp, Artificial Sequence
  derived and/or modified sequence
atgagcggccggggcaagggcggcaagggcctgggcaagggcggcgcaaaacgccaccgcaaggtcctcagggataacatccaggggattaccaagccagctatcaggcgcctggcacgcagaggaggtgtgaagaggatctccggactgatctacgaagagactcggggagtccttaaggttttcctggaaaacgtgatcagggacgcagtgacatataccgagcacgcgaaacgtaaaacagtgaccgcaatggatgtggtgtacgcgctgaaacggcaggggagaactttgtacggtttcggcggatag

SEQ ID NO: 138904 - DNA, 312 bp, Artificial Sequence
  derived and/or modified sequence
atgagcggccggggcaagggcggcaagggcctgggcaagggcggcgccaagcgtcacagaaaggtgctgcgggacaacatccagggcataacaaaaccagccatccgacgtctggcacggcgcggaggcgtcaagcggatcagcggcttaatttatgaggagaccaggggcgtgcttaaagtgtttctcgagaatgtgattagagacgcagttacctacacagagcacgccaagcgaaagaccgtcacagccatggatgtggtgtacgccttgaagagacagggtcgaactttatatggcttcgggggatag

SEQ ID NO: 138905 - DNA, 312 bp, Artificial Sequence
  derived and/or modified sequence
atgagcggccggggcaagggcggcaagggcctgggcaagggcggcgcaaagcgccatcgcaaggtgctacgcgataatatccaagggattactaagcccgccatcaggcgcctcgctcggcgagggggcgtgaaacgcatctcagggctcatatatgaagagacgcgcggggttctaaaagttttcttagaaaacgttattagagacgccgtgacatatacagagcatgcaaaaaggaagacagttacagccatggatgtcgtatacgctctaaaacggcaggggcgtacactgtatggttttggcggatag

SEQ ID NO: 138906 - DNA, 312 bp, Artificial Sequence
  derived and/or modified sequence
atgagcggccggggcaagggcggcaagggcctgggcaagggcggcgccaaacgccaccggaaggtgctaagagataacatccaggggattactaagcccgctatcagaaggctggccagacgaggcggggttaaacggatctctggcctgatctatgaagaaactcggggcgtgctgaaggtgtttctggaaaacgtcattcgcgacgcggttacttacacagagcatgccaagcgaaagacagtgacagccatggacgtggtttacgcattaaaacgtcaaggcagaacgttatatggttttgggggatag

SEQ ID NO: 138907 - DNA, 1547 bp, Artificial Sequence
  derived and/or modified sequence
atcgggctccagcggtcatgtccggcagaggaaagggcggaaaaggcttaggcaaagggggcgctaagcgccaccgcaaggtcttgagagacaacattcagggcatcaccaagcctgccattcggcgtctagctcggcgtggcggcgttaagcggatctctggcctcatttacgaggagacccgcggtgtgctgaaggtgttcctggagaatgtgattcgggacgcagtcacctacaccgagcacgccaagcgcaagaccgtcacagccatggatgtggtgtacgcgctcaagcgccaggggcgcaccctgtacggcttcggaggctaggccgccgctccagctttgcacgtttcgatcccaaaggccctttttagggccgaccacttgctcatctgaggagttggacacttgactgcgtaaagtgcaacagtaacgatgttggaaggtaactttggcagtggggcgacaatcggatctgaagttaacggaaagctaccgcggcccatagcgctcacagccgtaaagacttaagtcgttgaccgaaagcggctttttcacttacctgggctttttttttttttttttttttttttttaaagcctttatcggtatgaaaggttgaatgctctaggtttgagcactgctttctcggcttgctcttctggtgcagtataggcacacctagagggccacgtcagtctttgcgatcaccaaatctggttctgagaaataggcactggcaatttacacatgccttgctgtgtaatctcactatatttgctcaggcaaagtgggagaagcagccttaggttttcattctagagatgccggctttcccacctgatcggcttagagttcacgattgactgttttgggcttcatttcaccctctacataacaagcgggtggactagatgccttagcaagggtccgtgttgtgtggtgtctccagccacgcactcagctcaatcttagcacagttaaaaaatgcctttctagcaagttatctgcccagtgcctgaaaagtatcatttcttgtgttcaataaaaagcctcctaatttaatcaaggacctatgagataactgtcttttagttgtggcattgcaaggatacaaatgcagagatattttaaagtgatccttctgtaagagtgaaccaacgatatgatctgaaagcaacttcacaggtaattcaggcttatgattttactgtgtatgtatttgggagaagaaattctgtcagctcccaaaggataaaccagcagttgctttattggtcttcagatgtggctgcaaacacttgagactgaactaagcttaaaacacggtacttagcaatcgggttgccagcaaagcactggatgcaagccttgccttccagaagcttaccagtcgggttgccagcaaagcagtggatgcaagacttgccctccaggagcttaccatcacaacgaagaagacaaataaatgcataatatatagacgacataaatccatactgtacacatttaagaataaacagtccagtagtaagaggcagtaca

SEQ ID NO: 138908 - DNA, 610 bp, Artificial Sequence
  derived and/or modified sequence
agcggtcatgtccggcagaggaaagggcggaaaaggcttaggcaaagggggcgctaagcgccaccgcaaggtcttgagagacaacattcagggcatcaccaagcctgccattcggcgtctagctcggcgtggcggcgttaagcggatctctggcctcatttacgaggagacccgcggtgtgctgaaggtgttcctggagaatgtgattcgggacgcagtcacctacaccgagcacgccaagcgcaagaccgtcacagccatggatgtggtgtacgcgctcaagcgccaggggcgcaccctgtacggcttcggaggctaggccgccgctccagctttgcacgtttcgatcccaaaggccctttttagggccgaccacttgctcatctgaggagttggacacttgactgcgtaaagtgcaacagtaacgatgttggaagatcgctgcagtgaatgcttttaacctgtcaactgtgatgaaacaaacagaaaaccgaagccctggcttcttctgaggtgcaaataaatgaccgagaaggtgttatctaagacctctacagccatttgtatctggccgtgtgtagagtgggctctgcaagaccctgcctcactt

SEQ ID NO: 138909 - DNA, 312 bp, Artificial Sequence
  derived and/or modified sequence
atgagcgggagagggaaaggaggaaagggtcttggtaagggcggcgcaaagaggcatcgcaaggtcctgcgggacaatattcaggggattaccaaaccagcaatccggcggctcgccagacgtggcggagtcaagcgtatcagcggccttatatatgaagaaacaaggggcgtgctaaaagtgtttttagaaaacgtcatcagagacgccgtgacttacactgaacacgccaagcgaaaaacagtgacagcaatggatgttgtgtatgccctcaaaagacagggacgcacactgtacggatttggcggttag

SEQ ID NO: 138910 - DNA, 312 bp, Artificial Sequence
  derived and/or modified sequence
atgtcaggcagagggaagggggggaagggactcggtaagggcggcgcaaagagacaccggaaggtactgagagacaacattcagggaatcacaaagcctgctatccggcgacttgcccgacgggggggtgttaaacggatttcagggctgatatatgaggagaccagaggcgtccttaaagtctttctggagaacgtgatccgcgacgccgtgacatatacagagcacgctaaaagaaagacagtgaccgctatggatgttgtatatgcactcaagcgccaaggccgcacactgtatgggtttgggggatag

SEQ ID NO: 138911 - DNA, 396 bp, Artificial Sequence
  derived and/or modified sequence
agaagctgtctatcgggctccagcggtcatgtccggcagaggaaagggcggaaaaggcttaggcaaagggggcgctaagcgccaccgcaaggtcttgagagacaacattcagggcatcaccaagcctgccattcggcgtctagctcggcgtggcggcgttaagcggatctctggcctcatttacgaggagacccgcggtgtgctgaaggtgttcctggagaatgtgattcgggacgcagtcacctacaccgagcacgccaagcgcaagaccgtcacagccatggatgtggtgtacgcgctcaagcgccaggggcgcaccctgtacggcttcggaggctaggccgccgctccagctttgcacgtttcgatcccaaaggccctttttagggccgacca

SEQ ID NO: 138912 - DNA, 312 bp, Artificial Sequence
  derived and/or modified sequence
atgagcggccggggcaagggcggcaagggcctgggcaagggcggcgccaaaaggcaccgcaaagtgctgagagataatattcaaggtatcacaaaacctgcgattaggagactggctaggcgtggtggggttaagagaatctctgggttgatttatgaggagacacggggcgtgctcaaagtctttctcgaaaacgtgatccgcgacgccgtgacttacactgagcatgctaagaggaagactgtaacagccatggacgtcgtgtacgcacttaaaagacaggggagaaccctgtacggcttcggcgggtag

SEQ ID NO: 138913 - DNA, 312 bp, Artificial Sequence
  derived and/or modified sequence
atgagcggccggggcaagggcggcaagggcctgggcaagggcggcgcgaagcggcacagaaaagtcctaagggataatatccaaggaatcacaaaaccagccatcagacgattggctcgcagagggggtgtaaaacgcatctcgggactcatttatgaagagactcgcggcgttctgaaagttttcctggagaatgtgattcgcgacgctgtgacgtacaccgagcatgccaaacggaagacagttacggcaatggacgtggtgtacgcgctgaagcgccaagggagaactctctacgggttcggtggctag

SEQ ID NO: 138914 - DNA, 312 bp, Artificial Sequence
  derived and/or modified sequence
atgagtggtcgtggtaagggcggaaaagggttgggaaaaggcggtgccaaacgacatcggaaagtgctcagagacaatattcaagggatcacaaagcccgctatacggaggctcgcacgcagaggcggagtgaagcgaattagcggcctgatatatgaagagacccgtggcgttctcaaagtcttcctagagaatgtaatcagagacgcagtgacctacactgagcatgcaaagaggaagaccgtaactgccatggatgtggtctatgccctaaagagacagggcaggactctttacggttttggcggatag

SEQ ID NO: 138915 - DNA, 312 bp, Artificial Sequence
  derived and/or modified sequence
atgtctggtcgaggaaagggcggtaaaggactggggaaagggggagccaaacgccacaggaaagtcctgcgggacaatatacagggaattacaaagccagcaatcaggcgcctggcgcgacgcggaggtgtaaaacggattagcggactgatctatgaagagacgaggggggtgctaaaggtattcttggaaaatgttattcgcgacgccgtaacctacaccgagcatgccaagcgaaagactgtcacggcaatggatgtagtgtatgcattgaagaggcagggtcggacactctatggattcggaggctag

SEQ ID NO: 138916 - DNA, 312 bp, Artificial Sequence
  derived and/or modified sequence
atgtctggccgggggaaaggagggaagggcttgggtaaggggggtgcgaagcgccaccgcaaggtgctccgggataatatccagggaatcactaaacccgccatacgtaggttggcccgacgcggaggagtgaagagaatctcaggactgatctatgaggagacacggggcgtgctgaaagtcttcctggagaacgttatacgcgacgccgttacctacacagaacacgctaaaagaaaaactgtgacagcaatggatgtggtgtatgcgctgaaacggcagggtcgcacgctttacgggtttgggggctag

SEQ ID NO: 138917 - DNA, 312 bp, Artificial Sequence
  derived and/or modified sequence
atgagtggccggggtaagggaggtaaggggctgggcaagggtggtgccaaaagacatcggaaggtgcttagagataacatacagggaatcaccaagcccgcaattcgcagactggcccggagaggtggagtgaaacgtatttccgggctgatttatgaggaaaccaggggtgtcctcaaagtgtttctcgaaaacgtgatccgggacgcagtcacatatacagaacacgcaaagcgaaagacagttacagcgatggatgttgtctatgcgcttaaaagacagggtagaacgctctatggattcggcggctag

SEQ ID NO: 138918 - DNA, 312 bp, Artificial Sequence
  derived and/or modified sequence
atgagtggcagaggcaaggggggcaagggtctgggcaaaggcggtgccaaacggcatcgcaaggttctgcgcgataacattcagggcattactaagcccgccatccggagactggccagaaggggaggtgtcaaacgcatctcaggacttatttatgaagaaacacgaggggtactgaaagtgttcctagagaacgtgattagagacgccgtcacatatacagagcacgctaaaagaaaaaccgtgacagccatggacgtcgtgtatgcactcaaacgccaggggcgcaccctgtatggctttgggggatag

SEQ ID NO: 138919 - DNA, 312 bp, Artificial Sequence
  derived and/or modified sequence
atgtccggccgaggaaaaggcgggaaagggttgggaaaaggcggcgcaaagcggcaccgaaaagttctgcgcgacaacattcagggcattaccaagccagccatccggcgactggctcggcgtgggggagtgaaaaggattagcggcctgatttatgaagaaactcgaggagtactgaaggtgtttctcgaaaatgtcatccgtgatgccgtgacttacacggaacatgcgaaaaggaagaccgtgactgccatggacgtggtctacgctttaaaacgacagggccgcactctatatggttttggcggctag

SEQ ID NO: 138920 - DNA, 312 bp, Artificial Sequence
  derived and/or modified sequence
atgagtggtcgggggaaaggggggaagggtctcggcaagggaggggccaagaggcacaggaaagttttaagagacaacatacagggcatcactaaaccggcaataaggcgcctggctcggcgcggcggagtaaagagaatcagtggcctgatctacgaggagacaagaggagtactcaaagtcttcctggagaatgtgataagagacgcagtgacctacaccgagcatgctaagcgtaagacggtcacggctatggacgttgtgtatgccctgaaacggcaagggagaaccctgtacgggttcggggggtag

SEQ ID NO: 138921 - DNA, 312 bp, Artificial Sequence
  derived and/or modified sequence
atgagcggacgtgggaagggaggcaaaggtctcggaaaggggggtgcaaaacgccatcggaaagttctgagagacaacatccagggcatcacaaagccagcgattcgacgcctggcacggcggggtggagtgaagaggatctctggtcttatatacgaggagacaaggggggtactgaaggtcttcctggagaatgttattcgcgacgccgtgacgtataccgaacacgccaaacgaaagactgtgacggccatggacgtggtttacgccttaaaacggcagggccgtactctgtatggcttcggtggctag

SEQ ID NO: 138922 - DNA, 312 bp, Artificial Sequence
  derived and/or modified sequence
atgtcaggaaggggcaaagggggtaaagggctaggcaagggcggagctaaacgtcacagaaaggtattacgtgacaacattcaaggcatcactaaacctgcaattcggcgcctcgcacgaaggggcggcgtcaagcgcattagtggcctaatttacgaagagaccagaggagtgctcaaggtgtttcttgagaacgtgatccgggatgcggttacatacaccgagcacgccaagagaaagaccgttacagcgatggacgtggtctacgcacttaagcgccagggcagaacactatacgggtttggaggttag

SEQ ID NO: 138923 - DNA, 312 bp, Artificial Sequence
  derived and/or modified sequence
atgagcgggagaggaaaaggcggaaaggggcttggcaagggaggcgctaagaggcacaggaaggtcctgcgagacaacattcagggaatcaccaaaccagcgattcgccgattagcacgcaggggaggagtcaagaggattagcggccttatttacgaagaaactagaggcgtcctcaaagtgtttctggagaacgtgatcagggacgctgttacctatactgagcatgccaaaaggaaaacggtaacggctatggacgtagtctacgctctgaaacgccaggggcgcaccctgtatggatttggtggatag

SEQ ID NO: 138924 - DNA, 312 bp, Artificial Sequence
  derived and/or modified sequence
atgtccgggagaggcaaggggggtaagggactgggcaaagggggagctaaaagacaccgaaaggtcttgagggataatattcagggaattaccaagcccgccatccgacgactggcccgaagagggggcgtgaaacgaatctcaggtcttatttatgaggagacccggggcgttttgaaggtattcctcgagaatgtcatccgtgatgctgtgacctacactgagcacgccaaaaggaagacagtgacagcaatggacgtcgtctacgcattgaaaagacaagggaggacactgtacggttttggcggttag

SEQ ID NO: 138925 - DNA, 312 bp, Artificial Sequence
  derived and/or modified sequence
atgtctggccgagggaaaggtggtaaggggctcggtaaaggcggggctaagagacatcgtaaagtgttaagagacaatatccaggggatcaccaaaccagccataaggcgactagcccgtaggggtggagtgaagagaattagtgggctgatatatgaagagacccgcggtgtgttaaaagtatttctagaaaacgtcattcgcgacgccgtgacctacaccgagcacgctaagcgcaaaaccgtgaccgccatggatgtagtttatgcattgaagcggcaggggaggaccctctatgggttcggaggctag

SEQ ID NO: 138926 - DNA, 312 bp, Artificial Sequence
  derived and/or modified sequence
atgagcggcagagggaaaggtggaaagggtctgggcaaaggtggtgccaaacgccatcgtaaggtgcttcgggataacattcagggcattactaagcctgcaataaggcgtctagcacggcgagggggagtcaaacggatctccggattgatatatgaggaaacgagaggggttctgaaggttttcctggaaaatgtgatacgagatgctgtcacttacacagagcatgccaagcggaagactgtgacagcgatggacgtggtgtatgctctaaagcgccagggacgcaccctttacggctttggaggctag

SEQ ID NO: 138927 - DNA, 312 bp, Artificial Sequence
  derived and/or modified sequence
atgtccgggagaggaaagggcggcaagggtttagggaaaggtggggcgaagcgccacagaaaagttcttcgcgataacattcaaggaatcacgaagcctgccattcgcagactcgctcggagaggcggtgtgaagagaatttctggccttatttatgaagagaccagaggggtgctgaaggtcttcctcgagaacgtaatacgggacgctgtaacatacacggagcatgcaaagcgcaaaacggtgacagccatggacgtagtgtatgctttgaaacgtcagggacgcacactgtatgggtttggcggctag

SEQ ID NO: 138928 - DNA, 372 bp, Artificial Sequence
  derived and/or modified sequence
atgtctggacgtggtaagggcgggaagggtttgggtaaggggggtgccaagcgccaccgcaaggtgttgcgtgacaacatccagggcatcaccaagccggccatccggcgtctggcccggcgtggcggtgtgaagcggatctctggtctgatctacgaggagactcgcggggtgctcaaggtgtttttggagaacgtgatccgtgacgctgtcacctatacggagcacgccaagcgcaagacagtcactgccatggacgtggtctacgcgcttaagcgccagggacgcaccctttatggctttggcggttaaggttgctgatttctccacagcttgcatttctgaaccaaaggcccttttcagggccgccca

SEQ ID NO: 138929 - DNA, 357 bp, Artificial Sequence
  derived and/or modified sequence
atgtctggtcgcggcaaaggcggtaaaggtttgggtaagggaggtgccaagcgtcaccgaaaagtgctgcgggataacatccaaggcatcaccaaaccggccattcggcgccttgctaggcgtggtggggttaagcgaatttccggtttgatttatgaggagactcgtggcgttctcaaggtgtttctggagaacgtgatccgggacgccgtgacctacacggagcacgccaagcgcaagactgtcactgccatggatgtggtttacgcgctcaagcgtcaaggacgcactctgtacggcttcggcggttaatcttttcgtcagttttcttccaatggcccttttcagggccgccca

SEQ ID NO: 138930 - DNA, 415 bp, Artificial Sequence
  derived and/or modified sequence
ttttcaatcaggtccgccaagtttgtatttaaggaactgtttcagttcataccttccactgcgataggaatcatgtctggtcgcggcaaaggcggaaaaggcttggggaagggtggtgctaagcgccatcgtaaggtgctccgggataacatccagggcattacaaaaccggctattcgccgtttggctcggcgcggtggcgtcaagcgcatttccggtcttatctatgaggagactcgaggtgtgcttaaggttttcttagagaacgttattcgagacgccgtcacctatacggagcacgccaagcgcaaaactgtcacagccatggatgtagtatatgccctaaaacgtcaggggcgcactctgtatggcttcggcggctgaatctaagaatacgcggtctcctgagaacttc

SEQ ID NO: 138931 - DNA, 367 bp, Artificial Sequence
  derived and/or modified sequence
atgtctggccgcggtaagggcggaaagggtctaggtaagggtggcgccaagcgtcaccgtaaggtattgcgtgacaatatccaaggaatcaccaagcccgctatccgccgcctggctcgccgcggcggcgtcaagcgtatttctggcctcatttatgaggaaactcgcggagtgctgaaagttttcctggaaaatgtaatccgcgatgctgtcacctacacggaacacgccaaacgcaagacagtcacagccatggacgtggtgtacgcgctcaagcgccagggacgcactctttatggcttcggcggctgagcttacctctacagtacactaccgcaaaaccaacggcccttttcagggccaccta

SEQ ID NO: 138932 - DNA, 1409 bp, Artificial Sequence
  derived and/or modified sequence
gttggtgtgttggtcatgtctggtcgcggcaaaggcggaaagggactgggtaaaggaggcgctaagcgtcaccgtaaggtcctgcgagataacatccagggcattaccaagcctgccatccggcgccttgctcgtcgcgggggtgtcaagcgcatttctggtctcatctacgaggagactcgcggggttctgaaggtgtttctggaaaacgtgattcgtgatgctgtgacttacacggagcacgccaaacgcaagacagtgacagcgatggatgtggtctacgcgctgaagagacagggacgcactctttacggcttcggcggctaatgctaccgcttaaacgactcagcatctcgacttcccaaatcaaaggcccttttcagggccgcccacagttttccgcaaaagagctcatgacttgttagacgattggttggtctctttataagttaattgttcctgtcaacaggtacgtatatttttcagccgttttttttttttcgttccaaattacatttggggtttcggcatacgattttttaggctacgatccttttatgtttattgtagtagggccttagattgcactgaaaaggctagggtaatagtgtctgtttaccttaccacttttattttgagtacctaaaaatgcatggttttcgacataagtgggaaaaccgcaagacactgcgtaaccgctcaaaatggcggagagcgaagaacaaagccggtgcctggcaatgggccggacccgcgaattagcgcaaccaatcatcttcctggaaaggagtgtgggccttaaattctagcggcctgttttctattacttaacctaacgaccgagtttaggtgtgtagaagttcctggggtagataagctcacgcaaggagaggttgcaagcattcatttcggaattctattaagccaacccagttgtcccttagaagttatgatatttgctgttttttgaataaaagaatttgactctctttaaaccctaaagcttgaaatttagcatttatctcacatgagacaaatgtttaggaactcatgtttaggaactcatgttcctgcctgaggcaggaactgaaacaccagatcacttgcatcgagaccgtgagactccctatgtttcatccatcatgattgcgtccttatccctccctgatttcctgttttctcgcccttctcgctacataagccccccaattttggtcggggagacggatttgtgatttcatctcctccctcatgaatactcatagaatttttccaaacctactgaatctgtatgtaaggttgactctgtaaggcatatatatattccagctccccttcactgccacagagcgctcattccatcctgggattacttctccctctgaaaataaagtctttgttacttcctg

SEQ ID NO: 138933 - DNA, 416 bp, Artificial Sequence
  derived and/or modified sequence
tcagtctccaaaaaggtccgcataattgatatataaggggcttcagtgtgtagcaaagttgcaaaagttaagagttgttgtttgtcttcgatcatgtctggtagaggcaaaggtggtaaaggtttaggaaagggaggcgccaagcgccatcgcaaagtgctgcgtgacaacatacagggcatcacgaagcccgccatccgtcgcttggcccgacgcggcggcgtgaaacgcatttcgggcctcatttatgaggagacccgcggtgttcttaaggtgttcctggagaatgtgatacgggacgccgtaacctacacggagcacgccaagcgtaagacagtcactgcaatggatgttgtctacgcgctcaagcgccagggacgcactctgtacggctttggtggctgagcctcaccccg

SEQ ID NO: 138934 - DNA, 1034 bp, Artificial Sequence
  derived and/or modified sequence
aggtttcttaagttggttttagaagttgcttagtcatgtctggccgtggtaaaggtggaaaaggtttgggtaagggaggagctaagcgtcatcgcaaggttttgcgcgataacatccagggcatcactaagccagctatccggcgccttgctcgtcgcggcggtgtcaagcgaatttctggccttatctatgaggagactcgtggtgttctgaaggtgttcctggagaacgtgattcgtgacgctgtcacttacacagagcacgccaaacgcaagaccgtgacagcaatggatgtggtctacgcgctgaagcgacagggacgcactctttacggcttcggtggctaaggctcctgcttgctgcactcttattttcattttcaaccaaaggcccttttcagggccgcccacttttttcataaaagagcagacatcttgttatcctgctttgttccagatttttgctgagaagtagttactgtgcacatgtgtagatttgcagttctgtggctcctgatggatctgagaagatggacgtggaggatgaaaatctgtctgattattttgaactgatgtttgttgctatggagatgctgcctatatgttgatgttgcagacgttaagtcactagcccacagccttgtattccatactcagagaccctgctacttacttgacatctcaacttgaaagtccaattaatatgcacttcaaactttaataggcttcaaacagaatttctttcattatctctgcaaaacagcttctctcatcatcttgaaattagtgaatggcattttactgttttagttggagtcatttctgtggttttctttcacatcctacataacaatccatcagtaagttctatgagctcttctttgaaaacaaacagaatccaactgtttcattcccacttctgctctggtcaagccactgccaacactcacctttattattgtagcaccctcattgcctagttctgtcccacagatttccaataaaaggtgaataaaatcaggtcactcttctgct

SEQ ID NO: 138935 - DNA, 397 bp, Artificial Sequence
  derived and/or modified sequence
ttgcttagtcatgtctggccgtggtaaaggtggaaaaggtttgggtaagggaggagctaagcgtcatcgcaaggttttgcgcgataacatccagggcatcactaagccagctatccggcgccttgctcgtcgcggcggtgtcaagcgaatttctggccttatctatgaggagactcgtggtgttctgaaggtgttcctggagaacgtgattcgtgacgctgtcacttacacagagcacgccaaacgcaagaccgtgacagcaatggatgtggtctacgcgctgaagcgacagggacgcactctttacggcttcggtggctaaggctcctgcttgctgcactcttattttcattttcaaccaaaggcccttttcagggccgcccacttttttcataaa

SEQ ID NO: 138936 - DNA, 1343 bp, Artificial Sequence
  derived and/or modified sequence
gaccacttgataatgtcaggacgcggcaaaggaggtaagggcctggggaaagggggtgccaagcgccaccgcaaggtgctgcgcgacaacatccagggtatcaccaagccagccattcggcgccttgctcgccgcggcggcgtgaagcgcatttctggcctcatctatgaggagacccgcggagtgttgaaggtgttcctggagaacgtgatccgggacgccgtgacctacacggagcacgccaagcgcaagacggtcaccgccatggacgtggtctacgcgctcaagcgccagggccgcaccctctatggcttcggcggctaaatggcattttgaagcccagtcattctctaaaaaggccctttttagggcccctaagctttcaacaaaagagttgaaatgactgcaaactgagtctcttaatagggccattgtcagtgagttctgtcatcctattttacaagattaactcgacgccgaaaatgggctgatgactacaggtgaccttgggccgagatttttccaaggccagaagagcctctgctggccagtaacttctggcggctgcctggaaattgcctgcagccggtttaccgctcggattagtttagaaagccaaggggtctgcggtccaaataggggcgggctagataattaacttccctctggaccttcaaatacgtctcaggagataatgagtttgatgggctccactaaatgctagaacctccaggaaaacttcgtggtggctggtttaagaggacttggcgggcacagagctctgcatgggggggagggggacagaccatgcttttactactgtagaacagtagggcagtcttaagagtcttagtaataatattcctttatatgtttgccttttaaatactggaatatatcaagtatacaaaatgcgctggtgaccacaccacttattcaagtgcatctaaaatccttatgtccctttctcagtagcacagccctccctttttcctatctagaattaactaatattctaggataaactgatattctaaatttgtttactgttcccacgcgttttaactttagatgcacatacccctaatctattttaatcgtcatgaatttttacatttgctcttgaaatatatccgtgttgaaatgtgcagttctaggttatttttaccattaatctagttttctaatgtgtcagtaaatactttattcatttctctgttgattttttttcctcattacaaaacagcactgtatacagctgtgcattttctggttacatggaagtggaattatttggtaaatgtgcatattcaacatgaataaaaatgaacaatttgctttcc

SEQ ID NO: 138937 - DNA, 374 bp, Artificial Sequence
  derived and/or modified sequence
gagactcctcttgctcgtcatgtctggccgcggcaaaggcgggaagggtcttggcaaaggcggcgctaagcgccaccgtaaagtactgcgcgacaatatccagggcatcaccaagccggccatccggcgccttgctcgccgcggcggcgtgaagcgcatctccggcctcatctacgaggagactcgcggggtgctgaaggtgttcctggagaacgtgatccgggacgccgtgacctatacagagcacgccaagcgcaagacggtcaccgccatggatgtggtctacgcgctcaagcgccagggccgcaccctctacggtttcggtggttgagcgtccctttctatcaataaaaggcccttttcagggccaccct

SEQ ID NO: 138938 - DNA, 354 bp, Artificial Sequence
  derived and/or modified sequence
atgtctggccgcggcaaaggcgggaagggtcttggcaaaggcggcgctaagcgccaccgtaaagtactgcgcgacaatatccagggcatcaccaagccggccatccggcgccttgctcgccgcggcggcgtgaagcgcatctccggcctcatctacgaggagactcgcggggtgctgaaggtgttcctggagaacgtgatccgggacgccgtgacctatacagagcacgccaagcgcaagacggtcaccgccatggatgtggtctacgcgctcaagcgccagggccgcaccctctacggtttcggtggttgagcgtccctttctatcaacaaaaggccctttttagggccccca

SEQ ID NO: 138939 - DNA, 364 bp, Artificial Sequence
  derived and/or modified sequence
catgtctgggcgcggcaaaggcgggaagggtctgggcaaaggaggcgctaagcgccaccgcaaagttctgcgcgacaacattcagggcatcaccaagcccgccatccgacgcctggcacggcgtggaggcgttaagcgcatctcaggccttatatacgaggagacacgcggagttcttaaagtgtttttggagaatgtaatccgcgatgcagttacctacacggagcacgccaaacgcaagacagtcacagccatggacgtggtttacgcgctcaagcgccagggccgcaccctgtatggctttggcggctgagtgttttacttacttacacggttcctcaaaggcccttctcagggccaccca

SEQ ID NO: 138940 - DNA, 312 bp, Artificial Sequence
  derived and/or modified sequence
atgagcggccggggcaagggcggcaagggcctgggcaagggcggcgcgaagcggcacagaaaagtcctgcgcgataacatccaggggattaccaaacccgctataagacgactcgcccgaagaggtggagtgaaacggattagcggcttgatatatgaagagacaaggggcgtgctgaaggtctttctagaaaacgtgatacgggatgccgtgacttataccgaacacgcaaagaggaaaaccgttactgcaatggacgtagtgtatgctctgaagcgtcagggccgcaccctttacggctttggggggtag

SEQ ID NO: 138941 - DNA, 312 bp, Artificial Sequence
  derived and/or modified sequence
atgagcggccggggcaagggcggcaagggcctgggcaagggcggcgcaaagcggcatcgtaaagtcctgcgagataacattcaggggatcacaaagcctgcgatcagacgcctggcacggaggggtggcgtgaaacgcatttcaggactgatctatgaagagacccgcggtgtgctcaaggtgttcctcgaaaatgtaattcgcgatgcagtcacctacactgagcacgctaaaagaaagactgttacagcaatggacgttgtctatgcattaaaacggcagggcaggaccctgtatggcttcggagggtag

SEQ ID NO: 138942 - DNA, 312 bp, Artificial Sequence
  derived and/or modified sequence
atgagcggccggggcaagggcggcaagggcctgggcaagggcggcgcgaaaaggcacagaaaggttctacgagacaatattcagggaataactaaaccagccatccggcgactggctcggaggggcggggtgaagagaatttccggcctgatctacgaagagaccaggggtgtgttaaaagtctttcttgagaacgtaattcgggacgctgtgacttacaccgagcacgccaaacgcaagacagtcactgccatggacgtggtgtatgcccttaagaggcagggaagaactctctatggcttcgggggctag

SEQ ID NO: 138943 - DNA, 312 bp, Artificial Sequence
  derived and/or modified sequence
atgagcggccggggcaagggcggcaagggcctgggcaagggcggcgccaagcgccacaggaaggtcctcagggacaatatacagggtattacaaagccagccatccgcaggctggctcgacgaggaggagttaagagaattagtgggctgatctatgaagagaccaggggagtattgaaagtgtttcttgagaatgttattcgcgatgcagtcacgtacacagagcacgccaaaaggaagacagtgactgccatggacgtcgtgtacgctctgaaacgccaaggcagaaccctctacggctttggcggatag

SEQ ID NO: 138944 - DNA, 312 bp, Artificial Sequence
  derived and/or modified sequence
atgagcggccggggcaagggcggcaagggcctgggcaagggcggcgccaaacgtcaccgtaaggtactgcgggataacatccagggaataaccaaaccagctatccgtcggctcgccagacgagggggcgttaagaggattagtggcttgatttatgaggagacccgcggcgtcctgaaggttttcctggagaatgtaatccgggatgcagttacctataccgagcacgccaaaaggaagacagtgactgcgatggacgttgtgtacgccttgaagcgccaggggaggacactctacgggtttggcgggtag

SEQ ID NO: 138945 - DNA, 312 bp, Artificial Sequence
  derived and/or modified sequence
atgagcggccggggcaagggcggcaagggcctgggcaagggcggcgccaagaggcaccggaaggtgttgagggacaacatccaggggatcacaaagcctgcaatccgtagacttgcccgacggggcggagtcaaaagaatatcgggtctgatctatgaagagacccgtggtgtgctgaaggtgtttctggagaatgtaattcgcgacgctgtgacttacaccgagcacgccaagcgtaagacagtgaccgcaatggacgtggtttacgcactaaaaagacaggggcggactctttacggcttcggcggctag

SEQ ID NO: 138946 - DNA, 312 bp, Artificial Sequence
  derived and/or modified sequence
atgagcggccggggcaagggcggcaagggcctgggcaagggcggcgctaagcgacaccgaaaagttctcagggacaatatccaaggtatcactaaaccagcaatccgacggctggcccgacgcggcggagtcaaacgaatatcaggccttatctatgaggagaccaggggagtgctgaaggtgttcctcgaaaatgtcatcagggacgcagtaacatacacagagcatgctaaacggaagacagtgaccgcaatggatgtagtatacgcacttaagcggcaaggccgaactttgtacgggtttggtgggtag

SEQ ID NO: 138947 - DNA, 312 bp, Artificial Sequence
  derived and/or modified sequence
atgagcggccggggcaagggcggcaagggcctgggcaagggcggcgctaagcggcacagaaaagtactacgggacaatatccagggaataaccaaaccagctatcagaaggttggcacgacgtggcggggtgaaacgtatctccggcctgatttacgaggagacacggggtgtgttgaaagtctttctggaaaatgtgattcgggacgctgtgacgtacactgaacacgctaaacggaagaccgtgacggcgatggatgtcgtttatgccctgaaacgccagggcaggacgctctacggcttcgggggctag

SEQ ID NO: 138948 - DNA, 312 bp, Artificial Sequence
  derived and/or modified sequence
atgagcggccggggcaagggcggcaagggcctgggcaagggcggcgcgaagcgtcaccggaaagtgctgcgggataacattcaaggtatcaccaaacccgcaatcagaagactggcgagaaggggtggcgtgaaacggataagtggtctgatctacgaggagacacgcggtgtgctcaaagtgttcttagaaaatgtcattcgcgacgcagtgacctacacagaacacgcgaagcggaaaactgtgactgcaatggatgtggtgtatgcgcttaagcgccaggggcgaaccctgtatgggtttgggggatag

SEQ ID NO: 138949 - DNA, 312 bp, Artificial Sequence
  derived and/or modified sequence
atgagcggccggggcaagggcggcaagggcctgggcaagggcggcgctaagcgtcatagaaaggtgctgcgggataatatccagggaatcaccaaacctgccatcagacggctagcaagacgaggtggggttaaacgcatcagcggactgatttacgaggagactcggggcgtgctgaaagtcttcctggagaacgtgataagggatgcagtgacatacactgagcatgcaaaaaggaaaaccgtgaccgcaatggacgtggtttatgccctcaagcgacaggggaggaccctttatggtttcgggggctag

SEQ ID NO: 138950 - DNA, 312 bp, Artificial Sequence
  derived and/or modified sequence
atgagcggccggggcaagggcggcaagggcctgggcaagggcggcgcgaagcgccacaggaaggtgctgagggataacatacagggcatcactaaaccagcaattagaagactcgcccggcggggaggagtgaaacgcatttccggtttaatctatgaggagacgcgcggtgtgctgaaggtcttccttgagaacgtgatccgagacgccgttacgtacaccgagcacgcaaaaaggaaaacagtaacagccatggacgttgtctatgcgctgaagcggcagggaaggaccctctatggatttggcggttag

SEQ ID NO: 138951 - DNA, 312 bp, Artificial Sequence
  derived and/or modified sequence
atgagcggccggggcaagggcggcaagggcctgggcaagggcggcgcaaaacgccaccgaaaagtactgcgagataacatccagggtatcaccaagccagccattaggcgactggcccgaaggggaggggttaagcgcatcagcggtctgatctatgaggagactagaggtgtccttaaggtgttcctggagaatgtcatacgcgacgccgttacgtacactgaacacgccaaacggaaaacagtcactgcgatggacgtggtgtatgctctgaagcggcagggcaggactttatacgggttcgggggttag

SEQ ID NO: 138952 - DNA, 312 bp, Artificial Sequence
  derived and/or modified sequence
atgagcggaagaggcaaggggggaaagggtctgggtaaggggggtgcgaagagacatcggaaggtgctgcgagataatatccaaggcatcacaaaaccagccatccggcgtctggcacgccgagggggagtgaagcggatttccggactgatttacgaggagactcgcggtgtgctgaaggtttttttggagaacgtgatcagagatgccgttacatacacagagcatgcaaaacgcaaaactgtgactgctatggacgtcgtttacgccctcaaacggcagggcaggacactgtacggatttggtgggtag

SEQ ID NO: 138953 - DNA, 312 bp, Artificial Sequence
  derived and/or modified sequence
atgtcgggacggggaaaggggggtaaagggttgggcaagggtggcgctaagcgccacaggaaagttctgcgggacaatattcagggcatcaccaagcccgcaatcagaagactggctcggagagggggagttaagcggatctccggcctgatctacgaggaaacacggggagtcctgaaagttttcctggaaaatgtgatcagagatgccgtgacttatacagagcatgctaagaggaagaccgtgactgccatggatgttgtgtacgctctgaaacgacagggcaggacactgtatggcttcggcggatag

SEQ ID NO: 138954 - DNA, 312 bp, Artificial Sequence
  derived and/or modified sequence
atgtcgggacgtggcaaggggggaaagggcctcggcaagggaggcgcaaaacgccatcgaaaagtgctgcgggacaatatccaaggcatcaccaaaccagcgatccggcgactggctaggcgtggaggcgttaagcggatctctggtcttatctacgaagaaaccaggggagtgctgaaggtgtttcttgaaaatgtgattagagacgctgtgacatacactgaacatgcaaagagaaaaacagtcacagctatggacgtggtgtacgcccttaaacggcagggtaggactctctacggattcggcggttag

SEQ ID NO: 138955 - DNA, 312 bp, Artificial Sequence
  derived and/or modified sequence
atgtcgggcaggggaaagggaggcaaaggcctggggaaaggcggagcaaagcggcacagaaaagttctcagagacaatatccagggcattacaaagcccgcaattcgccgacttgctcgaagagggggagtcaaaaggatcagcggcctgatatatgaagaaactcggggagtcttgaaggtctttctggaaaatgtgattagggatgccgtcacctacaccgagcacgcgaagaggaaaactgttactgctatggatgtggtttacgctctaaagcgccagggcaggactttgtatggattcggtggatag

SEQ ID NO: 138956 - DNA, 312 bp, Artificial Sequence
  derived and/or modified sequence
atgagcggcagggggaaaggtggcaagggcctgggaaagggaggagcaaagaggcaccgcaaggtcctccgggataacatacagggaatcacgaaaccggcaatcagacgactggcccgaagggggggtgtgaaacgcatcagtggactcatctatgaagagacccgcggagtgcttaaagtcttcttggaaaatgtcatccgtgatgccgtcacttacacggagcatgccaagagaaaaactgttacagccatggacgtggtttacgcattgaagaggcagggtaggaccctgtatggatttggtggctag

SEQ ID NO: 138957 - DNA, 312 bp, Artificial Sequence
  derived and/or modified sequence
atgtcgggcaggggcaagggaggtaaggggctgggcaagggtggtgctaagcggcaccgaaaagtgctccgcgataatattcagggcatcacgaagcccgctatcaggcggctggcaagacgagggggtgtgaagcggatctctggtctgatttatgaggagacaaggggcgtcttgaaagtctttctagaaaacgttataagggacgccgtcacctacacagagcatgctaaacgcaaaactgtcaccgctatggatgtagtgtatgctctaaagcgacaggggagaaccctttacggatttggtgggtag

SEQ ID NO: 138958 - DNA, 312 bp, Artificial Sequence
  derived and/or modified sequence
atgtctggacgaggtaaaggcggaaaaggcctggggaaaggaggtgctaagagacatagaaaagtgttacgagacaacatccaggggatcaccaaacctgccatcaggcgcctggcaaggagaggcggtgttaagagaatttctggcctgatctacgaggagacacgtggtgtattgaaagtttttctagagaacgtcatccgcgacgctgtgacgtacacagagcacgctaagaggaagaccgtgaccgctatggacgtggtgtacgctctgaagcgtcagggcaggacactgtacggattcgggggatag

SEQ ID NO: 138959 - DNA, 312 bp, Artificial Sequence
  derived and/or modified sequence
atgtccggccgaggaaagggaggaaaagggctcggaaagggcggtgctaaaaggcatcggaaagtgctgcgggataacattcagggtatcacaaagccagccatccgaaggctggcgaggcgcggaggagttaagcggattagtggccttatttacgaggaaactaggggggttctcaaggtcttcctagaaaacgtgatccgagatgcggttacttacacggaacacgcaaagaggaagaccgtgacagcaatggatgtggtgtatgccctcaagaggcaggggcgaacactgtacggcttcggcggatag

SEQ ID NO: 138960 - DNA, 312 bp, Artificial Sequence
  derived and/or modified sequence
atgagcggtcgtggcaaaggtggaaaaggactgggcaagggcggagctaaaagacaccggaaggttctgagagacaatatccagggcatcacgaaaccagcaattaggcggctcgcgaggaggggtggagtgaaaagaatttccggcctcatctatgaggagacccggggtgtactgaaagtgtttctggaaaacgtgattcgggacgccgttacctataccgagcatgcgaagcgaaaaaccgtgaccgctatggatgtcgtctacgcactgaagagacaggggagaacactgtacggtttcggtggctag

SEQ ID NO: 138961 - DNA, 312 bp, Artificial Sequence
  derived and/or modified sequence
atgtccggcagagggaaagggggaaagggacttggaaagggtggtgcaaaaagacaccgaaaagtgctgcgggacaacatccaaggtataaccaagcccgctattaggcgactggctagacgaggtggcgtcaagaggatctcaggcctcatttacgaagagacacgaggcgtgctgaaggtgttcctggaaaacgtgataagagatgccgttacctatacagagcatgccaagaggaaaactgtgactgccatggacgtcgtgtacgctctgaaacggcaaggtcggaccttgtacggattcggaggatag

SEQ ID NO: 138962 - DNA, 312 bp, Artificial Sequence
  derived and/or modified sequence
atgtccggacggggtaaaggtgggaaaggactgggcaaaggcggagccaagcggcataggaaagtgttgcgtgataatattcaagggattacaaagcccgcaattcgccgactggccagacgcggaggtgtcaagagaatttccgggctcatttatgaagagacacgtggcgtgctgaaggtgttcctggagaacgttataagggatgctgtgacgtatactgagcatgcaaagcgaaaaactgtcaccgcaatggacgtggtatatgctctgaaaaggcagggtaggacactgtacgggtttggcggatag

SEQ ID NO: 138963 - DNA, 312 bp, Artificial Sequence
  derived and/or modified sequence
atgtcaggtcgcggtaagggtggcaaaggcctaggtaagggtggggctaaacggcacaggaaggtactcagggacaacattcagggcattaccaaacccgctatccgacggctggcgcgacgcggaggtgtgaagcggatctctggtctgatttacgaagagactaggggcgtgctgaaggtgttcttggagaatgtgattcgagacgcggtgacctatacagaacacgccaaacgtaagactgtgacagctatggatgttgtctatgccctgaagcgacaaggacgcacattgtatggattcggtggttag

SEQ ID NO: 138964 - RNA, 312 nt, Artificial Sequence
  derived and/or modified sequence
auguccggaagagggaagggcggcaagggcuuagguaagggcggagccaaaaggcauagaaagguucuuagagacaauauucaaggaauuacaaaaccugcuauuagacggcuugcccgaagagggggggugaagcggaucagcggauugauauaugaggagaccagagggguguugaaaguguuuuuagagaacguuaucagagaugcugugacguacacggagcaugccaagcgcaagacugugacggcaauggacgugguguacgcccugaaaagacaagggagaacccuguauggauuuggcggguag

SEQ ID NO: 138965 - RNA, 312 nt, Artificial Sequence
  derived and/or modified sequence
auguccggaagagggaagggaggcaaaggacuggggaaaggaggcgcgaaaaggcaucggaaagugcuucgggacaauauacagggaaucacaaagcccgccauuagacgucucgcuagacggggaggggugaaaagaaucaguggauugaucuacgaagagacucgaggcguacugaaaguauuccuggaaaacgugauccgcgaugcagugacuuauacagagcacgcuaagagaaaaacuguuaccgcuauggaugucguguacgcucugaagcgccaagggcgaacccuguauggauuuggaggcuag

SEQ ID NO: 138966 - RNA, 312 nt, Artificial Sequence
  derived and/or modified sequence
augucugguaggggcaaggggggaaaagggcugggaaagggaggagccaagaggcaccggaaagugcugagagacaacauucaagggauuaccaaaccagccauucgcagacucgcgcgccgcggaggaguaaagagaauuagcggacucaucuacgaggaaacaaggggggugcucaagguguuccucgaaaaugucauucgggaugcugucacauauacagagcaugcaaaaagaaaaaccguuacagccauggacguggucuaugcacucaagagacagggacgaacacuguacggauucggaggauag

SEQ ID NO: 138967 - RNA, 312 nt, Artificial Sequence
  derived and/or modified sequence
augaguggccgggggaaagggggcaaagggcuggguaaggggggagccaaacggcaucgaaaaguguuaagagacaacauucaggggauuacuaagccggcuaucaggcgucuugcgaggaggggggggguuaagagaaucucuggacugauuuaugaggagacaaggggcguguugaagguguuccuggaaaacgugauaagggaugccguaacuuauacagaacaugcuaaaaggaagaccgugacugcaauggacgugguuuaugccuuaaagcgacaaggacgcacacuuuaugguuuugggggcuag

SEQ ID NO: 138968 - RNA, 312 nt, Artificial Sequence
  derived and/or modified sequence
augucgggcagaggcaaaggcgguaaagggcucgggaaaggaggagcgaaaagacacaggaagguccuacgagacaauauccaaggcauuacuaagcccgcuauccgacguuuagcucggcgaggcggcgugaagaggauuucggggcucauuuaugaggagacgcggggugucuuaaaaguguuucuagagaacgugauuagggaugcugugaccuacacagaacaugccaaacgaaagacagugacggccauggacguuguauaugcauuaaaacggcaagggcgcacucucuaugguuuugggggguag

SEQ ID NO: 138969 - RNA, 312 nt, Artificial Sequence
  derived and/or modified sequence
auguccgggagaggaaaaggcgggaagggacugggcaaaggcggggcgaagagacaccggaaagugcuucgggauaauauccaaggaauuacaaaacccgccauucggcggcuggccagacgaggcggaguuaagaggauaucaggucugaucuacgaggaaaccagggggguguuaaaagucuuccuggaaaaugucauccgagacgcgguaaccuauaccgagcaugcuaagcgaaaaacugugacggccauggauguuguguacgcacuuaaaaggcaggguagaacucuguacggcuuuggaggcuag

SEQ ID NO: 138970 - RNA, 312 nt, Artificial Sequence
  derived and/or modified sequence
augagcggaagggguaagggcgguaaaggccuaggaaaaggaggugcaaagcggcaccgcaaaguacugagagacaacauccaggggauuacuaagccagccauccgaagacuugcacggcgcggcggggugaagcgcauuuccggccuaaucuacgaagagacgcgcggaguccugaagguuuucuuagagaaugucauuagagaugccgugacuuacacugaacacgccaagagaaaaacagugacagcaauggaugugguauaugcacugaaaagacaagggcggacauuauauggauuuggggguuag

SEQ ID NO: 138971 - RNA, 312 nt, Artificial Sequence
  derived and/or modified sequence
augucaggaaggggcaaaggagggaaaggccugggaaaaggcggagcuaaacgacacagaaaagugcuucgggacaacauucagggcaucacgaagccugcuauccggagacuugcuagaagaggcggagugaaaagaaucuccggccuuauuuacgaagagacaagaggggugcugaaaguuuuucuggagaacgugauucgcgacgcagugacguacacugagcacgcaaaacguaaaaccgugacggccauggacgugguuuacgcuuuaaaaagacaggguaggacacucuacgguuucggugguuag

SEQ ID NO: 138972 - RNA, 312 nt, Artificial Sequence
  derived and/or modified sequence
augucagguagagggaagggggguaaaggauugggcaaaggcggggccaaacggcaccgcaaagucuugcgggauaacauccagggcaucacuaaaccagccauccgcaggcuagcaaggcgaggaggagugaagcggauaucuggucuaaucuacgaggagacgcgagguguguugaagguguuccuggaaaauguaauccgcgaugccgucacauauacugaacacgcaaaaagaaagacggucaccgcaauggacguaguauacgcuuuaaagagacagggaagaacauuauauggcuucggaggcuag

SEQ ID NO: 138973 - RNA, 312 nt, Artificial Sequence
  derived and/or modified sequence
augagugggagagggaagggagggaagggucuuggaaagggaggagcuaaacggcauaggaagguacugcgggauaauauacaaggaauaaccaagccugccauacguagacuugcgcggcggggaggcgucaagcggauaaguggccugauuuacgaggagacuaggggcgugcugaaaguguuccucgagaacgucauuagggacgcaguaacauacacggagcacgccaagagaaagacugucacugcuauggacguaguguacgcucugaaaagacaggguagaacuuuguacggcuucgggggguag

SEQ ID NO: 138974 - RNA, 312 nt, Artificial Sequence
  derived and/or modified sequence
augucugguaggggcaaggggggaaaagggcugggaaagggaggagccaagaggcaccggaaagugcugagagacaacauucaagggauuaccaaaccagccauucgcagacucgcgcgccgcggaggaguaaagagaauuagcggacucaucuacgaggaaacaaggggggugcucaagguguuccucgaaaaugucauucgggaugcugucacauauacagagcaugcaaaaagaaaaaccguuacagccauggacguggucuaugcacucaagagacagggacgaacacuguacggauucgguggguag

SEQ ID NO: 138975 - RNA, 312 nt, Artificial Sequence
  derived and/or modified sequence
augucugguagagguaaaggcggcaaaggcuuagguaaggggggggcuaagagacacaggaagguauuacgggacaacauccaggggauaacuaaaccggccaucagacgccuagcacggagaggcggagucaaaagaaucaguggccucaucuaugaagagacuagagggguacuuaagguguuccuggagaacgucauccgugacgcagucacauacacugaacaugcaaagcggaaaaccgucacagcaauggacguaguauacgcccuuaaacgucagggacggacgcuauauggauuuggcgguuag

SEQ ID NO: 138976 - RNA, 312 nt, Artificial Sequence
  derived and/or modified sequence
augucaggacgaggaaaggguggaaagggacuuggaaaagggggggcgaagaggcaccggaaaguauugcgugacaauauccaggggaucaccaaaccagcuaucaggagacuggcccgacgcggcggagugaaacgaaucucuggucuuaucuacgaagaaaccaggggggugcuaaaaguguuucuagaaaaugucauccgggacgcugucacauauaccgagcacgccaaacgcaagacagugacugccauggacgugguguaugcucucaaacggcagggccgcacacuguacggguucgguggauag

SEQ ID NO: 138977 - RNA, 312 nt, Artificial Sequence
  derived and/or modified sequence
auguccgggagaggaaaaggcgggaagggacugggcaaaggcggggcgaagagacaccggaaagugcuucgggauaauauccaaggaauuacaaaacccgccauucggcggcuggccagacgaggcggaguuaagaggauaucaggucugaucuacgaggaaaccagggggguguuaaaagucuuccuggaaaaugucauccgagacgcgguaaccuauaccgagcaugcuaagcgaaaaacugugacggccauggauguuguguacgcacuuaaaaggcaggguagaacucuguacggcuuuggcggcuag

SEQ ID NO: 138978 - RNA, 312 nt, Artificial Sequence
  derived and/or modified sequence
augagcggaagggguaagggcgguaaaggccuaggaaaaggaggugcaaagcggcaccgcaaaguacugagagacaacauccaggggauuacuaagccagccauccgaagacuugcacggcgcggcggggugaagcgcauuuccggccuaaucuacgaagagacgcgcggaguccugaagguuuucuuagagaaugucauuagagaugccgugacuuacacugaacacgccaagagaaaaacagugacagcaauggaugugguauaugcacugaaaagacaagggcggacauuauauggauuuggcggauag

SEQ ID NO: 138979 - RNA, 312 nt, Artificial Sequence
  derived and/or modified sequence
augucaggaaggggcaaaggagggaaaggccugggaaaaggcggagcuaaacgacacagaaaagugcuucgggacaacauucagggcaucacgaagccugcuauccggagacuugcuagaagaggcggagugaaaagaaucuccggccuuauuuacgaagagacaagaggggugcugaaaguuuuucuggagaacgugauucgcgacgcagugacguacacugagcacgcaaaacguaaaaccgugacggccauggacgugguuuacgcuuuaaaaagacaggguaggacacucuacgguuucggcggauag

SEQ ID NO: 138980 - protein, 417 aa, Artificial Sequence
  derived and/or modified sequence
MTTQLGPALVLGVALCLGCGQPLPQVPERPFSVLWNVPSAHCEARFGVHLPLNALGIIANRGQHFHGQNMTIFYKNQLGLYPYFGPRGTAHNGGIPQALPLDRHLALAAYQIHHSLRPGFAGPAVLDWEEWCPLWAGNWGRRRAYQAASWAWAQQVFPDLDPQEQLYKAYTGFEQAARALMEDTLRVAQALRPHGLWGFYHYPACGNGWHSMASNYTGRCHAATLARNTQLHWLWAASSALFPSIYLPPRLPPAHHQAFVRHRLEEAFRVALVGHRHPLPVLAYVRLTHRRSGRFLSQDDLVQSIGVSAALGAAGVVLWGDLSLSSSEEECWHLHDYLVDTLGPYVINVTRAAMACSHQRCHGHGRCARRDPGQMEAFLHLWPDGSLGDWKSFSCHCYWGWAGPTCQEPRPGPKEAV

SEQ ID NO: 138981 - protein, 160 aa, Artificial Sequence
  derived and/or modified sequence
MTTQLGPALVLGVALCLGCGQPLPQVPERPFSVLWNVPSAHCEARFGVHLPLNALGIIANRGQHFHGQNMTIFYKNQLGLYPYFGPRGTAHNGGIPQALPLDRHLALAAYQIHHSLRPGFAGPAVLDWEEWCPLWAGNWGRRRAYQAASWAWAQQVFPDL

SEQ ID NO: 138982 - DNA, 1254 bp, Artificial Sequence
  derived and/or modified sequence
atgactacccagctgggcccggctctggtactgggagtggctctgtgtctcgggtgcgggcaaccactgcctcaggtgcctgagaggccgttcagtgttctgtggaacgttccgtcagcacactgtgaggccaggtttggggtccatctgcccctgaacgcgctcgggatcattgccaatcgtggccagcattttcatggtcaaaacatgaccatcttctacaaaaatcagcttggcctgtatccctacttcggcccaagggggacggcccataatggcgggattcctcaggcattgccactggatagacatttggcactcgcggcataccagattcatcactctttacgccctggtttcgctggtcctgcggtactagattgggaggaatggtgccccctttgggctggtaattggggaaggcgacgggcctaccaggccgctagttgggcctgggctcagcaagtttttccagatctcgacccccaagaacagctgtataaggcctacacaggttttgagcaggccgcccgtgcgctgatggaggacaccctaagagtggcccaggcgctgcgccctcacgggctgtggggcttttatcactaccctgcgtgcggtaacgggtggcactccatggccagcaattatacaggccgctgtcacgctgcaacgttggcccgaaacacacagctacactggctctgggcggcctcaagtgcactgttcccctcaatctatttgcctcccagactgccacccgcccaccatcaggccttcgtgagacatcgactcgaggaggccttccgggtcgcactcgtgggacaccggcacccccttcctgttctggcttatgttcggctcacccaccgtcgctccgggaggttcctctcgcaggacgacctggtgcagtccattggtgtctctgccgctctgggtgctgcaggtgttgtgttatggggggatctgagtctgtcatcaagcgaagaagaatgttggcacctccacgactacctggtagatactttggggccgtacgttatcaacgtgacccgcgctgccatggcctgctctcaccagaggtgtcatggccacggccgctgcgctcggagagatcctggtcaaatggaggcctttctgcacctttggcccgacggctcactgggagactggaaatcattctcttgccactgctactggggatgggcagggcccacttgccaggagcctagaccaggcccaaaagaggcggtatag

SEQ ID NO: 138983 - DNA, 1942 bp, Artificial Sequence
  derived and/or modified sequence
agccagggtagagactgagtcggcgcctggcgggtgttgtgacgcgcaaaccaggggcgggttctaagcggcgacgcgcgggtgctgggaggccttagaacgccgtggcgtgccgcaggacgcgacggctgcagaacatccgccgcaccgctgggggccaacgttgtcggaccgaggagtccgaggtggcgactgagtgagatacccagctgtgcggagctaggacgcggaacatcccagaggccagcatcaacatgtttccatccttggggaatgaccacgcaactgggcccagccctggtgctgggggtggccctgtgcctgggttgtggccagcccctaccacaggtccctgaacgccccttctctgtgctgtggaatgtaccctcagcacactgtgaggcccgctttggtgtgcacctgccactcaatgctctgggcatcatagccaaccgtggccagcattttcacggtcagaacatgaccattttctacaagaaccaactcggcctctatccctactttggacccaggggcacagctcacaatgggggcatcccccaggctttgccccttgaccgccacctggcactggctgcctaccagatccaccacagcctgagacctggctttgctggcccagcagtgctggattgggaggagtggtgtccactctgggctgggaactggggccgccgccgagcttatcaggcagcctcttgggcttgggcacagcaggtattccctgacctggaccctcaggagcagctctacaaggcctatactggctttgagcaggcggcccgtgcactgatggaggatacgctgcgggtggcccaggcactacggccccatggactctggggcttctatcactacccagcctgtggcaatggctggcatagtatggcttccaactataccggccgctgccatgcagccacccttgcccgcaacactcaactgcattggctctgggccgcctccagtgccctcttccccagcatctacctcccacccaggctgccacctgcccaccaccaggcctttgtccgacatcgcctggaggaggccttccgtgtggcccttgttgggcaccgacatcccctgcctgtcctggcctatgtccgcctcacacaccggagatctgggaggttcctgtcccaggatgaccttgtgcagtccattggtgtgagtgcagcactaggggcagccggcgtggtgctctggggggacctgagcctctccagctctgaggaggagtgctggcatctccatgactacctggtggacaccttgggcccctatgtgatcaatgtgaccagggcagcgatggcctgcagtcaccagcggtgccatggccacgggcgctgtgcccggcgagatccaggacagatggaagcctttctacacctgtggccagacggcagccttggagattggaagtccttcagctgccactgttactggggctgggctggccccacctgccaggagcccaggcctgggcctaaagaagcagtataaagccagggcccctgccactgcctcttcttttccctgctgccacttttccagtcctggaactactctgtcccactcttgctctattcagtttacagtcaaccctcccaagcacacaccccgcttcccttggaatccctgaggggtagaaggggccagaaaaaacgcttataaaaccagaggccctctgagatcatgtgagtcctccatggcaaggaagcagttccagggagagtcaggttccagctagttagggctgccagcctagggctttgtgcctacacctcactaagcccatggagaggtcacagatgggccgtgcacgggcagatgggccccaaaaaatcttggcgaaggtcggtaaagtgctaagctgttgtctgcactctttcatcataaagtcacttttttccactgc

SEQ ID NO: 138984 - DNA, 1254 bp, Artificial Sequence
  derived and/or modified sequence
atgaccacccagctgggccctgccctggtgctgggcgtggccctgtgcctgggctgcggccagcccctgccccaggtgcctgagcggcccttctctgtgctgtggaatgtgcccagcgcccactgtgaggcccgcttcggcgtgcacctgcccctgaatgccctgggcatcatcgccaacagaggccagcacttccacggccagaacatgaccatcttctacaagaaccagctgggcctgtacccctacttcggcccccggggcacagcccacaacggcggcatcccccaggccctgcccctggacagacacctggccctggccgcctaccagatccaccacagcctgcggcccggctttgctggccctgctgtgctggactgggaggagtggtgccccctgtgggccggcaactggggcagaagaagagcctaccaggccgcctcctgggcctgggcccagcaggtgtttcctgacctggacccccaggagcagctgtacaaggcctacacaggctttgagcaggccgcccgggccctgatggaggacaccctgcgggtggcccaggccctgcggccccacggcctgtggggcttctaccactacccagcctgtggaaatggctggcacagcatggccagcaactacacaggccgctgccacgccgccaccctggccaggaacacccagctgcactggctgtgggccgccagcagcgccctcttccccagcatctacctgcccccccggctgcccccagcccaccaccaggcctttgtgcgccaccggctggaggaggccttccgggtggccctggtgggccaccgccaccccctgcctgtgctggcctacgtgcggctgacccaccggcgcagcggccgcttcctgagccaggatgacctggtgcagagcattggagtgtctgctgccctgggcgccgccggcgtggtgctgtggggagacctgagcctgagcagcagcgaggaggagtgctggcacctgcatgactacctggtggacaccctgggcccctacgtgatcaacgtgacccgggccgccatggcctgcagccaccagcgctgccacggccacggccgctgtgcccggcgggaccccggccagatggaggccttcctgcacctgtggccagatggcagcctgggggactggaagagcttcagctgccactgctactggggctgggccggccccacctgccaggagcccaggcctggccccaaggaggccgtgtag

SEQ ID NO: 138985 - DNA, 1254 bp, Artificial Sequence
  derived and/or modified sequence
atgaccacccagctgggccccgccctggtgctgggcgtggccctgtgcttggggtgcggtcagccactgcctcaagttcccgaacgcccattctctgtgctgtggaacgtccccagcgcccactgcgaagcacggtttggcgtgcacttaccccttaatgccctaggaatcatcgctaacagagggcagcacttccacggacaaaacatgaccatattctataaaaaccagttgggcctctacccatattttggcccgcggggaaccgcacacaacggtggaatccctcaggctttgccgctcgacagacatctggctctggccgcatatcagatccaccactccctgcggccaggatttgccggccccgccgtgttagattgggaagagtggtgtcctttatgggcggggaactgggggaggcgccgagcatatcaggcggcctcgtgggcttgggcacagcaggtttttccagatttggacccacaggagcagctgtataaggcttacacaggattcgagcaggcagctcgggcgctcatggaggacaccttgcgcgtcgcacaggcccttcggccccacggcctttggggtttctatcattaccctgcgtgtgggaatggatggcacagcatggcatccaattataccggtaggtgtcacgctgcgaccctcgccagaaacacccagctccattggttgtgggcggcctcctctgctctgtttcccagtatctaccttccaccccggctccctcctgcccaccaccaagcctttgtgaggcatcgcctagaagaagcgttccgcgtcgccttggtcgggcaccggcacccccttccagtgctagcgtacgtgcgtttgacgcatcgcagatccggccggtttttaagccaagatgatctagtccaatcaatcggagtaagtgctgcgctaggggctgccggcgtggtcctatggggggatctgtccctgtctagctcagaagaagagtgctggcacctccatgattaccttgttgacacactagggccatatgtgattaatgtgacccgcgctgccatggcatgcagtcatcagcggtgtcacggtcacggaaggtgtgcccggagggatccaggacagatggaggcctttttgcatctatggccagatggatccctgggggactggaagagtttctcttgtcattgttattgggggtgggcagggcctacatgccaggaaccccgaccgggaccaaaagaggctgtctag

SEQ ID NO: 138986 - DNA, 1254 bp, Artificial Sequence
  derived and/or modified sequence
atgactactcagctggggcctgccctggtcctgggggtggctctgtgcttagggtgtggtcagcctctgccgcaagtgcctgagcgcccattctccgtcttgtggaacgtgccatcagcacattgtgaagctaggtttggtgtgcacttacccctgaatgccttgggaattatagccaacaggggccagcacttccatggacagaatatgaccattttctacaagaaccagctggggctgtacccatatttcggacctcggggaacagcgcacaatggtggtatcccccaggccttaccgctcgatcggcacctcgccttggccgcttatcagatacatcacagcctgaggcctggttttgcgggacccgcagtacttgactgggaggagtggtgtcccctctgggccggaaactggggacgacgaagggcctaccaggcagcttcttgggcatgggcacagcaggtatttcccgacttggacccccaagagcagttgtacaaagcttacactggattcgaacaggcagcacgggcacttatggaggataccttacgagttgctcaggccttgaggccacatggcctgtggggcttttatcattatcctgcgtgtggtaacggatggcactcaatggctagcaactacaccggcaggtgtcacgccgctacactagctcgaaacacacagcttcactggctgtgggcagcatcatctgcgttattcccatccatatacttaccacccaggcttccacctgcacaccaccaggcattcgtgagacaccggctggaggaagccttccgcgttgcactcgtaggacaccgacaccccctgccagtcctggcatatgtcaggctcacacaccgcagaagcggtcgtttcttgtcacaggacgatctggtacaaagtattggagtgtctgcagctcttggcgcagccggagtcgtgctctggggcgacctgtctctgtctagctctgaggaggagtgctggcacctccacgactaccttgtcgacacgcttggtccttatgtaataaacgttacccgggctgctatggcttgttcccaccagcgctgccatggccacgggcgttgtgcacgcagagaccccggacaaatggaggcattcttgcatctgtggcctgacgggtctctcggggactggaaaagcttttcgtgccactgctattggggatgggcaggccctacatgccaggaacctcgccctggtcccaaagaagccgtctag

SEQ ID NO: 138987 - DNA, 1254 bp, Artificial Sequence
  derived and/or modified sequence
atgaccacccagctgggccccgccctggtgctgggcgtggccctgtgcctgggctgcggccagcccctgccccaggtgcccgagagacccttcagcgtgctgtggaacgtgcccagcgcccactgcgaggccagattcggcgtgcacctgcccctgaacgccctgggcatcatcgccaacagaggccagcacttccacggccagaacatgaccatcttctacaagaaccagctgggcctgtacccctacttcggccccagaggcaccgcccacaacggcggcatcccccaggccctgcccctggacagacacctggccctggccgcctaccagatccaccacagcctgagacccggcttcgccggccccgccgtgctggactgggaggagtggtgccccctgtgggccggcaactggggcagaagaagagcctaccaggccgccagctgggcctgggcccagcaggtgttccccgacctggacccccaggagcagctgtacaaggcctacaccggcttcgagcaggccgccagagccctgatggaggacaccctgagagtggcccaggccctgagaccccacggcctgtggggcttctaccactaccccgcctgcggcaacggctggcacagcatggccagcaactacaccggcagatgccacgccgccaccctggccagaaacacccagctgcactggctgtgggccgccagcagcgccctgttccccagcatctacctgccccccagactgccccccgcccaccaccaggccttcgtgagacacagactggaggaggccttcagagtggccctggtgggccacagacaccccctgcccgtgctggcctacgtgagactgacccacagaagaagcggcagattcctgagccaggacgacctggtgcagagcatcggcgtgagcgccgccctgggcgccgccggcgtggtgctgtggggcgacctgagcctgagcagcagcgaggaggagtgctggcacctgcacgactacctggtggacaccctgggcccctacgtgatcaacgtgaccagagccgccatggcctgcagccaccagagatgccacggccacggcagatgcgccagaagagaccccggccagatggaggccttcctgcacctgtggcccgacggcagcctgggcgactggaagagcttcagctgccactgctactggggctgggccggccccacctgccaggagcccagacccggccccaaggaggccgtgtag

SEQ ID NO: 138988 - protein, 212 aa, Artificial Sequence
  derived and/or modified sequence
MEISMPPPQIYVEKTLAIIKPDIVDKEEEIQDIILRSGFTIVQRRKLRLSPEQCSNFYVEKYGKMFFPNLTAYMSSGPLVAMILARHKAISYWLELLGPNNSLVAKETHPDSLRAIYGTDDLRNALHGSNDFAAAEREIRFMFPEVIVEPIPIGQAAKDYLNLHIMPTLLEGLTELCKQKPADPLIWLADWLLKNNPNKPKLCHHPIVEEPY

SEQ ID NO: 138989 - DNA, 639 bp, Artificial Sequence
  derived and/or modified sequence
atggaaattagtatgccacccccccagatctatgtcgagaagacactcgcaatcataaaaccagacattgtggacaaggaggaagaaatacaagacataattctacggagcggattcaccatcgtgcaacgtagaaagctgaggctttcccccgaacagtgcagcaacttctacgttgagaaatatggcaaaatgttttttcctaaccttaccgcgtacatgagttctgggccactggttgcaatgattttagcccgtcacaaggccatctcctactggctcgaactgctcggcccaaacaacagtttggtagctaaagaaacacacccagactccctgcgagcgatttacggtactgatgatctcaggaacgcactccacggttcgaatgattttgctgccgcagaaagagaaatccgatttatgttccctgaagtcattgttgagccaattcctatcgggcaagccgccaaggactatctcaaccttcatattatgcccactctcctggaaggtctaaccgaattgtgcaagcaaaagcccgccgatccactgatctggctggccgactggctcctcaagaacaatcctaataaacctaagctgtgtcaccatcctatcgtggaggagccatactag

SEQ ID NO: 138990 - DNA, 639 bp, Artificial Sequence
  derived and/or modified sequence
atggagatctccatgcccccaccccagatctacgtggagaagaccctggccatcatcaagccagacatcgtggacaaggaggaggagatccaggacatcatcctgcggagcggcttcaccatcgtgcagaggaggaagctgcggctgagccctgagcagtgcagcaacttctacgtggagaagtatggcaagatgttcttccccaacctgacagcctacatgagcagcggccccctggtggccatgatcctggcccggcacaaggccatctcctactggctggagctgctgggccccaacaacagcctggtggccaaggagacccacccagacagcctgcgggccatctatggaacagatgacctgagaaatgccctgcacggcagcaatgactttgctgctgctgagcgggagatccgcttcatgtttcctgaggtgattgtggagcccatccccatcggccaggccgccaaggactacctgaacctgcacatcatgcccaccctgctggagggcctgacagagctgtgcaagcagaagccagctgaccccctcatctggctggccgactggctgctgaagaacaaccccaacaagcccaagctgtgccaccaccccatcgtggaggagccctactag

SEQ ID NO: 138991 - DNA, 639 bp, Artificial Sequence
  derived and/or modified sequence
atggagatcagcatgccccccccccagatctacgtggagaagaccctggcaatcataaagcccgatatcgtcgacaaagaggaggagatccaggacattattctcaggtcaggctttacgattgtgcagagacgtaagttgcgcctgtccccagagcagtgctcgaacttctacgtggagaagtatggaaaaatgttctttccaaatctcaccgcctatatgtcttccggccccctggtcgccatgatcttggcccggcataaggccatttcctactggctggaattgctggggccgaacaacagtctggtcgccaaggaaactcatccagactccctgcgtgctatttacgggacagacgatctgagaaatgccttgcacggttcgaatgatttcgctgcggcggagagagagataagattcatgtttccagaggtgatcgttgaaccaataccaattgggcaggccgcaaaggactatcttaaccttcatatcatgcccactttgctcgagggactgaccgagctgtgtaaacaaaaacccgcagacccgctgatctggctcgccgactggctgctgaaaaacaaccctaataaacctaagttgtgccaccatcctattgttgaggagccgtactag

SEQ ID NO: 138992 - DNA, 1193 bp, Artificial Sequence
  derived and/or modified sequence
aggtctcctagcaacaagttgtaccatatgaggacggccgctgagccataatggagatatcaatgcctccacctcagatatatgtagaaaaaactctggccattatcaaaccagatattgttgacaaagaggaggagatacaagatattattcttagatccggattcaccattgttcagagaagaaaactacgcctcagccctgagcaatgtagtaacttttatgtggaaaagtatggaaaaatgtttttccccaacttaacagcttacatgagttctggaccacttgtcgccatgatattagctagacataaagccatctcttattggttagaacttttgggaccaaataatagcttagtagcgaaggagacacatccagacagtctgagggcaatttatggcacagatgacctaaggaatgcacttcatgggagtaatgactttgctgctgcggaaagagaaatacgttttatgtttcctgaagtgattgttgagcccattccaattggacaagctgctaaggactatttaaatttacatataatgccaactctgcttgaaggactcacagagctttgtaagcaaaaaccagcagatcctttgatttggctagctgattggctgctgaaaaataatcctaacaaacccaaactttgtcaccatccaattgtagaagaaccttattaaaaaaaaaatcctcgaaagaacaaatcatgaactatcttattataaaaggctgtacttctactgtttgaaaaaattatttctagggtttaagtaactacaagtaaaataaatttatttcttaaaaataagtgttaaaggaataactattctatgaagcagataacattaaggtaaaatataggcttagagtatgattttaacaatgatgtaacactaggtaatggaaaactcatgtaagatgttgctagatgtttttgtttttcttaagtttgagaagtaagacataaagtttagttatacattttcccaagcacatatcctatatctaaatacataattaatgcacagttgagacagtctagtttaaaaggcttaggtccttttgtagtccataagcatggtgatttggtttcatgctcatgtgtcagatatgcttccctcaaaccttgttacagcatcatcacattacctgtttgatgtaaaaaataaaaaatagaaaggtgt

SEQ ID NO: 138993 - DNA, 639 bp, Artificial Sequence
  derived and/or modified sequence
atggagatttcgatgccaccaccacaaatttacgtggaaaaaactttggccatcatcaagccagatatcgtagacaaggaagaagagatccaagacataatcctgcgctcaggattcacaatcgtccaacgcagaaagctgagactctcgccagagcagtgcagcaacttttacgtggagaagtatggaaaaatgtttttcccgaatctgaccgcctacatgagcagcggccctcttgtagccatgattttagcaaggcacaaagccatctcctactggttggaactgcttggtcccaacaactcactggtggccaaggaaactcaccccgactctttgcgcgctatatatggcaccgacgatctccggaatgcgctacatggcagcaatgacttcgccgctgctgaaagggaaatcagattcatgtttccagaagttattgtagagccaattcccatagggcaggcagccaaagattatcttaacttgcatatcatgcccacgctactagaaggacttacagagttatgcaaacaaaaaccagccgacccacttatatggctggcggactggcttctgaaaaacaaccccaacaagccaaaactgtgccaccaccccatcgtagaggaaccctattag

SEQ ID NO: 138994 - DNA, 639 bp, Artificial Sequence
  derived and/or modified sequence
atggagatcagcatgccccccccccagatctacgtggagaagaccctggccatcatcaagcccgacatcgtggacaaggaggaggagatccaggacatcatcctgagaagcggcttcaccatcgtgcagagaagaaagctgagactgagccccgagcagtgcagcaacttctacgtggagaagtacggcaagatgttcttccccaacctgaccgcctacatgagcagcggccccctggtggccatgatcctggccagacacaaggccatcagctactggctggagctgctgggccccaacaacagcctggtggccaaggagacccaccccgacagcctgagagccatctacggcaccgacgacctgagaaacgccctgcacggcagcaacgacttcgccgccgccgagagagagatcagattcatgttccccgaggtgatcgtggagcccatccccatcggccaggccgccaaggactacctgaacctgcacatcatgcccaccctgctggagggcctgaccgagctgtgcaagcagaagcccgccgaccccctgatctggctggccgactggctgctgaagaacaaccccaacaagcccaagctgtgccaccaccccatcgtggaggagccctactag

SEQ ID NO: 138995 - protein, 314 aa, Artificial Sequence
  derived and/or modified sequence
MMGQNQTSISDFLLLGLPIQPEQQNLCYALFLAMYLTTLLGNLLIIVLIRLDSHLHTPMYLFLSNLSFSDLCFSSVTIPKLLQNMQNQDPSIPYADCLTQMYFFLLFGDLESFLLVAMAYDRYVAICFPLHYTAIMSPMLCLALVALSWVLTTFHAMLHTLLMARLCFCADNVIPHFFCDMSALLKLAFSDTRVNEWVIFIMGGLILVIPFLLILGSYARIVSSILKVPSSKGICKAFSTCGSHLSVVSLFYGTVIGLYLCSSANSSTLKDTVMAMMYTVVTPMLNPFIYSLRNRDMKGALSRVIHQKKTFFSL

SEQ ID NO: 138996 - DNA, 945 bp, Artificial Sequence
  derived and/or modified sequence
atgatgggccagaaccagaccagcatcagcgacttcctgctgctgggcctgcccatccagcccgagcagcagaacctgtgctacgccctgttcctggccatgtacctgaccaccctgctgggcaacctgctgatcatcgtgctgatcagactggacagccacctgcacacccccatgtacctgttcctgagcaacctgagcttcagcgacctgtgcttcagcagcgtgaccatccccaagctgctgcagaacatgcagaaccaggaccccagcatcccctacgccgactgcctgacccagatgtacttcttcctgctgttcggcgacctggagagcttcctgctggtggccatggcctacgacagatacgtggccatctgcttccccctgcactacaccgccatcatgagccccatgctgtgcctggccctggtggccctgagctgggtgctgaccaccttccacgccatgctgcacaccctgctgatggccagactgtgcttctgcgccgacaacgtgatcccccacttcttctgcgacatgagcgccctgctgaagctggccttcagcgacaccagagtgaacgagtgggtgatcttcatcatgggcggcctgatcctggtgatccccttcctgctgatcctgggcagctacgccagaatcgtgagcagcatcctgaaggtgcccagcagcaagggcatctgcaaggccttcagcacctgcggcagccacctgagcgtggtgagcctgttctacggcaccgtgatcggcctgtacctgtgcagcagcgccaacagcagcaccctgaaggacaccgtgatggccatgatgtacaccgtggtgacccccatgctgaaccccttcatctacagcctgagaaacagagacatgaagggcgccctgagcagagtgatccaccagaagaagaccttcttcagcctgtag

SEQ ID NO: 138997 - DNA, 945 bp, Artificial Sequence
  derived and/or modified sequence
atgatgggccaaaaccagacctctatcagcgacttccttctcttgggactcccaatccagccagagcaacagaacctgtgctacgctctcttcctcgcaatgtacctcacgacccttctcggaaatctcctcatcattgtcctcattcgccttgactcccacctgcatacacccatgtacctcttcttgagtaatttgagtttctccgatctttgcttcagttccgtaacaatccctaagttgctccagaatatgcaaaatcaggacccgtcgatcccttacgcagactgtctgacccagatgtacttttttttgctgttcggggacctggagagcttccttctcgtcgcgatggcttatgatcgctacgtggccatttgtttccctctgcattacacagccatcatgtcccccatgctctgcctggcactggtcgccctttcttgggtgttgactacttttcacgctatgttacatacactgttgatggccaggctgtgcttctgcgctgataatgtgatcccccacttcttctgtgatatgagcgccctgctcaaactcgctttctctgacaccagggtgaacgaatgggtgattttcataatgggcggactaattttggtgatcccgtttctcctgatactggggtcatatgccaggatcgtcagctctatcctcaaggttccatcctccaaaggaatctgcaaggcctttagtacgtgtggctcacatctgtctgtggtttctctgttctatggaacggttatagggctgtacctctgcagttccgcgaatagctccactctgaaggataccgtgatggctatgatgtacaccgtcgtaactcccatgctgaatccattcatctacagcctaaggaaccgggacatgaaaggtgctttgagccgcgtaattcatcaaaagaagacattcttcagcctgtag

SEQ ID NO: 138998 - DNA, 945 bp, Artificial Sequence
  derived and/or modified sequence
atgatgggccagaaccagaccagcatcagtgacttcctgctgctgggcctgcccatccagcctgagcagcagaacctgtgctacgccctcttcctggccatgtacctgaccaccctgctgggcaacctgctgatcatcgtgctgatccggctggacagccacctgcacacccccatgtacctgttcctgagcaacctgtccttcagtgacctgtgcttcagctctgtgaccatccccaagctgctgcagaacatgcagaaccaggaccccagcatcccctatgctgactgcctgacccagatgtacttcttcctgctgtttggagacctggagagcttcctgctggtggccatggcctatgacagatatgtggccatctgcttccccctgcactacacagccatcatgagccccatgctgtgcctggccctggtggccctgtcctgggtgctgaccaccttccacgccatgctgcacaccctgctgatggcccggctgtgcttctgtgccgacaacgtcatcccccacttcttctgtgacatgtctgccctgctgaagctggccttcagtgacaccagggtgaatgagtgggtgatcttcatcatgggcggcctcatcctggtgatccccttcctgctgatcctgggcagctatgccagaattgtgagcagcatcctgaaggtgcccagcagcaagggcatctgcaaggccttcagcacctgtggcagccacctgtctgtggtgtccctcttctacggcaccgtcatcggcctgtacctgtgcagcagcgccaacagcagcaccctgaaggacacagtgatggccatgatgtacacagtggtgacccccatgctgaaccccttcatctacagcctgaggaacagagacatgaagggggccctgagcagggtcatccaccagaagaagaccttcttcagcctgtag

SEQ ID NO: 138999 - DNA, 1307 bp, Artificial Sequence
  derived and/or modified sequence
atgatgggacaaaatcaaaccagcatctcagacttcctgctcctgggcctgcccatccaaccagagcagcaaaacctgtgctatgccctgttcttggccatgtatcttaccaccctcctggggaacctcctcatcattgtcctcattcgactggactcccatctccacacgcctatgtatttgtttctcagcaacttgtccttctctgacctctgcttctcttccgtgaccattcccaagttgttacagaacatgcagaaccaggacccatccatcccctatgcggactgcctgacccaaatgtacttcttcctgttatttggagacctggagagcttcctccttgtggccatggcctatgaccgctatgtggccatctgcttccccctgcactacaccgccatcatgagccccatgctctgtctcgccctggtggcgctgtcctgggtgctgaccaccttccatgccatgttacacactttactcatggccaggttgtgtttttgtgcagacaatgtgatcccccactttttctgtgatatgtctgctctgctgaagctggccttctctgacactcgagttaatgaatgggtgatatttatcatgggagggctcattcttgtcatcccattcctactcatccttgggtcctatgcaagaattgtctcctccatcctcaaggtcccttcttctaagggtatctgcaaggccttctctacttgtggctcccacctgtctgtggtgtcactgttctatggaaccgttattggtctctacttatgctcatcagctaatagttctactctaaaggacactgtcatggctatgatgtacactgtggtgacccccatgctgaaccccttcatctacagcctgaggaacagagacatgaagggagccctgagcagagtcattcatcagaagaaaactttcttctctctctgatgataacacttggagctattacatagtttatccagtaaaatattgatattaatattggaatattattctaaattatttcctcaccatccttttgttgaaatggcatcgtacataatttttcaatatgtagtggagatgaagcatagctgagtagttgaactagggaagagggtcttggtgacctggctaagacttcctgtttgtcttcccaaggtgatcttggaaaaatgtagtttaagaacaactgttttaaatggtcttcatgccccacattcttaaattatcacaggattttgttatgttactcagaattttgctttgattgtagaatcatttttgtttaattaaaaaaatttttaaat

SEQ ID NO: 139000 - DNA, 945 bp, Artificial Sequence
  derived and/or modified sequence
atgatgggccagaaccagaccagcatcagcgacttcctgctgctgggtcttcccattcaacccgagcaacaaaatttatgctacgctctgtttttagccatgtacctcacaacattattgggaaaccttctaataattgtactgatccgccttgacagccaccttcacactcccatgtatctgttcctaagcaatctttcattcagtgacctgtgtttttcttcggtgactattcctaagctcttgcagaatatgcagaatcaggacccaagtatcccatatgctgattgtttgacccagatgtatttcttccttcttttcggggatctggaatcctttctcctggttgctatggcgtacgatcgctatgttgcaatttgcttcccattacactacacagccatcatgtctcccatgctatgtctggctctggtggccctgtcatgggtactcacaacatttcacgcaatgcttcacacactgttgatggccaggctgtgcttttgcgctgacaatgttattccccatttcttctgcgatatgtcagccctcctgaagttggcttttagcgatacccgggtgaacgaatgggttatattcatcatgggaggcctcatcctggtgattcctttccttctgatccttggcagctacgcaaggatcgtgtcatcgatccttaaagtacctagctccaaaggtatatgcaaagcattcagtacatgcgggtctcacctgagcgtagtgagccttttctacgggacggtcatcggactgtacctctgctcatccgcaaattcctctacactgaaagacaccgtgatggcaatgatgtacactgtcgtcacccccatgctgaaccccttcatatactccttacgtaaccgagatatgaagggcgctctctctcgcgttatacaccagaagaagacttttttctctttatag

SEQ ID NO: 139001 - DNA, 945 bp, Artificial Sequence
  derived and/or modified sequence
atgatgggacaaaaccagaccagtatcagcgattttctgttactcgggctccccattcagcccgagcagcagaatctgtgttatgccctgtttctggccatgtacctgacaacgttgctaggtaacctgctgatcatcgtcttgattaggctggatagtcacctgcacactcctatgtatttgttcctgagtaatctctcctttagcgatctgtgctttagttcagtgacaatcccaaagctcttacagaatatgcagaatcaggatccatccatcccttatgccgattgtctcacacagatgtacttctttcttctgttcggcgatctggaatcctttttgcttgtagcaatggcttacgatagatatgtagccatctgctttcccttgcactatacagccattatgtccccgatgctctgcctggccctggtggctctgtcatgggtgctgacgacgtttcatgcaatgctccacaccctcctgatggccaggctgtgcttttgtgccgacaatgtaatcccacattttttctgcgacatgtctgctctgttaaagttggccttttctgatactagggtgaatgaatgggtcattttcataatgggaggtttgatcctggtgatccctttcctgctaatactagggtcttacgcgaggatcgtgagctcaatcctaaaggttccgtcttcaaaagggatttgtaaggcctttagtacctgtgggagccacctgagcgtggtttctctgttttacggtaccgttatcggcctgtacctgtgttccagtgccaacagctcaacattaaaggacactgtaatggccatgatgtacactgttgtgacccccatgctgaatccatttatctactccttgaggaacagggacatgaagggcgctctctctcgggtgatccaccaaaagaagaccttttttagcttgtag

SEQ ID NO: 139002 - protein, 323 aa, Artificial Sequence
  derived and/or modified sequence
MMGQNQTSISDFLLLGLPIQPEQQNLCYALFLAMYLTTLLGNLLIIVLIRLDSHLHTPVYLFLSNLSFSDLCFSSVTMPKLLQNMQNQDPSIPYADCLTQMYFFLYFSDLESFLLVAMAYDRYVAICFPMHYTAICFLLHYTAIMSPMLCLSVVALSWVLTTFHAMLHTLLMARLCFCADNVIPHFFCDMSALLKLACSDTRVNEWVIFIMGGLILVIPFLLILGSYARIVSSILKVPSSKGICKAFSTCGSHLSVVSLFYGTVIGLYLCPSANSSTLKDTVMAMMYTVVTPMLTPFIYSLRNRDMKGALERVICKRKNPFLL

SEQ ID NO: 139003 - protein, 300 aa, Artificial Sequence
  derived and/or modified sequence
MGQNQTSISDFLLLGLPIQPEQQNLCYALFLAMYLTTLLGNLLIIVLIRLDSHLHTPVYLFLSNLSFSDLCFSSVTMPKLLQNMQNQDPSIPYADCLTQMYFFLYFSDLESFLLVAMAYDRYVAICFPMHYTAIMSPMLCLSVVALSWVLTTFHAMLHTLLMARLCFCADNVIPHFFCDMSALLKLACSDTRVNEWVIFIMGGLILVIPFLLILGSYARIVSSILKVPSSKGICKAFSTCGSHLSVVSLFYGTVIGLYLCPSANSSTLKDTVMAMMYTVVTPMLTPFIYSLRNRDMKGAL

SEQ ID NO: 139004 - DNA, 972 bp, Artificial Sequence
  derived and/or modified sequence
atgatgggccagaaccagaccagcatcagcgacttcctgctgctgggcctgcccatccagcccgagcagcagaacctgtgctacgccctgttcctggccatgtacctgaccaccctgctgggcaacctgctgatcatcgtgctgatcagactggacagccacctgcacacccccgtgtacctgttcctgagcaacctgagcttcagcgacctgtgcttcagcagcgtgaccatgcccaagctgctgcagaacatgcagaaccaggaccccagcatcccctacgccgactgcctgacccagatgtacttcttcctgtacttcagcgacctggagagcttcctgctggtggccatggcctacgacagatacgtggccatctgcttccccatgcactacaccgccatctgcttcctgctgcactacaccgccatcatgagccccatgctgtgcctgagcgtggtggccctgagctgggtgctgaccaccttccacgccatgctgcacaccctgctgatggccagactgtgcttctgcgccgacaacgtgatcccccacttcttctgcgacatgagcgccctgctgaagctggcctgcagcgacaccagagtgaacgagtgggtgatcttcatcatgggcggcctgatcctggtgatccccttcctgctgatcctgggcagctacgccagaatcgtgagcagcatcctgaaggtgcccagcagcaagggcatctgcaaggccttcagcacctgcggcagccacctgagcgtggtgagcctgttctacggcaccgtgatcggcctgtacctgtgccccagcgccaacagcagcaccctgaaggacaccgtgatggccatgatgtacaccgtggtgacccccatgctgacccccttcatctacagcctgagaaacagagacatgaagggcgccctggagagagtgatctgcaagagaaagaaccccttcctgctgtag

SEQ ID NO: 139005 - DNA, 972 bp, Artificial Sequence
  derived and/or modified sequence
atgatggggcaaaaccagacctccatctcagattttctcctgctgggtttgcctattcaaccagaacagcaaaacctgtgctatgccctctttctagcgatgtatcttacgactctgttgggtaacctacttattatcgttctgatccgcctggattcgcacctgcacactccagtgtacctgtttctatccaatttgtctttttccgatctgtgtttttcgagtgtgaccatgcccaagctcctccagaatatgcaaaatcaagatccttcgatcccatatgccgactgcctgactcagatgtactttttcttgtacttttcagatctggagtcgtttcttctcgtggcgatggcttatgacaggtacgtggccatctgttttcctatgcactatacagcaatctgcttcctgctccactacacggccattatgtctccaatgctctgtctgtctgttgtcgccctttcctgggtacttactactttccacgcaatgctccacacgttactgatggcaagactctgcttttgcgctgataatgtcataccccactttttttgcgacatgtcagctttgctaaaactcgcctgttccgatacccgtgtcaatgaatgggttatctttattatggggggcctaatcctggtgatccccttcttgctgatcctcggctcttatgctaggatcgtcagcagcatcttaaaggtgccaagttcgaagggaatatgcaaggctttcagcacttgcggaagccacctgtctgtagtctccctgttttacggtactgtcataggcttatacctgtgccctagcgcaaactccagcacccttaaagacaccgtcatggccatgatgtatacagtagttaccccaatgctgacgccattcatatattcgctccgaaaccgggatatgaaaggcgcgttggaaagggtgatctgcaagagaaagaacccatttctcttgtag

SEQ ID NO: 139006 - DNA, 972 bp, Artificial Sequence
  derived and/or modified sequence
atgatgggccagaaccagaccagcatcagtgacttcctgctgctgggcctgcccatccagcctgagcagcagaacctgtgctacgccctcttcctggccatgtacctgaccaccctgctgggcaacctgctgatcatcgtgctgatccggctggacagccacctgcacacccctgtgtacctgttcctgagcaacctgtccttcagtgacctgtgcttcagctctgtgaccatgcccaagctgctgcagaacatgcagaaccaggaccccagcatcccctatgctgactgcctgacccagatgtacttcttcctgtacttcagtgacctggagagcttcctgctggtggccatggcctatgacagatatgtggccatctgcttccccatgcactacacagccatctgcttcctgctgcactacacagccatcatgagccccatgctgtgcctgtctgtggtggccctgtcctgggtgctgaccaccttccacgccatgctgcacaccctgctgatggcccggctgtgcttctgtgccgacaacgtcatcccccacttcttctgtgacatgtctgccctgctgaagctggcctgcagcgacaccagggtgaatgagtgggtgatcttcatcatgggcggcctcatcctggtgatccccttcctgctgatcctgggcagctatgcccgcatcgtgagcagcatcctgaaggtgcccagcagcaagggcatctgcaaggccttcagcacctgtggcagccacctgtctgtggtgtccctcttctatggaacagtgattggcctgtacctgtgccccagcgccaacagcagcaccctgaaggacacagtgatggccatgatgtacacagtggtgacccccatgctgacccccttcatctacagcctgaggaacagagacatgaagggggccctggagagggtcatctgcaagaggaagaaccccttcctgctgtag

SEQ ID NO: 139007 - DNA, 972 bp, Artificial Sequence
  derived and/or modified sequence
atgatgggacaaaatcaaaccagcatctcagacttcctgctcctgggcctgcccatccaaccagagcagcaaaacctgtgctatgccctgttcttggccatgtatcttaccaccctcctggggaacctcctcatcattgtcctcattcgactggactcccatctccacacgcctgtgtatttgtttctcagcaacttgtccttctctgacctctgcttttcctcagtcacaatgcccaaattgctgcagaacatgcagaaccaagacccatccatcccctatgcagactgcctgacccaaatgtacttcttcttgtatttttcggatctagagagcttcctccttgtggccatggcctatgaccgctatgtggccatctgcttccccatgcactacaccgccatctgcttcctcctgcactacaccgccatcatgagccccatgctctgtctctccgtggtggcgctgtcctgggtgctgaccaccttccatgccatgttacacactttactcatggccaggttgtgtttttgtgcagacaatgtgatcccccactttttctgtgatatgtctgctctgctgaagctggcctgctctgacactcgagttaatgaatgggtgatatttatcatgggagggctcattcttgtcatcccattcctactcatccttgggtcctatgcaagaattgtctcctccatcctcaaggtcccttcttctaagggtatctgcaaggccttctctacttgtggctcccacctctctgtggtgtcactgttctatgggaccgttattggtctctacttatgcccatcagctaatagttctactctaaaggacactgtcatggctatgatgtacactgtggtgacccctatgctgacccccttcatctacagcctgaggaacagagacatgaagggagccctggaaagggtcatttgtaaaaggaaaaatcccttccttctatga

SEQ ID NO: 139008 - DNA, 972 bp, Artificial Sequence
  derived and/or modified sequence
atgatgggccagaaccagaccagcatcagcgacttcctgctgctggggttgccaattcagcccgaacagcagaatctatgctatgcactgttcttagccatgtatctgaccacgctcctgggaaacctgctcattattgtactcattagattggatagccacctgcacaccccagtctatctgtttctgtccaatctctccttcagcgacttgtgcttctctagcgttactatgcccaagctgttgcagaatatgcagaaccaggatcccagtatcccctatgccgactgcctgacacagatgtacttctttctttacttctccgatctcgagtccttcttacttgtcgctatggcttacgacagatatgttgcaatctgcttccctatgcactatactgctatttgttttctgctacattatacggccataatgagtccaatgctctgcctgagcgttgtggctttaagctgggtgctgactacctttcacgcaatgcttcacactctgctcatggctagactgtgcttctgtgctgacaacgtaattcctcactttttctgtgacatgtcggcgttacttaagctggcttgtagcgataccagagtgaacgagtgggtgatatttatcatgggaggactgattctcgtgatcccatttttactgatcctggggagttatgccagaatcgtgtctagtatcctgaaggtccccagctctaaggggatctgtaaggcattcagtacctgcggcagccacctatctgttgtttcacttttctacggtacggtcatcggactgtacctgtgcccttcggctaactccagtaccttgaaggacaccgtgatggccatgatgtacaccgtggtgacccccatgctgaccccatttatatactctctcaggaaccgcgacatgaagggcgccctggagcgcgtaatttgcaaacgtaaaaatcccttcttattgtag

SEQ ID NO: 139009 - DNA, 972 bp, Artificial Sequence
  derived and/or modified sequence
atgatgggccagaaccaaacctccatctctgacttccttctgttggggctgcccatccagccagagcagcagaacctgtgttatgctctgtttcttgcaatgtacttaacaaccctgctaggcaatctgctaattatagtgctgatccgcctggactcccacttgcatacccccgtctatctattcctgtcaaatctgagtttttcggatttgtgtttttcttcggttacaatgccaaaactccttcagaatatgcagaaccaggacccgagcatcccttatgcagactgtctgacacaaatgtattttttcctgtatttcagtgatctggagtctttcctgctggtggccatggcctacgaccggtacgtcgctatctgcttccccatgcactatacagctatatgcttcttgctccattatacggcgatcatgtcaccaatgttgtgcctctccgtagttgcactgtcatgggtgctcactactttccacgcaatgctccacaccctcctgatggccagactgtgtttttgtgccgataatgtcatcccccacttcttctgcgacatgtcagctctcttgaaactggcttgtagcgatacacgggtcaacgaatgggtcattttcataatgggcggactgatcttagtcattccgttcctgctgatcctgggctcttacgcgcgaatagtgtctagtatcctgaaggtgcccagcagtaaaggaatttgcaaagcgttcagcacctgtggctcccacctgtccgtcgtctccttattctacgggacggtgataggtttgtatctatgtccatcggccaattctagcactctgaaggacaccgtaatggctatgatgtatacagtggtgacgcccatgctgaccccatttatctacagccttaggaaccgggacatgaaaggagcactcgagagggtgatatgcaaaaggaagaacccttttcttctgtag

SEQ ID NO: 139010 - DNA, 903 bp, Artificial Sequence
  derived and/or modified sequence
atgggccagaaccagaccagcatcagcgacttcctgctgctgggcctgcccatccagcccgagcagcagaacctgtgctacgccctgttcctggccatgtacctgaccaccctgctgggcaacctgctgatcatcgtgctgatcagactggacagccacctgcacacccccgtgtacctgttcctgagcaacctgagcttcagcgacctgtgcttcagcagcgtgaccatgcccaagctgctgcagaacatgcagaaccaggaccccagcatcccctacgccgactgcctgacccagatgtacttcttcctgtacttcagcgacctggagagcttcctgctggtggccatggcctacgacagatacgtggccatctgcttccccatgcactacaccgccatcatgagccccatgctgtgcctgagcgtggtggccctgagctgggtgctgaccaccttccacgccatgctgcacaccctgctgatggccagactgtgcttctgcgccgacaacgtgatcccccacttcttctgcgacatgagcgccctgctgaagctggcctgcagcgacaccagagtgaacgagtgggtgatcttcatcatgggcggcctgatcctggtgatccccttcctgctgatcctgggcagctacgccagaatcgtgagcagcatcctgaaggtgcccagcagcaagggcatctgcaaggccttcagcacctgcggcagccacctgagcgtggtgagcctgttctacggcaccgtgatcggcctgtacctgtgccccagcgccaacagcagcaccctgaaggacaccgtgatggccatgatgtacaccgtggtgacccccatgctgacccccttcatctacagcctgagaaacagagacatgaagggcgccctgtag

SEQ ID NO: 139011 - DNA, 903 bp, Artificial Sequence
  derived and/or modified sequence
atggggcagaatcagacctctatatccgactttctcttgttaggcttgccaatacagcccgaacaacagaatctctgctatgcgctgttcctcgccatgtatttgaccaccttgctcggtaatctactcatcattgtcctgattaggttggactcccacctccacacaccagtgtatctgttcttatcgaacctttcgttttccgacctgtgtttctcatcagttaccatgcctaagttgctgcaaaacatgcagaatcaagatcctagcattccttatgccgactgtctaactcagatgtatttttttctgtatttctctgacctggaatctttcctgctggtagctatggcctatgatagatacgttgccatttgctttccgatgcactatactgccattatgtccccaatgctctgcttgtctgtcgtcgctctgagttgggttctaaccacatttcacgccatgctgcatacccttttaatggcccggctctgtttctgtgcagataatgtgatcccccacttcttctgtgatatgtcggcccttctgaagttggcctgctcagatacccgagtaaacgagtgggtgatctttattatggggggactcatactggtcattccttttttattgatcttgggctcctacgccagaattgtgagttcaatactgaaagtgccttcctcaaagggaatctgcaaggccttctcaacttgcggctcccatctaagtgttgtgtctctattttatggcaccgtcatcggcctctacctctgcccatctgccaactcctctacgctgaaggacactgtgatggctatgatgtacacagttgtgaccccaatgttaactccgttcatctatagcttaagaaatagggatatgaagggggccctgtag

SEQ ID NO: 139012 - DNA, 903 bp, Artificial Sequence
  derived and/or modified sequence
atgggccagaaccagaccagcatcagtgacttcctgctgctgggcctgcccatccagcctgagcagcagaacctgtgctacgccctcttcctggccatgtacctgaccaccctgctgggcaacctgctgatcatcgtgctgatccggctggacagccacctgcacacccctgtgtacctgttcctgagcaacctgtccttcagtgacctgtgcttcagctctgtgaccatgcccaagctgctgcagaacatgcagaaccaggaccccagcatcccctatgctgactgcctgacccagatgtacttcttcctgtacttcagtgacctggagagcttcctgctggtggccatggcctatgaccgctacgtggccatctgcttccccatgcactacacagccatcatgagccccatgctgtgcctgtctgtggtggccctgtcctgggtgctgaccaccttccacgccatgctgcacaccctgctgatggcccggctgtgcttctgtgccgacaacgtcatcccccacttcttctgtgacatgtctgccctgctgaagctggcctgcagcgacaccagggtgaatgagtgggtgatcttcatcatgggcggcctcatcctggtgatccccttcctgctgatcctgggcagctatgcccgcatcgtgagcagcatcctgaaggtgcccagcagcaagggcatctgcaaggccttcagcacctgtggcagccacctgtctgtggtgtccctcttctatggaacagtgattggcctgtacctgtgccccagcgccaacagcagcaccctgaaggacacagtgatggccatgatgtacacagtggtgacccccatgctgacccccttcatctacagcctgaggaacagagacatgaagggggccctgtag

SEQ ID NO: 139013 - DNA, 903 bp, Artificial Sequence
  derived and/or modified sequence
atgggccagaaccagaccagcatcagcgacttcctgctgctgggcttacctattcagccagaacagcagaatttgtgctacgccttatttctggcaatgtatctgaccacattgctggggaaccttcttatcattgtcctaatcaggcttgatagccatcttcacactcctgtgtatctttttctgtcgaatctctctttctctgacctttgtttcagctccgttaccatgcccaagctgctccagaacatgcaaaatcaagacccatcaatcccatacgccgattgtttaacacagatgtacttctttctttatttttccgacttggaaagcttcctgctggttgccatggcctacgaccggtatgtagctatttgtttccctatgcactacacagccattatgtcccccatgctgtgcttgtctgtcgtggccctgtcctgggttcttacaaccttccatgcaatgctgcacaccctactgatggctagactctgcttttgcgccgacaacgtgatcccccacttcttttgcgacatgtcggcactgctcaagttggcatgttccgacactcgcgtcaatgagtgggtcatatttattatgggggggctcatccttgtgatcccctttctacttatcttgggatcgtacgctcgcatcgtctccagcatcctcaaagtgccgtctagcaagggcatttgcaaggctttttccacctgtgggtcacatctttctgttgtctctctgttctacggaacagtgataggcctgtatctctgcccatcggcaaacagcagtaccctgaaggataccgtcatggcaatgatgtacaccgttgtgacacctatgctcacccccttcatatattcattacgcaaccgcgatatgaaaggcgcattgtag

SEQ ID NO: 139014 - DNA, 900 bp, Artificial Sequence
  derived and/or modified sequence
atgggacaaaatcaaaccagcatctcagacttcctgctcctgggcctgcccatccaaccagagcagcaaaacctgtgctatgccctgttcttggccatgtatcttaccaccctcctggggaacctcctcatcattgtcctcattcgactggactcccatctccacacgcctgtgtatttgtttctcagcaacttgtccttctctgacctctgcttttcctcagtcacaatgcccaaattgctgcagaacatgcagaaccaagacccatccatcccctatgcagactgcctgacccaaatgtacttcttcttgtatttttcggatctagagagcttcctccttgtggccatggcctatgaccgctatgtggccatctgcttccccatgcactacaccgccatcatgagccccatgctctgtctctccgtggtggcgctgtcctgggtgctgaccaccttccatgccatgttacacactttactcatggccaggttgtgtttttgtgcagacaatgtgatcccccactttttctgtgatatgtctgctctgctgaagctggcctgctctgacactcgagttaatgaatgggtgatatttatcatgggagggctcattcttgtcatcccattcctactcatccttgggtcctatgcaagaattgtctcctccatcctcaaggtcccttcttctaagggtatctgcaaggccttctctacttgtggctcccacctctctgtggtgtcactgttctatgggaccgttattggtctctacttatgcccatcagctaatagttctactctaaaggacactgtcatggctatgatgtacactgtggtgacccctatgctgacccccttcatctacagcctgaggaacagagacatgaagggagccctg

SEQ ID NO: 139015 - DNA, 903 bp, Artificial Sequence
  derived and/or modified sequence
atggggcaaaaccaaaccagtatttctgactttctgttactaggcctgcctatccagcccgaacagcagaatctgtgttacgctctttttctcgcaatgtacctgaccaccttgttaggtaatcttttaattattgtcttgattcggctcgactcacacctgcacacccccgtgtacctctttctgtccaacctaagtttctcagacctgtgcttttcatccgttaccatgcccaaattgttgcagaatatgcaaaatcaggatcctagcatcccgtacgctgactgcttaacccagatgtactttttcctatactttagcgatctcgagtcttttcttctggtggcaatggcatatgatcggtacgttgctatctgcttccccatgcattacaccgccatcatgtccccaatgctgtgcctgtccgtcgtggcactctcatgggtcctgaccaccttccacgccatgctccacactctgctgatggccagactctgtttttgcgcggataacgtgattccacactttttctgcgacatgagtgccctgcttaaacttgcctgttcagacactcgcgtaaacgagtgggtaatattcattatgggtggcctgattctggtgatccccttcctcctcatactgggctcctatgcacgcattgtgagctctattctgaaagtgccctcttctaaaggcatttgtaaagctttttctacttgcggcagtcacctaagtgtggtgtcactgttttacggcacagtgatcgggttgtacctctgtcctagcgcgaactcgtccacactgaaagataccgtaatggcgatgatgtacactgtcgtgactccaatgctgacacccttcatatactctctcaggaacagagatatgaaaggagccctgtag

SEQ ID NO: 139016 - protein, 549 aa, Artificial Sequence
  derived and/or modified sequence
MASASSGPSSSVGFSSFDPAVPSCTLSSASGIKRPMASEVPYASGMPIKKIGHRSVDSSGETTYKKTTSSALKGAIQLGITHTVGSLSTKPERDVLMQDFYVVESIFFPSEGSNLTPAHHYNDFRFKTYAPVAFRYFRELFGIRPDDYLYSLCSEPLIELCSSGASGSLFYVSSDDEFIIKTVQHKEAEFLQKLLPGYYMNLNQNPRTLLPKFYGLYCVQAGGKNIRIVVMNNLLPRSVKMHIKYDLKGSTYKRRASQKEREKPLPTFKDLDFLQDIPDGLFLDADMYNALCKTLQRDCLVLQSFKIMDYSLLMSIHNIDHAQREPLSSETQYSVDTRRPAPQKALYSTAMESIQGEARRGGTMETDDHMGGIPARNSKGERLLLYIGIIDILQSYRFVKKLEHSWKALVHDGDTVSVHRPGFYAERFQRFMCNTVFKKIPLKPSPSKKFRSGSSFSRRAGSSGNSCITYQPSVSGEHKAQVTTKAEVEPGVHLGRPDVLPQTPPLEEISEGSPIPDPSFSPLVGETLQMLTTSTTLEKLEVAESEFTH

SEQ ID NO: 139017 - DNA, 1650 bp, Artificial Sequence
  derived and/or modified sequence
atggcttccgccagttctggtccgagctcttctgtgggtttcagttcttttgaccctgctgtgccatcttgcactttaagcagtgcctccgggatcaagcggcccatggcctctgaggtcccatatgcatccggcatgcccattaagaaaatcggacaccgctccgtggattcaagcggggagactacatacaaaaagacgacatcttcggcattgaaaggagccatccagctaggtattactcatacggtgggctcactttcaactaaacccgaacgcgatgtcctgatgcaggacttctatgtggtggagtctatattctttcccagtgaagggagcaaccttacacctgcccaccactacaatgattttaggttcaaaacatacgcaccagtagcattcagatattttcgcgagctgttcggtatccgtcccgatgactacttgtactccttatgttctgagcccctgatagagctgtgtagttccggggcatcaggcagtttgttttacgtctccagcgacgacgaatttatcatcaagacagtgcagcataaagaggccgagtttcttcagaagctcctccctggttactatatgaacctgaatcaaaacccaaggaccctcctgcccaaattttacggcctctattgcgtacaggctggcgggaaaaacatccgtatcgtggtgatgaacaacctgctgcctcggtctgtgaagatgcatatcaaatacgatttaaagggcagcacctacaaaagacgtgcgtctcagaaggagcgggagaagccactgcccacgttcaaagatctggactttctgcaggatatccctgacggcttgttcctggacgcagatatgtataatgccctgtgcaagacacttcagcgcgactgccttgtgttgcaaagctttaagattatggattactccttgctaatgtctatccataacatcgaccatgcccagcgcgagcccctgtctagcgagacccagtacagtgtggatacaagacggccggcacctcagaaagccttatactccacagctatggaaagtattcagggtgaagctcgccggggcggcactatggagacagacgaccacatgggcgggattcctgctcggaactcgaaaggggaacggcttctgttgtatattgggataattgacatcctgcaatcctacaggttcgttaagaagttagaacactcttggaaggctttggtgcacgatggggatactgtgtccgtacacaggcctggcttttatgccgagcggttccagcgttttatgtgtaatactgtcttcaaaaaaatccccctaaagccgtccccatcaaaaaagttcaggagcggtagcagcttcagccgtcgagcgggatctagtggaaactcatgtattacatatcagccgtcagtgagcggggagcacaaagctcaggtgaccacaaaagccgaagtcgagccaggggttcacctggggaggcctgacgtgctgccgcagacaccacctctggaagaaattagcgagggtagtccaatcccagatcccagtttcagccccctggtcggagagacacttcagatgttgacaacttcaactactctggaaaaactggaggtggctgaaagtgagttcactcattag

SEQ ID NO: 139018 - DNA, 1650 bp, Artificial Sequence
  derived and/or modified sequence
atggccagcgccagcagcggccccagcagctctgtgggcttcagcagctttgatcctgctgtgcccagctgcaccctgagcagcgccagcggcatcaagaggcccatggccagcgaggtgccctatgccagcggcatgcccatcaagaagattggccacaggtctgtggacagcagtggagagaccacctacaagaagaccaccagcagcgccctgaagggggccatccagctgggcatcacccacacagtgggcagcctgagcaccaagccagagagagatgtgctgatgcaggacttctacgtggtggagagcatcttcttccccagcgagggcagcaacctgaccccagcccaccactacaatgacttccgcttcaagacctacgcccctgtggccttccgctacttccgggagctgtttggcatccggccagatgactacctgtacagcctgtgcagcgagcccctcatcgagctgtgcagcagcggggccagcggcagcctcttctacgtgtccagtgatgatgagttcatcatcaagacagtgcagcacaaggaggccgagttcctgcagaagctgctgcccggctactacatgaacctgaaccagaaccccaggaccctgctgcccaagttctacggcctgtactgtgtgcaggccggcggcaagaacatccgcatcgtggtgatgaacaacctgctgcccaggtctgtgaagatgcacatcaagtatgacctgaagggcagcacctacaagaggcgggccagccagaaggagcgggagaagcccctgcccaccttcaaggacctggacttcctgcaggacatcccagatggcctcttcctggatgctgacatgtacaatgccctgtgcaagaccctgcagagggactgcctggtgctgcagagcttcaagatcatggactacagcctgctgatgagcatccacaacatcgaccacgcccagcgggagcccctgagcagcgagacccagtacagcgtggacacccggcggcctgccccccagaaggccctgtacagcacagccatggagagcatccagggcgaggccaggagaggaggcaccatggagacagatgaccacatgggcggcatcccagccaggaacagcaaaggagagcggctgctgctgtacatcggcatcatcgacatcctgcagagctacagatttgtgaagaagctggagcacagctggaaggccctggtgcatgatggagacacagtgtctgtgcacaggcctggcttctatgcagagcgcttccagcgcttcatgtgcaacacagtgttcaagaagatccccctgaagcccagccccagcaagaagttccgcagcggcagcagcttcagccggcgggccggcagcagcggcaacagctgcatcacctaccagcccagcgtgtctggagagcacaaggcccaggtgaccaccaaggccgaggtggagcccggggtgcacctgggccgcccagatgtgctgccccagaccccacccctggaggagatcagcgagggcagccccatcccagaccccagcttcagccccctggtgggggagaccctgcagatgctgaccaccagcaccaccctggagaagctggaggtggccgagagcgagttcacccactag

SEQ ID NO: 139019 - DNA, 1650 bp, Artificial Sequence
  derived and/or modified sequence
atggccagcgccagcagcggccccagcagcagcgtgggcttcagcagctttgatcctgctgtacctagctgtaccctatccagcgcctccggcatcaaacggcccatggcctccgaggtgccctatgcttctgggatgccaatcaagaagatcggacacaggtccgtggactcctctggcgaaactacatacaagaagactacaagctctgcccttaagggagccatccagctgggcattactcacactgtgggcagcctcagcacaaagcccgagcgggacgtcctgatgcaggatttctacgtggtcgaaagtatcttctttcctagcgagggtagcaatttgactccggcacaccattacaacgattttagattcaagacttatgcccctgtcgcttttcggtattttcgagagctgtttggaattcgcccagatgattatctgtactcgctttgtagcgagcccctcatagagttatgcagttccggagccagcggatccctattttatgtctcttctgatgatgagttcattatcaaaaccgtacagcacaaggaggccgagtttctccagaaactcctccccggctactatatgaatctaaatcagaatccacggactctgcttccgaagttctatggattgtattgcgtgcaggcaggaggtaagaatatacgcatcgtggtgatgaacaacttattgccccggtcagttaaaatgcacatcaagtacgacttaaagggcagcacatataagagacgggccagtcagaaagaaagagaaaagccactccctacatttaaggatcttgacttcctgcaggacatccctgacggactgttcttggacgccgacatgtacaatgcactgtgcaagactctacaacgggactgcctggtccttcaatctttcaaaataatggactacagcttgttaatgagtatacacaacatcgaccacgcacagcgggaaccactctcaagtgaaacccagtatagcgttgataccagaagacctgctccccaaaaagctctctactcaacagcaatggagtccattcagggggaggccagacggggaggtaccatggagaccgatgatcacatgggtggaataccggcccgaaatagcaagggagaacggctgctcctgtacataggcatcatcgacattcttcaatcttatcgattcgttaagaagctggaacactcttggaaggcactggtccacgatggcgacaccgttagtgtacaccgacctggattctacgccgagagattccagaggttcatgtgtaacaccgtatttaaaaagatcccactgaaaccctccccaagcaagaaattcaggtccgggagctcattcagccgccgcgcaggctcttccggaaattcatgcattacctatcagccctcagtaagtggggagcataaggcccaggtaacaacaaaagcagaggtcgagccaggtgtccatctgggccgtcctgatgtgttgccgcagactccacccttggaggagatttctgaaggctcccccatccctgacccatccttctctccactggtgggggagaccctgcaaatgcttaccacatctactactttggagaaactagaagtagcggaatccgagttcactcactag

SEQ ID NO: 139020 - DNA, 3767 bp, Artificial Sequence
  derived and/or modified sequence
ggattttttgcttggctacccggagtgaagcggccgggttgggcgattaacaggccgtggttaggaaggacggagaaggggcgttcgctcctttgggacttttcatgcctcgtttttttttcagatgtggcttggtctgggcgcaaggtcccagcagccagcttaagcttactcttctgtgaaaggggaaagtatcccctgtggaaagcggttaaacttgtggagggggtgcgggacgtgagttcttccccatgccaggcgaatggtgtggccttgagctggtccaggagccggctcgacgtgtctgagggaggccccggagggggcggggaggtggcccacagaacgcgggttctgtaaagagacgttgggaagattcgattccgagaagaggaagaaccggattgaaagagagccaggccgctgagggggagggggctgctaagatggcgtcggcctcctccgggccgtcgtcttcggtcggtttttcatcctttgatcccgcggtcccttcctgtaccttgtcctcagcatctggaatcaagagacccatggcatctgaggtgccttatgcctctggcatgcccatcaagaaaataggccatagaagtgttgattcctcaggagagacaacatataaaaagacaacctcatcagccttgaaaggtgccatccagttaggcattacccacactgtggggagcctgagtaccaaaccagagcgtgatgtcctcatgcaagatttctacgtggttgagagtatcttctttcccagtgaagggagcaacctgacccctgctcatcactacaatgactttcgtttcaagacctatgcacctgttgccttccgctacttccgggagctatttggtatccggcccgatgattacttgtattccctctgcagtgagccgctgattgaactctgtagctctggagctagtggttccctattctatgtgtccagcgacgatgagttcattattaagacagtccaacataaagaggcggaatttctgcagaagctgcttccaggatactacatgaacctcaaccagaaccctcggactttgctgcctaaattctatggactgtactgtgtgcaggcaggtggcaagaacattcggattgtggtgatgaacaatcttttaccaagatcggtaaaaatgcatatcaaatatgacctcaaaggctcaacctacaaacggcgggcttcccagaaagagcgagagaagcctcttcccacatttaaagacctagacttcttacaagacatccctgatggtctttttttggatgctgacatgtacaacgctctctgtaagaccctgcagcgtgactgtttggtgctgcagagcttcaagataatggattacagcctcttgatgtcaatccataatatagatcatgcacaacgagagcccttaagcagtgaaacacagtactcagttgatactcgaagaccggccccccaaaaggctctgtattccacagccatggaatccatccagggagaggctcgacggggtggtaccatggagactgatgaccatatgggtggcatccctgcccggaatagtaaaggggaaaggcttctgctttatattggcatcattgacattctacagtcttacaggtttgttaagaagttggagcactcttggaaagccctggtacatgacggagacactgtctcagtgcatcgcccaggcttctacgctgaacggttccagcgcttcatgtgcaacacagtatttaagaagattcccttgaagccttctccttccaaaaagtttcggtctggctcatctttctctcggcgagcaggctccagtggcaactcctgcattacttaccagccatcggtctctggggaacacaaggcacaagtgacaacaaaggcagaagtggagccaggcgttcaccttggtcgtcctgatgttttacctcagactccacctttggaggaaatcagtgagggctcgcctattcctgaccccagtttctcacctctagttggagagactttgcaaatgctaactacaagtacaaccttggaaaagcttgaagttgcagagtcagagttcacccattaagcgcaaagcctcagaagacctggaacaagattctgccatctctgtgatcccaagatgtcagcccttgccccagcaatgctgaattttcttctacttggtcatcaaaaaaggagtgtaatagaagtgaggggagctgctcctccatcttcttcctgaagaagaaccttctctccttcctcttcctcatgaatgggccttagtgcctcagagagttgaggaccgcagcatcccctccactccagagttgggtggtatggattttcaactggccaaccctttgcctccactattgaatttttttcagacccccattcttcatgctggaaatgggattgctggacttggcagctttctttcccctcgtctttgactaggaaccggactcttaatttcctcaggacagactagctggcacattatccctaccttagttctttctctctgactcctggaagaatactcctgtaatctctgtaaaggtttttgggggataagggtgtttaaccacctcccagctttcttcttctttttttttttctgaaaaaaggaaaaagcacacagcacacaatttcaagccattttcagatcagaactccagaagtgttgacaagatgcctattcgtagagttccctcagaagagccatggtgtttatgaagagaagagtagtgattgctctgccagaagcagctcctctttaaactcctcctctcttgatgaatttcttaaggctgaaggaatgaagagagtgggacatggggtaatctttatcccttttgttaaaacaggaggcagccatgggctgggagatcatagcccttcctaggcagaatcctgttcactgccaggctatagtaattattactattttgcaatttgaaatatattctggttgtttttctaaatgtgaagacttaccaaatgaattttagatcattctccagaggagattttttttgctcttctcatcttttccaacagtgttctcctgtttgtggagctaaggtaaagaggggacacttctgtctgtttaacagacagtccatatctgtgaggccagcaaatattttcttaaactcatggggagacagcagattcttgccttggtgaggtcattgctgtgccatatgtcctacccccctgtcttcatgcagggaagttggaaatgggggctacatatgccctctcctccccgtctacaagagttgtggttttccatctgatccttccactcttgtcaggggaagaagggggcctggtatctcaggcagattgttgaattcctgttctatcccttctctatcccaccctgccttgataatatgttagcccataccccaaataactgtctatattagacacccccagccagtttctggctgcctgtctttgctgccatgttttttacaagaaggaaagaattcttgctatttttttttcataatttactatttatgatgtatttaagtgttttattaaggacagagttctgttaggggtgggagggaatatttgagggagggctgggtcttagggaaaggaatggggaagcaacatttttattaagtgttactatttgcctctactttgtattgttcagaaatggcaaatacaatataaaagtgatatatggttttaatgtaataaactttaatgagttatttagacctct

SEQ ID NO: 139021 - DNA, 1650 bp, Artificial Sequence
  derived and/or modified sequence
atggcatctgcttcatctgggccaagctcgtctgtagggttttcctcttttgaccccgcagtaccaagctgtactttatcgagcgcctctggtattaagaggccaatggcttctgaagtgccatacgcaagcggaatgccaattaagaagatcggacacagaagcgtggattccagcggagaaactacttacaaaaaaactaccagttcagccctgaagggcgctattcagctgggaatcacccataccgtcgggtccctgtccactaagccagaacgagatgtgctaatgcaggacttttatgtggtggaatccatattctttcctagcgagggctccaatttgacccctgcccaccattacaatgacttcaggtttaaaacctatgctcccgtcgcctttaggtatttccgtgagctgtttggtattcggcctgatgattacctgtacagtttgtgctcagagccactgatcgaattgtgtagttctggggcatcaggtagtctgttctatgtgtcctccgacgatgagttcataattaaaaccgttcaacacaaggaggctgaatttttgcagaagctgctcccaggctactatatgaatttgaaccaaaaccctcggacgttgctgccaaagttctacggcctatactgcgtccaagccggtggcaaaaacatacgcattgtggtgatgaacaatctgctcccaagatccgtcaagatgcacatcaaatatgacctgaagggttctacatataaacgccgtgcatcacagaaggagagggaaaaacctttgccaacttttaaggatctagacttcctacaggacatccccgatggcctctttctcgacgccgacatgtacaatgcactgtgcaaaactctccagcgcgattgcctagtactgcagagctttaaaatcatggactacagcttactgatgtccatccataatattgatcacgcacaacgggaaccactgagctccgagacccaatacagtgtagatacacgtcgtccagcaccccaaaaagctctctacagcactgcaatggaatccatccaaggagaggccagaagggggggaaccatggagacagacgaccatatgggcggaatcccagcgagaaattccaagggggagcgtcttttgctgtacattggcatcatagacatcttgcagtcatataggttcgtcaagaagctggagcacagctggaaagccctggtccacgacggcgataccgtcagcgtgcacagaccgggattctatgcagagcggtttcagagatttatgtgcaacactgttttcaaaaaaattccactgaagccaagtccatcaaaaaagttcagaagcggcagttccttctcccgcagggcagggtcaagcggtaacagttgtatcacgtatcagccctctgtgtccggcgagcataaggcacaagttactactaaggccgaagtggagccaggagtacatctgggtaggccagacgtcctccctcagacaccaccactggaggagataagtgagggctcaccaatacctgacccatccttctcaccccttgtgggagagaccctacagatgctgactactagcactactttagagaagctggaggtggctgagtcagagttcacacactag

SEQ ID NO: 139022 - DNA, 1650 bp, Artificial Sequence
  derived and/or modified sequence
atggccagcgccagcagcggccccagcagcagcgtgggcttcagcagcttcgaccccgccgtgcccagctgcaccctgagcagcgccagcggcatcaagagacccatggccagcgaggtgccctacgccagcggcatgcccatcaagaagatcggccacagaagcgtggacagcagcggcgagaccacctacaagaagaccaccagcagcgccctgaagggcgccatccagctgggcatcacccacaccgtgggcagcctgagcaccaagcccgagagagacgtgctgatgcaggacttctacgtggtggagagcatcttcttccccagcgagggcagcaacctgacccccgcccaccactacaacgacttcagattcaagacctacgcccccgtggccttcagatacttcagagagctgttcggcatcagacccgacgactacctgtacagcctgtgcagcgagcccctgatcgagctgtgcagcagcggcgccagcggcagcctgttctacgtgagcagcgacgacgagttcatcatcaagaccgtgcagcacaaggaggccgagttcctgcagaagctgctgcccggctactacatgaacctgaaccagaaccccagaaccctgctgcccaagttctacggcctgtactgcgtgcaggccggcggcaagaacatcagaatcgtggtgatgaacaacctgctgcccagaagcgtgaagatgcacatcaagtacgacctgaagggcagcacctacaagagaagagccagccagaaggagagagagaagcccctgcccaccttcaaggacctggacttcctgcaggacatccccgacggcctgttcctggacgccgacatgtacaacgccctgtgcaagaccctgcagagagactgcctggtgctgcagagcttcaagatcatggactacagcctgctgatgagcatccacaacatcgaccacgcccagagagagcccctgagcagcgagacccagtacagcgtggacaccagaagacccgccccccagaaggccctgtacagcaccgccatggagagcatccagggcgaggccagaagaggcggcaccatggagaccgacgaccacatgggcggcatccccgccagaaacagcaagggcgagagactgctgctgtacatcggcatcatcgacatcctgcagagctacagattcgtgaagaagctggagcacagctggaaggccctggtgcacgacggcgacaccgtgagcgtgcacagacccggcttctacgccgagagattccagagattcatgtgcaacaccgtgttcaagaagatccccctgaagcccagccccagcaagaagttcagaagcggcagcagcttcagcagaagagccggcagcagcggcaacagctgcatcacctaccagcccagcgtgagcggcgagcacaaggcccaggtgaccaccaaggccgaggtggagcccggcgtgcacctgggcagacccgacgtgctgccccagaccccccccctggaggagatcagcgagggcagccccatccccgaccccagcttcagccccctggtgggcgagaccctgcagatgctgaccaccagcaccaccctggagaagctggaggtggccgagagcgagttcacccactag

SEQ ID NO: 139023 - protein, 416 aa, Artificial Sequence
  derived and/or modified sequence
MSSNCTSTTAVAVAPLSASKTKTKKKHFVCQKVKLFRASEPILSVLMWGVNHTINELSNVPVPVMLMPDDFKAYSKIKVDNHLFNKENLPSRFKFKEYCPMVFRNLRERFGIDDQDYQNSVTRSAPINSDSQGRCGTRFLTTYDRRFVIKTVSSEDVAEMHNILKKYHQFIVECHGNTLLPQFLGMYRLTVDGVETYMVVTRNVFSHRLTVHRKYDLKGSTVAREASDKEKAKDLPTFKDNDFLNEGQKLHVGEESKKNFLEKLKRDVEFLAQLKIMDYSLLVGIHDVDRAEQEEMEVEERAEDEECENDGVGGNLLCSYGTPPDSPGNLLSFPRFFGPGEFDPSVDVYAMKSHESSPKKEVYFMAIIDILTPYDTKKKAAHAAKTVKHGAGAEISTVNPEQYSKRFNEFMSNILT

SEQ ID NO: 139024 - protein, 277 aa, Artificial Sequence
  derived and/or modified sequence
MSSNCTSTTAVAVAPLSASKTKTKKKHFVCQKVKLFRASEPILSVLMWGVNHTINELSNVPVPVMLMPDDFKAYSKIKVDNHLFNKENLPSRFKFKEYCPMVFRNLRERFGIDDQDYQNSVTRSAPINSDSQGRCGTRFLTTYDRRFVIKTVSSEDVAEMHNILKKYHQFIVECHGNTLLPQFLGMYRLTVDGVETYMVVTRNVFSHRLTVHRKYDLKGSTVAREASDKEKAKDLPTFKDNDFLNEGQKLHVGEESKKNFLEKLKRDVEEILVLSPG

SEQ ID NO: 139025 - DNA, 1251 bp, Artificial Sequence
  derived and/or modified sequence
atgagcagcaactgcaccagcaccaccgccgtggccgtggcccccctgagcgccagcaagaccaagaccaagaagaagcacttcgtgtgccagaaggtgaagctgttcagagccagcgagcccatcctgagcgtgctgatgtggggcgtgaaccacaccatcaacgagctgagcaacgtgcccgtgcccgtgatgctgatgcccgacgacttcaaggcctacagcaagatcaaggtggacaaccacctgttcaacaaggagaacctgcccagcagattcaagttcaaggagtactgccccatggtgttcagaaacctgagagagagattcggcatcgacgaccaggactaccagaacagcgtgaccagaagcgcccccatcaacagcgacagccagggcagatgcggcaccagattcctgaccacctacgacagaagattcgtgatcaagaccgtgagcagcgaggacgtggccgagatgcacaacatcctgaagaagtaccaccagttcatcgtggagtgccacggcaacaccctgctgccccagttcctgggcatgtacagactgaccgtggacggcgtggagacctacatggtggtgaccagaaacgtgttcagccacagactgaccgtgcacagaaagtacgacctgaagggcagcaccgtggccagagaggccagcgacaaggagaaggccaaggacctgcccaccttcaaggacaacgacttcctgaacgagggccagaagctgcacgtgggcgaggagagcaagaagaacttcctggagaagctgaagagagacgtggagttcctggcccagctgaagatcatggactacagcctgctggtgggcatccacgacgtggacagagccgagcaggaggagatggaggtggaggagagagccgaggacgaggagtgcgagaacgacggcgtgggcggcaacctgctgtgcagctacggcaccccccccgacagccccggcaacctgctgagcttccccagattcttcggccccggcgagttcgaccccagcgtggacgtgtacgccatgaagagccacgagagcagccccaagaaggaggtgtacttcatggccatcatcgacatcctgaccccctacgacaccaagaagaaggccgcccacgccgccaagaccgtgaagcacggcgccggcgccgagatcagcaccgtgaaccccgagcagtacagcaagagattcaacgagttcatgagcaacatcctgacctag

SEQ ID NO: 139026 - DNA, 834 bp, Artificial Sequence
  derived and/or modified sequence
atgagcagcaactgcaccagcaccaccgccgtggccgtggcccccctgagcgccagcaagaccaagaccaagaagaagcacttcgtgtgccagaaggtgaagctgttcagagccagcgagcccatcctgagcgtgctgatgtggggcgtgaaccacaccatcaacgagctgagcaacgtgcccgtgcccgtgatgctgatgcccgacgacttcaaggcctacagcaagatcaaggtggacaaccacctgttcaacaaggagaacctgcccagcagattcaagttcaaggagtactgccccatggtgttcagaaacctgagagagagattcggcatcgacgaccaggactaccagaacagcgtgaccagaagcgcccccatcaacagcgacagccagggcagatgcggcaccagattcctgaccacctacgacagaagattcgtgatcaagaccgtgagcagcgaggacgtggccgagatgcacaacatcctgaagaagtaccaccagttcatcgtggagtgccacggcaacaccctgctgccccagttcctgggcatgtacagactgaccgtggacggcgtggagacctacatggtggtgaccagaaacgtgttcagccacagactgaccgtgcacagaaagtacgacctgaagggcagcaccgtggccagagaggccagcgacaaggagaaggccaaggacctgcccaccttcaaggacaacgacttcctgaacgagggccagaagctgcacgtgggcgaggagagcaagaagaacttcctggagaagctgaagagagacgtggaggagatcctggtgctgagccccggctag

SEQ ID NO: 139027 - DNA, 1251 bp, Artificial Sequence
  derived and/or modified sequence
atgagcagcaactgtacttcaaccacagcagttgcagttgctcctctttctgcctctaagactaagacgaagaagaagcatttcgtatgccagaaggtaaagctgttcagagcttctgaacctatcctgagtgtgttgatgtggggtgtgaaccacactattaatgaactgtccaatgttccagtccccgtaatgctaatgcccgatgactttaaagcctacagcaagataaaggtggacaaccatctgttcaacaaggagaacttaccgtcacgctttaaattcaaagaatactgtcctatggtgtttagaaaccttcgggaacggttcggaattgatgatcaggactaccaaaatagcgtcacacggtcagcacctatcaactctgacagccagggtcgctgcggcaccaggttccttaccacgtacgatcgccggtttgtgattaagactgtaagctctgaggacgtagccgagatgcacaacattctgaaaaaatatcaccagtttatcgtggagtgccacgggaacacactattaccccagttcctcggaatgtacagacttaccgtggatggggtcgagacttatatggtggttactagaaacgtgttctcccatcgactgaccgtgcacaggaaatatgatttgaagggttccaccgttgcacgggaggcctcagacaaagagaaggctaaggacctccccacatttaaggataatgactttttgaatgaaggccagaaacttcacgtgggagaagaatctaagaaaaattttctggaaaaactcaaaagagatgttgaatttttagcacagctgaagatcatggattactctttgttggtcggtatccatgacgtagacagggcagaacaggaagaaatggaggtggaggagcgggccgaggacgaggagtgtgaaaatgacggggtggggggaaaccttttgtgtagctacgggacccccccggacagccctgggaacctgttgagctttcccaggttctttggacctggggagtttgacccctcggtggatgtgtacgcaatgaagtcacatgagtcctccccaaagaaagaggtgtatttcatggccatcatagacattcttaccccctatgacaccaagaagaaggccgcacatgccgcaaaaacggttaaacacggggctggggccgagatctcaacagtgaacccagagcagtatagcaagcgctttaacgaattcatgagtaacatccttacctag

SEQ ID NO: 139028 - DNA, 834 bp, Artificial Sequence
  derived and/or modified sequence
atgtcatcgaattgcacaagtaccacagcagtggccgtcgctcctttgtctgcctcaaaaaccaaaaccaaaaagaagcactttgtctgtcagaaagtgaagctcttccgcgcatcagagcccattttgagtgtgctcatgtggggggtgaatcataccattaatgagctgtcaaacgtccccgtacctgtgatgctgatgccggatgatttcaaagcctattctaagataaaggtggacaaccaccttttcaataaggagaacctaccttctaggttcaaatttaaggagtattgcccaatggtcttccgaaatctcagggagaggttcggcatcgatgaccaagattatcaaaactctgttacaaggagtgcacctatcaactcagacagtcagggccgctgtggtactcgttttcttacgacatatgatcggcgattcgtaatcaagactgtcagctcagaggacgtcgcagaaatgcacaacattctgaagaaatatcaccaattcatcgtggaatgtcacggcaacaccctcctgccacaatttcttgggatgtaccgcctaacagttgatggtgtagagacctatatggtcgttactagaaacgtctttagccaccgcctcaccgtccaccgcaaatatgacctcaaaggaagcacagtggcccgcgaggccagcgataaagagaaagccaaggatctgcctaccttcaaggataatgactttttgaatgaaggccagaagctgcacgtcggcgaagagtctaaaaagaactttctcgaaaagttgaagagagacgtcgaggaaatcctggttttgtcgcctgggtag

SEQ ID NO: 139029 - DNA, 1251 bp, Artificial Sequence
  derived and/or modified sequence
atgagcagcaactgcaccagcaccacagctgtggccgtggcccccctgagcgccagcaagaccaagaccaagaagaagcactttgtgtgccagaaggtgaagctgttccgggccagcgagcccatcctgtctgtgctgatgtggggcgtgaaccacaccatcaatgagctgagcaatgtgcctgtgcctgtgatgctgatgccagatgacttcaaggcctacagcaagatcaaggtggacaaccacctgttcaacaaggagaacctgcccagccgcttcaagttcaaggagtactgccccatggtgttcaggaacctgcgggagcgcttcggcattgatgaccaggactaccagaacagcgtgaccaggtctgcccccatcaacagcgacagccagggccgctgtggcacccgcttcctgaccacctatgacagaagatttgtgatcaagacagtgtccagtgaagatgtggccgagatgcacaacatcctgaagaagtaccaccagttcatcgtggagtgccacggcaacaccctgctgccccagttcctgggcatgtaccgcctgactgtggatggagtggagacctacatggtggtgaccagaaatgtgttcagccaccggctgactgtgcacaggaaatatgacctgaagggcagcacagtggcccgggaggccagtgacaaggagaaggccaaggacctgcccaccttcaaggacaatgacttcctgaatgaaggccagaagctgcacgtgggggaggagagcaagaagaacttcctggagaagctgaagagagatgtggagttcctggcccagctgaagatcatggactacagcctgctggtgggcatccatgatgtggacagagctgagcaggaggagatggaggtggaggagcgggcagaagatgaggagtgtgaaaatgatggagtgggcggcaacctgctgtgcagctatggcaccccaccagacagccctggcaacctgctgtccttcccccgcttctttggacctggagaatttgaccccagcgtggatgtgtatgccatgaagagccatgagagcagccccaagaaggaggtgtacttcatggccatcatcgacatcctgaccccctatgacaccaagaagaaggccgcccatgctgccaagacagtgaagcatggagctggagctgagatcagcacagtgaaccctgagcagtacagcaagcgcttcaatgagttcatgagcaacatcctgacctag

SEQ ID NO: 139030 - DNA, 834 bp, Artificial Sequence
  derived and/or modified sequence
atgagcagcaactgcaccagcaccacagctgtggccgtggcccccctgagcgccagcaagaccaagaccaagaagaagcactttgtgtgccagaaggtgaagctgttccgggccagcgagcccatcctgtctgtgctgatgtggggcgtgaaccacaccatcaatgagctgagcaatgtgcctgtgcctgtgatgctgatgccagatgacttcaaggcctacagcaagatcaaggtggacaaccacctgttcaacaaggagaacctgcccagccgcttcaagttcaaggagtactgccccatggtgttcaggaacctgcgggagcgcttcggcattgatgaccaggactaccagaacagcgtgaccaggtctgcccccatcaacagcgacagccagggccgctgtggcacccgcttcctgaccacctatgacagaagatttgtgatcaagacagtgtccagtgaagatgtggccgagatgcacaacatcctgaagaagtaccaccagttcatcgtggagtgccacggcaacaccctgctgccccagttcctgggcatgtaccgcctgactgtggatggagtggagacctacatggtggtgaccagaaatgtgttcagccaccggctgactgtgcacaggaaatatgacctgaagggcagcacagtggcccgggaggccagtgacaaggagaaggccaaggacctgcccaccttcaaggacaatgacttcctgaatgaaggccagaagctgcacgtgggggaggagagcaagaagaacttcctggagaagctgaagagagatgtggaggagatcctggtgctgagccctggatag

SEQ ID NO: 139031 - DNA, 1251 bp, Artificial Sequence
  derived and/or modified sequence
atgagcagcaactgcaccagcaccaccgccgtggccgtggcccccctgagcgcatctaaaacgaaaacaaagaagaagcattttgtttgccaaaaggtgaaattgttcagggcttccgagccaatcctgtcagtgctgatgtggggtgttaatcacactattaacgagctcagcaatgtgcccgtacccgtgatgctgatgccggatgacttcaaagcttacagcaaaattaaagttgataaccatctatttaacaaggagaacctgcccagcagatttaagtttaaggagtattgccctatggtgttcagaaatcttcgtgaacggttcggaatcgacgaccaggattatcagaactcagtcacacgcagcgctcccataaatagcgatagccagggtcgctgcggaactagatttctgacaacgtacgaccgacgctttgtaataaaaacggttagctccgaagatgttgccgaaatgcataatatcctcaagaagtaccatcagttcattgtggagtgtcatgggaatactcttctgccacagtttctagggatgtataggctgactgtagatggtgtagaaacttatatggtagttacgaggaatgtgtttagccaccgtctgactgtgcatcggaaatatgacctgaaaggcagtacagtggcacgggaggcaagtgataaggagaaggctaaggacctgcccacctttaaggacaatgactttctcaacgagggacagaagttgcacgtaggcgaggaaagcaaaaagaattttctcgagaagctgaaacgcgatgtggaattcctggcccagctcaagattatggattactcacttctggtgggaattcatgacgtggacagggcagagcaggaagagatggaggtggaggaaagagccgaggacgaggaatgtgagaatgatggtgttggtgggaatttgctttgtagttacggcacccctcccgatagcccaggtaatcttttgagctttcctagattctttggacctggtgaatttgacccatcggtggacgtctacgctatgaaatcacatgaatcatcgccgaagaaggaggtgtactttatggctattattgacattctaactccctatgacaccaaaaaaaaggccgcccatgccgctaagaccgttaaacatggtgccggagccgagatcagcaccgtgaatcccgagcaatactccaaacggtttaatgagttcatgtctaacatactgacttag

SEQ ID NO: 139032 - DNA, 834 bp, Artificial Sequence
  derived and/or modified sequence
atgagcagcaactgcaccagcaccaccgccgtggccgtggcccccctgtccgccagcaaaacaaagactaaaaagaaacatttcgtctgccaaaaagtgaaactcttccgggcctccgagccaatactttccgtgctcatgtggggggttaatcacaccatcaacgagctttccaacgtgcccgtccctgtcatgctgatgccagacgactttaaggcatattcgaaaattaaagtggacaaccatctctttaacaaagaaaatcttcctagcagattcaagtttaaagagtattgcccaatggtgttcaggaaccttcgcgaacgcttcgggatagatgaccaggactaccagaactcagtgacccgtagcgctcctattaatagcgactctcagggacggtgcgggacacggtttctgacaacttatgaccgcagatttgtgatcaaaacagtctcctctgaagatgtggccgagatgcataacattctcaagaagtatcatcagtttattgttgagtgtcatggcaacacactgctgccacagttcctggggatgtaccggttaacagttgacggggtggaaacctacatggtggtcacgagaaacgttttctcccacagactgacagtgcacagaaaatacgatctgaaagggtctaccgttgctagggaagcctcagacaaggagaaggccaaggatctcccaacttttaaagataatgattttctgaacgagggccagaagttacacgtcggcgaggagagtaagaaaaactttctggaaaagctcaagcgagatgtagaggagatcttggtgctgtcgccaggctag

SEQ ID NO: 139033 - DNA, 5734 bp, Artificial Sequence
  derived and/or modified sequence
ttgcgggaaagagccaaaccctggcgttggggggcccgggcggggagcccctcccgcggtccacagcgacgcctgcccagccctcctccccttccggctccggcacggggccccgaggcgttcggaggccaggcgggtttctgtcaggcccggggaggaggggcgggcggggcggccgctgcctccccgggacgggccgtaccacgcggacggggaggacggggccaggggactgcagggcggctgcaccgcccgggggcggggtgcggagcgggccggcgggctccccggggcggggcgggagggcggggcgtggggcggacggaaccaccggggcggggtgggaggtaacgggacgggcgcgaccatggcgcggtgagggagcgggggtggggatcggtccgggggaggcctgaggccgctggcttgtgcgctgtctccgccgcccccctctttcgccgccgccgccgccgccccgggcatgtcgtccaactgcaccagcaccacggcggtggcggtggcgccgctcagcgccagcaagaccaagaccaagaagaagcatttcgtgtgccagaaagtgaagctattccgggccagcgagccgatcctcagcgtcctgatgtggggggtgaaccacacgatcaatgagctgagcaatgttcctgttcctgtcatgctaatgccagatgacttcaaagcctacagcaagatcaaggtggacaatcatctcttcaataaggagaacctgcccagccgctttaagtttaaggagtattgccccatggtgttccgaaaccttcgggagaggtttggaattgatgatcaggattaccagaattcagtgacgcgcagcgcccccatcaacagtgacagccagggtcggtgtggcacgcgtttcctcaccacctacgaccggcgctttgtcatcaagactgtgtccagcgaggacgtggcggagatgcacaacatcttaaagaaataccaccagtttatagtggagtgtcatggcaacacgcttttgccacagttcctgggcatgtaccgcctgaccgtggatggtgtggaaacctacatggtggttaccaggaacgtgttcagccatcggctcactgtgcatcgcaagtatgacctcaagggttctacggttgccagagaagcgagcgacaaggagaaggccaaggacttgccaacattcaaagacaatgacttcctcaatgaagggcagaagctgcatgtgggagaggagagtaaaaagaacttcctggagaaactgaagcgggacgttgagttcttggcacagctgaagatcatggactacagcctgctggtgggcatccacgacgtggaccgggcagagcaggaggagatggaggtggaggagcgggcagaggacgaggagtgtgagaatgatggggtgggtggcaacctactctgctcctatggcacacctccggacagccctggcaacctcctcagctttcctcggttctttggtcctggggaattcgacccctctgttgacgtctatgccatgaaaagccatgaaagttcccccaagaaggaggtgtatttcatggccatcattgatatcctcacgccatacgatacaaagaagaaagctgcacatgctgccaaaacggtgaaacacggggcaggggccgagatctcgactgtgaaccctgagcagtactccaaacgcttcaacgagtttatgtccaacatcctgacgtagttctcttctaccttcagccagagccagagagctggatatggggtcggggatcgggagttagggagaagggtgtatttgggctagatgggagggtgggagcagagtcgggtttgggagggctttagcaatgagactgcagcctgtgacaccgaaagagactttagctgaagaggagggggatgtgctgtgtgtgcacctgctcacaggatgtaaccccaccttctgcttacccttgattttttctccccatttgacacccaggttaaaaaggggttccctttttggtaccttgtaaccttttaagataccttggggctagagatgacttcgtgggtttatttgggttttgtttctgaaatttcattgctccaggtttgctatttataatcatatttcatcagcctacccaccctccccatctttgctgagctctcagttcccttcaattaaagagatacccggtagacccagcacaagggtccttccagaaccaagtgctatggatgccagattggagaggtcagacacctcgccctgctgcatttgctcttgtctggattaactttgtaatttatggagtattgtgcacaacttcctccacctttcccttggattcaagtgaaaactgttgcattattcctccatcctgtctggaatacaccaggtcaacaccagagatctcagatcagaatcagagatctcagaggggaataagttcatcctcatgggatggtgaggggcaggaaagcggctgggctcttggacacctggttctcagagaaccctgtgatgatcacccaagccccaggctgtcttagcccctggagttcagaagtcctctctgtaaagcctgcctcccactaggtcaagaggaactagagtacctttggatttatcaggaccctcatgtttaaatggttatttccctttgggaaaacttcagaaactgatgtatcaaatgaggccctgtgccctcgatctatttccttcttccttctgacctcctcccaggcactcttacttctagccgaactcttagctctgggcagatctccaagcgcctggagtgctttttagcagagacacctcgttaagctccgggatgaccttgtaggagatctgtctccctgtgcctggagagttacagccagcaaggtgcccccatcttagagtgtggtgtccaaacgtgaggtggcttcctagttacatgaggatgtgatccaggaaatccagtttggaggcttgatgtgggttttgacctggcctcagccttggggctgtttttccttgttgccccgctctagacttttagcagatctgcagcccacaggcttttttggaaggagtggcttcctgcaggtgttccacctgccttcggagcctgccacccaggccctcagaactgagccacaggctgctctggccaggagagaaacagctctgttgttctgcattgggggaggtacattcctgcatcttctcaccccctcaaccaggaactggggatttgggatgagatatggtcagacttgtagataaccccaaagatgtgaagatcgcttgtgaaaccattttgaatgaatagattggtttcctgtggctccctccaaacctggccaagcccagcttccgaagcaggaaccagcactgtctctgtgcctgactcacagcatataggtcaggaaagaatggagacggcattcttggacttcactggggctgctggattggatgggaaaccttctggaagaggcagatgggggtcaaaccactgccttggccccaggaaggggccataggtaggtctgaacaactgccgcaagaccactacatgacttagggaacttgaaaccaactggctcatggagaaaacaaatttgacttgggaaagggattatgtaggaataatgtttggacttgatttccccacgtcataatgaagaatggaagtttggatctgctcctcgtcaggcgcagcatctctgaagcttggaaagctgtcttccagcagcctccgtggcctcgggttcctaccggcttctctgcatttggtctgctgatcatgttgccataatgtgtatggaaagtgtaacacattcttactggttaaagacgactaccaggtatctaacttgtttaacattgagtttgtgtgtgtgtgtgtatgtttgtgtgttttgtatattgtttacattttgagaggtagcattctgtttcaaatgctttttgtttttctgacagtattgttgactgggtcataacattttgagctgtggtttggtggattttcaatttttttttttaaaggtcattcgctgtgctatcttcaaaaccttgagtttggcccccaatttttggcattcaaatgtttaaaagctatttatcttggtttatacaagtttcctttctcttctttttgtcatggtattctatttggtctgcagtttgaatgtagagaaagtggactgatcccccaagcgttgtctgcccccactctttcctccttgggtcccgccattcttttactgggcagtcgagggcattggaggggaagtgactgccctcagcctcactccctggggccatgaagaaaagctaaacagtctcatggcatctcagaataatgttgggtctcccaagaagaaaggtgtaagaataacgacatggctgattaggcgaggccaggatagggctaaggccaggattcctggctggcatccagtcaccccttctcccatccttccccctcttcttccacaagtccgcagccgagacactgtagtctcccagccacagtgatgagtgccctggagactccactgacctctagatgaaggcccctggccctggttcctgttaattaacctctgggtctttgagtcccccagcacaaacttctttcctgtaccctgcggcttggggtcacagggcatgccgggaagccacagctgaggggcgcagactgaagcagtgctccacctctccttctttagctcaggggttgctggtctgtggcaggcgccacgagtggcccctgtggctgttctcagtggcagtctcttaagttcccaccacaggcagctctttatcccctctccctacttgactctttctcttgcctgtgcttttggcctcaaacaggcctgctggtagcgctcagggcgtgaggctacactcctgccctgcctttcctgtcttcatggtctgccagggcataccttggggaggtggaccaaagacccaggactttttgcagtagccagtcctaccccccagttgtctttttaccaattcagggtgggagagaaaactgcagcaccccagcatgtgagttactcaggtgttgggggctagaagggacagtgcgtttaaacaacactcagagctctggccttaaacctgtggccccccaagtctaggagcctcatctcttcctggcagtcatgcgggcaggaggtcctgaaagggaaaacccattcagacaactgttccccaatctaccagccatctgcaggggtcagtgaccgtggccctctccctcctctagaatgtgccacttatgaagagtgccccatggggaaaaggagactcagctgtcccttggcagcttgtgccagtatcccagggcagaagtttccacaggagcctcttgcccttgcgcagagccactgtgagaggcggtgggagccaacacccttgggggagggggcagtactgctcggcacatcccagcatcaggtcagatcattgaaattaaaaaatgtgaattaagttcatatccaccttttggggaagcaggacaaaccaccaccccaccaagtgtgtgacttctccatatcccactgcagtttccattttttaaatgggaattttcaatcccctgtgcttgtctaacgtctgctttaaaaagtttgagaccctgttactgtttgaaaatgcatgcatgttacgatgaatctccaacctgaggaaaaaaataaaactcaaaaagctttgtgtaca

SEQ ID NO: 139034 - DNA, 1312 bp, Artificial Sequence
  derived and/or modified sequence
ttgcgggaaagagccaaaccctggcgttggggggcccgggcggggagcccctcccgcggtccacagcgacgcctgcccagccctcctccccttccggctccggcacggggccccgaggcgttcggaggccaggcgggtttctgtcaggcccggggaggaggggcgggcggggcggccgctgcctccccgggacgggccgtaccacgcggacggggaggacggggccaggggactgcagggcggctgcaccgcccgggggcggggtgcggagcgggccggcgggctccccggggcggggcgggagggcggggcgtggggcggacggaaccaccggggcggggtgggaggtaacgggacgggcgcgaccatggcgcggtgagggagcgggggtggggatcggtccgggggaggcctgaggccgctggcttgtgcgctgtctccgccgcccccctctttcgccgccgccgccgccgccccgggcatgtcgtccaactgcaccagcaccacggcggtggcggtggcgccgctcagcgccagcaagaccaagaccaagaagaagcatttcgtgtgccagaaagtgaagctattccgggccagcgagccgatcctcagcgtcctgatgtggggggtgaaccacacgatcaatgagctgagcaatgttcctgttcctgtcatgctaatgccagatgacttcaaagcctacagcaagatcaaggtggacaatcatctcttcaataaggagaacctgcccagccgctttaagtttaaggagtattgccccatggtgttccgaaaccttcgggagaggtttggaattgatgatcaggattaccagaattcagtgacgcgcagcgcccccatcaacagtgacagccagggtcggtgtggcacgcgtttcctcaccacctacgaccggcgctttgtcatcaagactgtgtccagcgaggacgtggcggagatgcacaacatcttaaagaaataccaccagtttatagtggagtgtcatggcaacacgcttttgccacagttcctgggcatgtaccgcctgaccgtggatggtgtggaaacctacatggtggttaccaggaacgtgttcagccatcggctcactgtgcatcgcaagtatgacctcaagggttctacggttgccagagaagcgagcgacaaggagaaggccaaggacttgccaacattcaaagacaatgacttcctcaatgaagggcagaagctgcatgtgggagaggagagtaaaaagaacttcctggagaaactgaagcgggacgttgaggagattctcgttctgtccccaggc

SEQ ID NO: 139035 - DNA, 1251 bp, Artificial Sequence
  derived and/or modified sequence
atgtcatccaattgcactagcactactgccgtggccgtggctcccctctccgcctctaagaccaagaccaagaagaaacattttgtgtgccagaaggttaagttgtttagagcttccgagcccattttgtccgttttgatgtggggcgttaaccataccataaatgagctcagtaatgtccctgtgcccgtgatgctcatgccagatgacttcaaggcatacagcaaaataaaggtcgacaatcatctgttcaacaaggaaaacctgccctcccgtttcaaattcaaggaatactgtccgatggtcttccgcaacctgagggagcgtttcggaattgacgatcaggactaccagaactctgtgacacggtcagccccaattaactctgacagtcagggcaggtgcggtactaggtttctgacaacctatgatagacggttcgtgatcaaaactgtctcttctgaagacgtcgcagaaatgcacaacattctcaagaagtaccaccaatttattgtggaatgccacggtaatactctgctgccgcaatttctgggaatgtacagacttactgtcgatggcgtggagacctatatggtcgtgactcgaaatgtgtttagtcatcgccttactgtgcatagaaaatacgatctaaaggggagtactgtcgctcgagaggcctctgacaaagagaaggccaaagacttgccaacctttaaggataatgactttctgaatgaaggccagaagctccatgtgggagaggaatccaagaaaaatttcttggaaaaattaaagagagacgtagagtttctggcacaattgaagatcatggactattctctcctggtcggtatccatgatgtagaccgggctgagcaagaggaaatggaagtggaagagagagcagaggacgaggagtgcgagaacgacggagtcgggggtaatctcctttgctcctacgggactccccctgacagccccggaaatctcctgtcctttccacgattcttcggccctggggaatttgatccttcagtggacgtttatgccatgaaaagtcatgagagcagccctaagaaggaagtgtactttatggcaatcatagatattttgaccccctatgacaccaaaaagaaggctgcgcacgcagccaaaactgtgaagcacggggctggcgctgaaatcagcacagtcaatcccgaacagtattcaaagcggttcaatgaatttatgtccaacatcttgacatag

SEQ ID NO: 139036 - DNA, 834 bp, Artificial Sequence
  derived and/or modified sequence
atgagcagcaattgtacctctactaccgccgtcgccgttgcccctctgtctgcgagcaagacaaagaccaagaagaaacacttcgtctgtcagaaagtcaagctgttccgggcatctgaacctatcctctctgtcctgatgtggggcgtcaaccacacaatcaatgaattgagcaacgtccccgtaccggtaatgctgatgcctgatgactttaaagcctatagtaaaatcaaagtcgacaaccacctctttaataaagagaacctgccctctcggttcaagttcaaggagtactgccccatggtgttccgcaaccttagagagaggttcggaatcgatgaccaagactatcaaaacagcgtgactaggtcagccccaattaatagcgacagtcaaggtcgatgcggcacccgattccttacaacctacgaccgccgtttcgtgataaagactgtctctagtgaggatgtcgccgaaatgcacaacatactgaagaagtaccaccagtttatcgtcgagtgccatggcaatactctcctgcctcagtttttaggaatgtaccggcttacggtcgacggagtggagacctacatggtggtaactaggaatgtgttctcgcaccgcctgacagtccacaggaagtatgacctcaagggatccaccgtcgcaagagaagcctctgataaggaaaaggctaaggacctcccaacctttaaggataacgacttcctcaatgaaggtcagaaattgcatgtgggcgaagaatctaagaaaaatttcctcgagaaactgaagagagatgtcgaggagattctggtcctgagtcctggttag

SEQ ID NO: 139037 - protein, 806 aa, Artificial Sequence
  derived and/or modified sequence
MQFFGRLVNTFSGVTNLFSNPFRVKEVAVADYTSSDRVREEGQLILFQNTPNRTWDCVLVNPRNSQSGFRLFQLELEADALVNFHQYSSQLLPFYESSPQVLHTEVLQHLTDLIRNHPSWSVAHLAVELGIRECFHHSRIISCANCAENEEGCTPLHLACRKGDGEILVELVQYCHTQMDVTDYKGETVFHYAVQGDNSQVLQLLGRNAVAGLNQVNNQGLTPLHLACQLGKQEMVRVLLLCNARCNIMGPNGYPIHSAMKFSQKGCAEMIISMDSSQIHSKDPRYGASPLHWAKNAEMARMLLKRGCNVNSTSSAGNTALHVAVMRNRFDCAIVLLTHGANADARGEHGNTPLHLAMSKDNVEMIKALIVFGAEVDTPNDFGETPTFLASKIGRLVTRKAILTLLRTVGAEYCFPPIHGVPAEQGSAAPHHPFSLERAQPPPISLNNLELQDLMHISRARKPAFILGSMRDEKRTHDHLLCLDGGGVKGLIIIQLLIAIEKASGVATKDLFDWVAGTSTGGILALAILHSKSMAYMRGMYFRMKDEVFRGSRPYESGPLEEFLKREFGEHTKMTDVRKPKVMLTGTLSDRQPAELHLFRNYDAPETVREPRFNQNVNLRPPAQPSDQLVWRAARSSGAAPTYFRPNGRFLDGGLLANNPTLDAMTEIHEYNQDLIRKGQANKVKKLSIVVSLGTGRSPQVPVTCVDVFRPSNPWELAKTVFGAKELGKMVVDCCTDPDGRAVDRARAWCEMVGIQYFRLNPQLGTDIMLDEVSDTVLVNALWETEVYIYEHREEFQKLIQLLLSP

SEQ ID NO: 139038 - protein, 479 aa, Artificial Sequence
  derived and/or modified sequence
MQFFGRLVNTFSGVTNLFSNPFRVKEVAVADYTSSDRVREEGQLILFQNTPNRTWDCVLVNPRNSQSGFRLFQLELEADALVNFHQYSSQLLPFYESSPQVLHTEVLQHLTDLIRNHPSWSVAHLAVELGIRECFHHSRIISCANCAENEEGCTPLHLACRKGDGEILVELVQYCHTQMDVTDYKGETVFHYAVQGDNSQVLQLLGRNAVAGLNQVNNQGLTPLHLACQLGKQEMVRVLLLCNARCNIMGPNGYPIHSAMKFSQKGCAEMIISMDSSQIHSKDPRYGASPLHWAKNAEMARMLLKRGCNVNSTSSAGNTALHVAVMRNRFDCAIVLLTHGANADARGEHGNTPLHLAMSKDNVEMIKALIVFGAEVDTPNDFGETPTFLASKIGRLVTRKAILTLLRTVGAEYCFPPIHGVPAEQGSAAPHHPFSLERAQPPPISLNNLELQDLMHISRARKPAFILGSMRDEKRTDRT

SEQ ID NO: 139039 - protein, 166 aa, Artificial Sequence
  derived and/or modified sequence
MQFFGRLVNTFSGVTNLFSNPFRVKEVAVADYTSSDRVREEGQLILFQNTPNRTWDCVLVNPRNSQSGFRCANCAENEEGCTPLHLACRKGDGEILVELVQYCHTQMDVTDYKGETVFHYAVQGDNSQVLQLLGRNAVAGLNQVNNQGLTPLHLACQLGKQEMVRV

SEQ ID NO: 139040 - DNA, 2421 bp, Artificial Sequence
  derived and/or modified sequence
atgcagttcttcggcagactggtgaacaccttcagcggcgtgaccaacctgttcagcaaccccttcagagtgaaggaggtggccgtggccgactacaccagcagcgacagagtgagagaggagggccagctgatcctgttccagaacacccccaacagaacctgggactgcgtgctggtgaaccccagaaacagccagagcggcttcagactgttccagctggagctggaggccgacgccctggtgaacttccaccagtacagcagccagctgctgcccttctacgagagcagcccccaggtgctgcacaccgaggtgctgcagcacctgaccgacctgatcagaaaccaccccagctggagcgtggcccacctggccgtggagctgggcatcagagagtgcttccaccacagcagaatcatcagctgcgccaactgcgccgagaacgaggagggctgcacccccctgcacctggcctgcagaaagggcgacggcgagatcctggtggagctggtgcagtactgccacacccagatggacgtgaccgactacaagggcgagaccgtgttccactacgccgtgcagggcgacaacagccaggtgctgcagctgctgggcagaaacgccgtggccggcctgaaccaggtgaacaaccagggcctgacccccctgcacctggcctgccagctgggcaagcaggagatggtgagagtgctgctgctgtgcaacgccagatgcaacatcatgggccccaacggctaccccatccacagcgccatgaagttcagccagaagggctgcgccgagatgatcatcagcatggacagcagccagatccacagcaaggaccccagatacggcgccagccccctgcactgggccaagaacgccgagatggccagaatgctgctgaagagaggctgcaacgtgaacagcaccagcagcgccggcaacaccgccctgcacgtggccgtgatgagaaacagattcgactgcgccatcgtgctgctgacccacggcgccaacgccgacgccagaggcgagcacggcaacacccccctgcacctggccatgagcaaggacaacgtggagatgatcaaggccctgatcgtgttcggcgccgaggtggacacccccaacgacttcggcgagacccccaccttcctggccagcaagatcggcagactggtgaccagaaaggccatcctgaccctgctgagaaccgtgggcgccgagtactgcttcccccccatccacggcgtgcccgccgagcagggcagcgccgccccccaccaccccttcagcctggagagagcccagcccccccccatcagcctgaacaacctggagctgcaggacctgatgcacatcagcagagccagaaagcccgccttcatcctgggcagcatgagagacgagaagagaacccacgaccacctgctgtgcctggacggcggcggcgtgaagggcctgatcatcatccagctgctgatcgccatcgagaaggccagcggcgtggccaccaaggacctgttcgactgggtggccggcaccagcaccggcggcatcctggccctggccatcctgcacagcaagagcatggcctacatgagaggcatgtacttcagaatgaaggacgaggtgttcagaggcagcagaccctacgagagcggccccctggaggagttcctgaagagagagttcggcgagcacaccaagatgaccgacgtgagaaagcccaaggtgatgctgaccggcaccctgagcgacagacagcccgccgagctgcacctgttcagaaactacgacgcccccgagaccgtgagagagcccagattcaaccagaacgtgaacctgagaccccccgcccagcccagcgaccagctggtgtggagagccgccagaagcagcggcgccgcccccacctacttcagacccaacggcagattcctggacggcggcctgctggccaacaaccccaccctggacgccatgaccgagatccacgagtacaaccaggacctgatcagaaagggccaggccaacaaggtgaagaagctgagcatcgtggtgagcctgggcaccggcagaagcccccaggtgcccgtgacctgcgtggacgtgttcagacccagcaacccctgggagctggccaagaccgtgttcggcgccaaggagctgggcaagatggtggtggactgctgcaccgaccccgacggcagagccgtggacagagccagagcctggtgcgagatggtgggcatccagtacttcagactgaacccccagctgggcaccgacatcatgctggacgaggtgagcgacaccgtgctggtgaacgccctgtgggagaccgaggtgtacatctacgagcacagagaggagttccagaagctgatccagctgctgctgagcccctag

SEQ ID NO: 139041 - DNA, 1440 bp, Artificial Sequence
  derived and/or modified sequence
atgcagttcttcggcagactggtgaacaccttcagcggcgtgaccaacctgttcagcaaccccttcagagtgaaggaggtggccgtggccgactacaccagcagcgacagagtgagagaggagggccagctgatcctgttccagaacacccccaacagaacctgggactgcgtgctggtgaaccccagaaacagccagagcggcttcagactgttccagctggagctggaggccgacgccctggtgaacttccaccagtacagcagccagctgctgcccttctacgagagcagcccccaggtgctgcacaccgaggtgctgcagcacctgaccgacctgatcagaaaccaccccagctggagcgtggcccacctggccgtggagctgggcatcagagagtgcttccaccacagcagaatcatcagctgcgccaactgcgccgagaacgaggagggctgcacccccctgcacctggcctgcagaaagggcgacggcgagatcctggtggagctggtgcagtactgccacacccagatggacgtgaccgactacaagggcgagaccgtgttccactacgccgtgcagggcgacaacagccaggtgctgcagctgctgggcagaaacgccgtggccggcctgaaccaggtgaacaaccagggcctgacccccctgcacctggcctgccagctgggcaagcaggagatggtgagagtgctgctgctgtgcaacgccagatgcaacatcatgggccccaacggctaccccatccacagcgccatgaagttcagccagaagggctgcgccgagatgatcatcagcatggacagcagccagatccacagcaaggaccccagatacggcgccagccccctgcactgggccaagaacgccgagatggccagaatgctgctgaagagaggctgcaacgtgaacagcaccagcagcgccggcaacaccgccctgcacgtggccgtgatgagaaacagattcgactgcgccatcgtgctgctgacccacggcgccaacgccgacgccagaggcgagcacggcaacacccccctgcacctggccatgagcaaggacaacgtggagatgatcaaggccctgatcgtgttcggcgccgaggtggacacccccaacgacttcggcgagacccccaccttcctggccagcaagatcggcagactggtgaccagaaaggccatcctgaccctgctgagaaccgtgggcgccgagtactgcttcccccccatccacggcgtgcccgccgagcagggcagcgccgccccccaccaccccttcagcctggagagagcccagcccccccccatcagcctgaacaacctggagctgcaggacctgatgcacatcagcagagccagaaagcccgccttcatcctgggcagcatgagagacgagaagagaaccgacagaacctag

SEQ ID NO: 139042 - DNA, 2004 bp, Artificial Sequence
  derived and/or modified sequence
atgcagttcttcggcagactggtgaacaccttcagcggcgtgaccaacctgttcagcaaccccttcagagtgaaggaggtggccgtggccgactacaccagcagcgacagagtgagagaggagggccagctgatcctgttccagaacacccccaacagaacctgggactgcgtgctggtgaaccccagaaacagccagagcggcttcagactgttccagctggagctggaggccgacgccctggtgaacttccaccagtacagcagccagctgggcaagcaggagatggtgagagtgctgctgctgtgcaacgccagatgcaacatcatgggccccaacggctaccccatccacagcgccatgaagttcagccagaagggctgcgccgagatgatcatcagcatggacagcagccagatccacagcaaggaccccagatacggcgccagccccctgcactgggccaagaacgccgagatggccagaatgctgctgaagagaggctgcaacgtgaacagcaccagcagcgccggcaacaccgccctgcacgtggccgtgatgagaaacagattcgactgcgccatcgtgctgctgacccacggcgccaacgccgacgccagaggcgagcacggcaacacccccctgcacctggccatgagcaaggacaacgtggagatgatcaaggccctgatcgtgttcggcgccgaggtggacacccccaacgacttcggcgagacccccaccttcctggccagcaagatcggcagactggtgaccagaaaggccatcctgaccctgctgagaaccgtgggcgccgagtactgcttcccccccatccacggcgtgcccgccgagcagggcagcgccgccccccaccaccccttcagcctggagagagcccagcccccccccatcagcctgaacaacctggagctgcaggacctgatgcacatcagcagagccagaaagcccgccttcatcctgggcagcatgagagacgagaagagaacccacgaccacctgctgtgcctggacggcggcggcgtgaagggcctgatcatcatccagctgctgatcgccatcgagaaggccagcggcgtggccaccaaggacctgttcgactgggtggccggcaccagcaccggcggcatcctggccctggccatcctgcacagcaagagcatggcctacatgagaggcatgtacttcagaatgaaggacgaggtgttcagaggcagcagaccctacgagagcggccccctggaggagttcctgaagagagagttcggcgagcacaccaagatgaccgacgtgagaaagcccaaggtgatgctgaccggcaccctgagcgacagacagcccgccgagctgcacctgttcagaaactacgacgcccccgagaccgtgagagagcccagattcaaccagaacgtgaacctgagaccccccgcccagcccagcgaccagctggtgtggagagccgccagaagcagcggcgccgcccccacctacttcagacccaacggcagattcctggacggcggcctgctggccaacaaccccaccctggacgccatgaccgagatccacgagtacaaccaggacctgatcagaaagggccaggccaacaaggtgaagaagctgagcatcgtggtgagcctgggcaccggcagaagcccccaggtgcccgtgacctgcgtggacgtgttcagacccagcaacccctgggagctggccaagaccgtgttcggcgccaaggagctgggcaagatggtggtggactgctgcaccgaccccgacggcagagccgtggacagagccagagcctggtgcgagatggtgggcatccagtacttcagactgaacccccagctgggcaccgacatcatgctggacgaggtgagcgacaccgtgctggtgaacgccctgtgggagaccgaggtgtacatctacgagcacagagaggagttccagaagctgatccagctgctgctgagcccctag

SEQ ID NO: 139043 - DNA, 2421 bp, Artificial Sequence
  derived and/or modified sequence
atgcaattcttcgggagactggtgaatactttctctggggttacaaacctgtttagcaatccctttcgggtcaaagaggttgccgtggccgactacacctcttccgaccgcgtacgcgaagagggccaactgattttgtttcaaaatacgcctaaccgcacctgggactgcgtgctggtgaatcctagaaactcccaatcgggcttccggcttttccagttggagctggaagccgatgctcttgtgaatttccatcaatactcatctcagctgctacctttttacgagagctccccgcaggttcttcatacagaggtcctgcagcatctgaccgacctgatccgcaaccacccctcctggagcgtggctcatctggcagtcgagctgggtattcgagaatgcttccaccactcaagaatcatcagttgcgccaactgtgccgaaaatgaggagggctgtacccccctgcacctggcgtgcaggaagggggacggggagatcctcgtcgagttggtacagtactgtcacacgcagatggatgttaccgattataaaggtgagactgtcttccattacgccgtgcaaggcgacaatagccaggttctgcaacttttaggcagaaacgcagtggcaggcctgaaccaggtcaataatcagggtcttacacccctgcacctcgcttgtcagctgggaaagcaggaaatggttcgggtgctcctgctgtgtaacgcacgctgtaacattatggggcccaacggctaccccatacattctgctatgaaattctctcaaaaaggttgcgcagaaatgattattagcatggactcctctcagatccacagtaaggacccacgctacggggcttcacctctccattgggcaaagaacgcggagatggcccggatgctcctcaaacgcggctgcaatgtgaatagtacaagcagcgcgggaaataccgcccttcacgtggccgtaatgcgcaaccgatttgactgtgccattgtcctcctcacccacggagccaatgctgatgcccgcggtgagcacggtaatacacctttgcacctggcaatgtccaaggacaatgttgagatgatcaaagcactcatcgtcttcggcgccgaggtggacactcccaatgactttggagaaacccccacctttcttgcatccaaaatcgggcgtctggtgactaggaaggccatattgaccctgctcagaaccgtgggggccgagtactgttttcctccaattcatggcgtgcctgcagagcaggggtctgctgcccctcatcatcctttcagtctggagcgagcacaacctcctccaatctcccttaacaatctcgagctgcaggatctgatgcatattagtcgggcgaggaagcctgctttcatccttggatccatgcgagatgagaagagaacgcacgaccaccttctgtgcctggacggaggtggtgtcaagggcctgatcattatccagctcttgatagccatagagaaagccagcggtgtggcgaccaaagacctgtttgactgggtggccgggacaagcaccggcgggattctggccctggctatcctgcattccaaatccatggcttacatgcgggggatgtattttaggatgaaggatgaagtttttagggggtcccgaccgtacgaatccggtcctctggaggagttcctaaaacgggagtttggggaacacaccaaaatgacagatgtccggaagcctaaagtcatgctcaccgggacactgtcagatagacagcctgccgagcttcacttgttcagaaattatgatgcgccagaaaccgtgcgtgagccacgattcaaccagaacgtgaatctccgcccacccgctcagccctctgatcaactggtatggcgcgcagctagaagcagcggtgcagcgcctacatactttagacccaatggccggtttttggacggtggcctgcttgccaataacccaacacttgacgccatgactgaaattcatgagtacaaccaggacctgattcgcaaaggacaagccaataaggttaaaaaactttctattgtggtgtcactgggcacgggacgctccccacaggtgcccgtcacctgcgtcgatgtgttcaggccctccaatccttgggagttggctaaaactgtgttcggagcaaaagaactcgggaagatggtagtcgattgctgtacggacccggacgggcgggctgtcgaccgggctcgtgcttggtgcgagatggtgggcatacaatatttcagattgaatccgcaactcgggacagatataatgctggatgaagttagcgatactgtactggttaacgccctttgggaaacggaagtgtacatctacgagcatcgcgaggaattccagaagctgatccagctgctcttatccccatag

SEQ ID NO: 139044 - DNA, 1440 bp, Artificial Sequence
  derived and/or modified sequence
atgcagttcttcgggcggcttgttaatacttttagtggagtcaccaatctcttcagtaatccatttagagtgaaggaggtggccgtcgccgattatacttctagtgatagggtgcgtgaggaaggccagctgatcttatttcagaataccccaaacagaacttgggactgtgtgctggtgaacccacgaaactcgcagagtggtttccgacttttccaattagaactcgaagccgatgctctcgtcaattttcaccagtatagcagtcagctccttcctttttatgaatcctcaccacaggtgctgcacacagaggtactacaacatctaactgatctgatcaggaaccatccatcctggtcagtggcacatttagccgtggaattggggatcagagaatgcttccatcactctcgcataattagctgtgccaattgcgctgaaaatgaggaggggtgcactccactccacctggcctgcagaaaaggagacggagagatcctcgtggagctcgtgcagtattgccacacccagatggatgtaaccgactataaaggtgaaactgtcttccactacgctgtgcagggggataacagccaagtgctacagctgctgggccggaacgccgtcgccggacttaatcaggtgaataatcagggcctgactccgctgcacttggcatgtcagctgggcaaacaggagatggtgcgggtcttactgctatgtaatgctaggtgcaatatcatgggtcccaatggctatcccatccatagtgcaatgaagtttagtcagaaaggatgcgccgagatgatcattagtatggactctagccagatacatagtaaggaccccaggtacggagcttcgcctttgcattgggctaagaatgccgagatggctcgaatgctgctcaagcgagggtgcaacgtcaattcaacttcatctgctggcaatactgctctgcatgttgccgtgatgagaaaccgattcgattgtgcaatagtgctgcttactcacggcgcgaatgccgatgcccgtggggagcacggcaatactcccttgcatctcgcgatgtccaaggacaacgtcgaaatgatcaaggctctgattgtgttcggggcagaagtggacaccccaaatgattttggagagacaccaacattcttggcctctaagatcggtagactcgttactaggaaggccatcctgacactcctgcgaacagtgggagctgagtattgttttcctccaatacacggcgtgcccgcagaacagggcagcgccgccccccaccatcccttttcattggagcgggcacagccacccccaatctccctgaacaaccttgaattgcaagatttaatgcatatctctcgtgctaggaaaccagcttttatcctaggttccatgcgcgacgagaaaaggacggacagaacgtag

SEQ ID NO: 139045 - DNA, 2004 bp, Artificial Sequence
  derived and/or modified sequence
atgcaattctttggacgcctggtaaataccttcagtggagtcacgaacttattttcaaaccctttccgggttaaagaggtagccgtcgcggattacacttcctcagatagagtcagagaagaaggtcagctcatcttgttccagaacacaccaaataggacttgggattgtgtattggtaaaccctaggaacagtcaaagcggttttagactgtttcaacttgaactagaagccgatgcattagtaaactttcaccagtactcttcccagcttggtaagcaagaaatggtccgggtgctgctcttgtgcaatgcccggtgcaacattatggggccaaacggctaccctatacattccgctatgaagttctcccaaaaaggatgcgcagagatgattatctccatggactcctcccagatccattctaaggacccaaggtacggagcaagtccactgcattgggcgaaaaacgctgagatggccagaatgctgctcaaacgcgggtgcaacgttaactccactagttccgctggcaatacagctttgcacgttgcagtgatgcgaaacaggttcgattgcgccatcgttctcctcactcacggagccaacgctgacgcacggggtgagcacggaaacacacccttgcatctggctatgagcaaagataatgtcgagatgataaaggctttgattgtgtttggagctgaggttgatacgccaaacgatttcggcgagacccctacgttcttggcgagcaagataggcaggttagtaacccgaaaggctattctgaccctgcttaggacagtcggcgcggaatactgcttcccccccatccacggtgttcccgcggagcagggaagcgccgcccctcatcacccattctctctggaacgcgcccagccacccccgatatcactcaacaatttagaactacaagatctgatgcacatttccagagcacgaaagcccgccttcatcctcggcagtatgcgggatgagaagaggacccacgaccacctgctgtgtttggatggggggggggtgaaaggcctcatcatcatccaactgctgatcgccattgaaaaggcgtcaggcgtagccacgaaggaccttttcgactgggtcgccgggactagcacaggaggaatcttagctctagctatcctgcactcaaagtccatggcctatatgcgcggcatgtactttcgtatgaaagatgaagtatttaggggctccagaccatatgagtccgggcctttagaagagttcctcaaaagggagttcggggaacacactaagatgactgacgttagaaagccaaaagtaatgttaacaggcactttaagcgaccggcagccagccgaactgcacctctttcggaactacgacgcccccgagaccgtcagagagccgagattcaaccagaacgtgaacctgcgccctcccgcccagccttcagatcagctggtgtggagagctgcccggagtagtggtgcggctcccacctacttcaggcctaacggtcgttttctggatggaggtttattagccaacaatcccacgttggatgccatgacagagatacacgaatataaccaggacctgatccggaaggggcaagctaacaaagtcaaaaagctgtcaatcgtggttagtcttggaactggcaggtccccgcaggtgcctgttacctgtgttgatgtcttccggccaagcaatccttgggagctggcaaagaccgtctttggagccaaggaactcgggaaaatggtcgtcgactgttgtacagatccggatggcagggcggtggaccgggccagagcctggtgcgagatggtcggcatacagtacttccgtttgaatcctcagctgggaaccgatatcatgctagatgaggtttcagataccgttctcgtcaacgccctctgggagacggaggtatatatctacgagcacagggaggaattccagaaacttatacagctcttgctgtctccatag

SEQ ID NO: 139046 - DNA, 2421 bp, Artificial Sequence
  derived and/or modified sequence
atgcagttcttcggccgcctggtgaacaccttcagcggcgtgaccaacctcttcagcaaccccttccgggtgaaggaggtggccgtggccgactacaccagcagtgacagagtgcgggaggagggccagctgatcctcttccagaacacccccaacagaacctgggactgtgtgctggtgaaccccaggaacagccagagcggcttccgcctcttccagctggagctggaggctgatgccctggtgaacttccaccagtacagcagccagctgctgcccttctatgagagcagcccccaggtgctgcacacagaggtgctgcagcacctgacagacctgatccggaaccaccccagctggagcgtggcccacctggccgtggagctgggcatccgggagtgcttccaccacagccgcatcatcagctgtgccaactgtgccgagaatgaggagggctgcacccccctgcacctggcctgcaggaaaggagatggagagatcctggtggagctggtgcagtactgccacacccagatggatgtgacagactacaagggggagaccgtcttccactatgctgtgcagggcgacaacagccaggtgctgcagctgctgggcagaaatgctgtggccggcctgaaccaggtgaacaaccagggcctgacccccctgcacctggcctgccagctgggcaagcaggagatggtgcgggtgctgctgctgtgcaatgcccgctgcaacatcatgggccccaacggctaccccatccacagcgccatgaagttcagccagaagggctgtgccgagatgatcatctccatggacagcagccagatccacagcaaggacccccgctacggggccagccccctgcactgggccaagaatgctgagatggccaggatgctgctgaagaggggctgcaatgtgaacagcaccagcagcgctggcaacacagccctgcacgtggccgtgatgaggaacagatttgactgtgccatcgtgctgctgacccatggagccaatgctgatgcccggggggagcacggcaacacccccctgcacctggccatgagcaaggacaacgtggagatgatcaaggccctgattgtgtttggagctgaggtggacaccccaaatgactttggagagacccccaccttcctggccagcaagattggccgcctggtgaccaggaaggccatcctgaccctgctgaggacagtgggcgctgagtactgcttcccccccatccatggagtgcctgctgagcagggcagcgctgccccccaccaccccttcagcctggagcgggcccagcccccacccatcagcctgaacaacctggagctgcaggacctgatgcacatcagccgggccaggaagccagccttcatcctgggctccatgagagatgagaagaggacccatgaccacctgctgtgcctggatggcggcggcgtgaagggcctcatcatcatccagctgctgattgccatcgagaaggccagcggcgtggccaccaaggacctgtttgactgggtggccggcaccagcactggaggcatcctggccctggccatcctgcacagcaagtccatggcctacatgaggggcatgtacttcaggatgaaggatgaggtgttccggggcagccggccctatgaaagtggccccctggaggagttcctgaagcgggagtttggagagcacaccaagatgacagatgtgaggaagcccaaggtgatgctgaccggcaccctgagtgaccggcagcctgctgagctgcacctgttcaggaactatgatgcccctgagaccgtgcgggagccccgcttcaaccagaatgtgaacctgcggcccccagcccagcccagcgaccagctggtgtggagggctgcccggagcagtggagctgcccccacctacttccggcccaacggccgcttcctggatggcggcctgctggccaacaaccccaccctggatgccatgacagagatccacgagtacaaccaggacctgatcaggaagggccaggccaacaaggtgaagaagctgagcatcgtggtgtccctgggcaccggccgcagcccccaggtgcctgtgacctgtgtggatgtgttccggcccagcaacccctgggagctggccaagacagtgtttggagccaaggagctgggcaagatggtggtggactgctgcacagatcctgatggccgggctgtggaccgggcccgggcctggtgtgagatggtgggcatccagtacttccggctgaacccccagctgggcacagacatcatgctggatgaggtgtctgacacagtgctggtgaatgccctgtgggagacagaggtgtacatctatgagcaccgggaggagttccagaagctgatccagctgctgctgagcccctag

SEQ ID NO: 139047 - DNA, 1440 bp, Artificial Sequence
  derived and/or modified sequence
atgcagttcttcggccgcctggtgaacaccttcagcggcgtgaccaacctcttcagcaaccccttccgggtgaaggaggtggccgtggccgactacaccagcagtgacagagtgcgggaggagggccagctgatcctcttccagaacacccccaacagaacctgggactgtgtgctggtgaaccccaggaacagccagagcggcttccgcctcttccagctggagctggaggctgatgccctggtgaacttccaccagtacagcagccagctgctgcccttctatgagagcagcccccaggtgctgcacacagaggtgctgcagcacctgacagacctgatccggaaccaccccagctggagcgtggcccacctggccgtggagctgggcatccgggagtgcttccaccacagccgcatcatcagctgtgccaactgtgccgagaatgaggagggctgcacccccctgcacctggcctgcaggaaaggagatggagagatcctggtggagctggtgcagtactgccacacccagatggatgtgacagactacaagggggagaccgtcttccactatgctgtgcagggcgacaacagccaggtgctgcagctgctgggcagaaatgctgtggccggcctgaaccaggtgaacaaccagggcctgacccccctgcacctggcctgccagctgggcaagcaggagatggtgcgggtgctgctgctgtgcaatgcccgctgcaacatcatgggccccaacggctaccccatccacagcgccatgaagttcagccagaagggctgtgccgagatgatcatctccatggacagcagccagatccacagcaaggacccccgctacggggccagccccctgcactgggccaagaatgctgagatggccaggatgctgctgaagaggggctgcaatgtgaacagcaccagcagcgctggcaacacagccctgcacgtggccgtgatgaggaacagatttgactgtgccatcgtgctgctgacccatggagccaatgctgatgcccggggggagcacggcaacacccccctgcacctggccatgagcaaggacaacgtggagatgatcaaggccctgattgtgtttggagctgaggtggacaccccaaatgactttggagagacccccaccttcctggccagcaagattggccgcctggtgaccaggaaggccatcctgaccctgctgaggacagtgggcgctgagtactgcttcccccccatccatggagtgcctgctgagcagggcagcgctgccccccaccaccccttcagcctggagcgggcccagcccccacccatcagcctgaacaacctggagctgcaggacctgatgcacatcagccgggccaggaagccagccttcatcctgggctccatgagagatgagaagaggacagacagaacatag

SEQ ID NO: 139048 - DNA, 2004 bp, Artificial Sequence
  derived and/or modified sequence
atgcagttcttcggccgcctggtgaacaccttcagcggcgtgaccaacctcttcagcaaccccttccgggtgaaggaggtggccgtggccgactacaccagcagtgacagagtgcgggaggagggccagctgatcctcttccagaacacccccaacagaacctgggactgtgtgctggtgaaccccaggaacagccagagcggcttccgcctcttccagctggagctggaggctgatgccctggtgaacttccaccagtacagcagccagctgggcaagcaggagatggtgcgggtgctgctgctgtgcaatgcccgctgcaacatcatgggccccaacggctaccccatccacagcgccatgaagttcagccagaagggctgtgccgagatgatcatctccatggacagcagccagatccacagcaaggaccccaggtatggagccagccccctgcactgggccaagaatgctgagatggccaggatgctgctgaagaggggctgcaatgtgaacagcaccagcagcgctggcaacacagccctgcacgtggccgtgatgaggaacagatttgactgtgccatcgtgctgctgacccacggggccaatgctgatgcccggggggagcacggcaacacccccctgcacctggccatgagcaaggacaacgtggagatgatcaaggccctgattgtgtttggagctgaggtggacaccccaaatgactttggagagacccccaccttcctggccagcaagattggccgcctggtgaccaggaaggccatcctgaccctgctgaggacagtgggcgctgagtactgcttcccccccatccacggcgtgcctgctgagcagggcagcgctgccccccaccaccccttcagcctggagcgggcccagcccccacccatcagcctgaacaacctggagctgcaggacctgatgcacatcagccgggccaggaagccagccttcatcctgggctccatgagagatgagaagaggacccatgaccacctgctgtgcctggatggcggcggcgtgaagggcctcatcatcatccagctgctgattgccatcgagaaggccagcggcgtggccaccaaggacctgtttgactgggtggccggcaccagcactggaggcatcctggccctggccatcctgcacagcaagtccatggcctacatgaggggcatgtacttcaggatgaaggatgaggtgttccggggcagccggccctatgagagcggccccctggaggagttcctgaagcgggagtttggagagcacaccaagatgacagatgtgaggaagcccaaggtgatgctgaccggcaccctgagtgaccggcagcctgctgagctgcacctgttcagaaattatgatgcccctgagaccgtgcgggagccccgcttcaaccagaatgtgaacctgcggcccccagcccagcccagcgaccagctggtgtggagggctgcccggagcagcggggccgcccccacctacttccggcccaacggccgcttcctggatggcggcctgctggccaacaaccccaccctggatgccatgacagagatccacgagtacaaccaggacctgatcaggaagggccaggccaacaaggtgaagaagctgagcatcgtggtgtccctgggcaccggccgcagcccccaggtgcctgtgacctgtgtggatgtgttccggcccagcaacccctgggagctggccaagacagtgtttggagccaaggagctgggcaagatggtggtggactgctgcacagatcctgatggccgggctgtggaccgggcccgggcctggtgtgagatggtgggcatccagtacttccggctgaacccccagctgggcacagacatcatgctggatgaggtgtctgacacagtgctggtgaatgccctgtgggagacagaggtgtacatctatgagcaccgggaggagttccagaagctgatccagctgctgctgagcccctag

SEQ ID NO: 139049 - DNA, 2421 bp, Artificial Sequence
  derived and/or modified sequence
atgcagttcttcggccggctggtgaacaccttcagcggcgtgaccaatctgttctctaatccctttcgggtaaaggaagtggccgtagccgattacacatccagcgaccgcgtgagagaggagggtcagctcatccttttccaaaatactccaaaccgcacttgggactgcgttcttgtgaatccgcgaaactcacagtcggggttccgcctgtttcaactcgagttagaagctgacgctctggttaactttcatcagtatagttcccagttgctgccattctacgaatcgtccccccaggttttacataccgaggtgctccagcacctgactgatcttataaggaatcaccctagctggtcagtggcacacctggcagtggagctgggtatccgcgagtgtttccaccatagtagaataatatcgtgtgcgaactgtgccgagaatgaggaggggtgtacccctctgcacttggcctgccgaaagggcgacggggaaattctggtcgagttggtacagtactgccacacacagatggatgtgaccgattacaaaggcgagacagtgttccactatgccgtacagggcgataactcccaggttctgcagctgctaggcagaaacgccgtcgctgggctaaatcaggttaataaccagggtctcacgccgctccatctggcctgtcagctgggcaagcaggaaatggttcgagtcctcctcctctgtaatgcccggtgcaatatcatggggccaaatggttaccctatccatagcgccatgaagttttcacaaaagggatgcgctgagatgatcatctccatggacagtagtcagatacacagcaaagacccaaggtatggcgcctctcccctgcactgggcaaaaaatgccgaaatggccaggatgctactcaagagaggttgcaacgtgaactctacaagctctgcaggaaacactgccttacatgtggctgtcatgcgcaaccgcttcgactgcgctatagtgttgctgacccacggggccaacgccgacgcacgtggggagcatgggaataccccactgcatctggctatgagcaaggacaacgtggaaatgatcaaggcactgatcgtgttcggggccgaggtcgatacccccaatgactttggtgaaactcctacctttctcgcgtctaagatcggacgacttgttacgcgcaaggctattctgacccttctgaggacagtgggagcggagtattgtttccctcctatccacggagtgcccgccgaacagggctccgccgctcctcatcacccattttccctggagcgggcccagcctcctcccatctcgttgaataatctcgaattgcaagacttgatgcacatctcaagagccagaaaacctgctttcatcctgggttccatgcgcgatgaaaaacggactcacgaccatctgctctgtctcgacgggggaggcgtgaaggggctgatcataattcagctcctgatcgctatcgaaaaggcctcaggcgtcgccaccaaggacctattcgactgggtggctggtacctctacgggtgggatcctcgcattggcgatactccacagtaaatcaatggcatacatgaggggtatgtactttcggatgaaagatgaagtctttaggggtagtcggccttacgaatcaggacccctggaagagtttttgaaacgtgagttcggggaacataccaaaatgaccgacgttcggaaacctaaggtgatgctgacgggtaccctgagtgaccgccagccagctgaactacatctcttccgaaattacgatgcacccgaaaccgtcagggaacccaggtttaatcagaatgtgaatctgcgcccacctgcccagccaagcgaccagctcgtgtggcgcgccgcacgcagctccggcgcggctcccacgtacttcaggccaaatggccgtttcttggatgggggattattggcaaataatcccacccttgacgccatgacagagatccatgaatacaaccaagatctcattaggaaaggccaggccaataaggttaagaagctcagcattgttgtgagtctcggaaccggtcggtctcctcaagttccagtcacatgcgtcgatgtattcagaccatccaatccctgggagctggcgaaaactgtctttggagccaaagagttaggcaaaatggtcgtggactgctgcacggacccagatgggcgggcagtggatcgggccagggcatggtgcgaaatggtgggaatacagtactttagacttaacccccagcttgggacggatataatgctggacgaggtttcagacactgtcttagtgaacgcgctgtgggaaacagaagtatacatttacgagcaccgagaagagttccagaagctgattcagctcctcctgtcgccttag

SEQ ID NO: 139050 - DNA, 1440 bp, Artificial Sequence
  derived and/or modified sequence
atgcagttcttcggccggctggtgaacaccttcagcggcgtgaccaacctgtttagcaatccttttcgagtaaaagaggttgccgtagccgactacacatcctcagatagagtgagggaggagggccagctcatactgtttcaaaacactcccaaccgcacctgggactgcgtgctcgtgaaccctcgaaattctcaaagtggctttcggctgttccaattagaattggaagctgatgcgctggtaaacttccaccagtactcctcccagcttctacctttctatgaaagctctccccaggtgctacatacggaagtgttacaacatcttaccgatctgatcagaaatcacccgtcttggagcgtggcccatctggccgtcgaactgggtatcagggaatgttttcatcactctagaattattagctgtgccaattgcgctgaaaacgaggaggggtgcacccccctacacttggcctgcagaaagggcgacggtgagatcctagtagaactggttcaatactgccacacacagatggacgtcaccgactacaagggagaaacagtattccactatgccgtgcaaggcgacaactcacaggtgctgcaactcctgggtcgcaatgcagtggccgggttgaatcaggtgaacaatcagggattgactcctctccatctcgcctgtcaactcggaaaacaagagatggtgagagtgctcctcttgtgtaatgcccggtgcaacataatgggtcccaacgggtaccccatccacagcgctatgaagttttcccagaaaggttgcgccgaaatgatcatttcaatggactcttctcagattcactctaaagacccacggtacggtgcatcgcccctccactgggctaaaaatgccgaaatggcccggatgctgctgaaacggggttgtaacgtgaacagcaccagtagcgccggaaacacagcattgcatgttgcagtgatgcgcaatagatttgattgtgctattgttttactgacgcacggtgccaatgccgacgcccgtggagagcatggaaacacacctctccatctggccatgtctaaggataacgtggaaatgataaaggcactcattgtgtttggcgccgaggtcgacacgcctaacgatttcggtgaaacccctactttcctcgcttctaaaatcggcagactggtaacaagaaaagcgatcttgacccttctgcgtaccgttggcgcggagtattgctttccacctattcacggcgtgcctgccgaacagggatcagcagcaccccatcatcccttttccctcgaacgcgctcagcctccccccatcagccttaataatctggagctccaggatctcatgcatatctctcgtgctcggaaacccgcctttattctaggcagcatgcgcgatgagaagcgtacagacagaacctag

SEQ ID NO: 139051 - DNA, 2004 bp, Artificial Sequence
  derived and/or modified sequence
atgcagttcttcggccggctggtgaacaccttcagcggcgtgaccaacctgtttagcaacccatttagagtcaaggaggttgcggttgcagactatacttctagtgatcgcgtgagggaggagggccaactgatcctgttccaaaatacaccaaaccgcacctgggactgtgttttggtcaaccctaggaactcccagagcggattccgactttttcagctggaactggaggctgacgcactggtgaattttcaccagtactctagccagctaggtaaacaggaaatggtcagagtgttattactatgcaatgcccggtgtaatattatggggcctaatggctatcccatccattcggccatgaaattcagccaaaaaggttgcgcggaaatgatcatatcaatggactcctcccaaattcactcaaaagacccacgatatggtgcaagtccattgcattgggccaagaacgctgaaatggctagaatgcttttgaaaaggggctgcaacgtgaacagtacttcgtctgccgggaacacagcccttcatgtagccgtgatgaggaatagatttgattgtgccatagtcctactgacgcacggggccaacgcagacgcacgcggtgaacacggtaatacccccctccatttggcaatgtccaaagataatgtcgaaatgataaaggctctcatcgtcttcggggccgaagtggacactccgaacgacttcggtgagacacccactttcctggcctccaagattggccggctggtgactaggaaagctatcttgacgcttctccggaccgtcggcgcagaatactgtttccctcccatccacggtgtgccggccgagcaggggtctgcagccccacaccatcccttcagtctggaaagggcccagccacctcctatttccctgaacaacctggaactgcaggatctgatgcacataagtcgcgcccggaagccggcgtttatacttggcagtatgcgggatgagaagcgcacccatgatcaccttctgtgcctggacggcgggggcgtgaagggtctcattatcattcaactgctgatagctatagaaaaggcatccggcgtggcgaccaaagacctctttgactgggttgcaggaacgtccacaggtggaattctcgctctggcgattctacattcaaaatcaatggcatatatgaggggaatgtactttcggatgaaggatgaagtctttcgaggttctcgcccctacgagagcggaccactagaggagtttctcaagcgtgagttcggggagcacacaaaaatgacagatgtcaggaagcctaaagtaatgctcaccggaacactctcagaccgtcagcctgccgaactccacttgtttcgcaactatgacgccccagaaacagtacgtgagccaagattcaatcagaatgttaatttacgacctcccgcacagccaagcgaccagctggtctggagagcggctagaagttccggcgccgcaccaacttattttcgccccaacgggagattcttagatggcggactgctggctaataacccaaccctggacgcaatgacagaaatccatgaatacaaccaggacctgatcagaaaaggccaagctaacaaagtgaagaagttgtccatcgtagttagcctgggaacgggcaggtctccacaggtgcccgttacttgcgtggacgtgttcagaccatctaatccatgggaactagccaagacagtgttcggggcaaaagaactcgggaaaatggtggtggactgctgcaccgacccagacggacgggccgtggatcgggctcgtgcatggtgcgagatggtaggtatccagtattttcgactaaacccccagttaggcaccgacatcatgctcgacgaggtgagcgacacagtcctagtcaatgccctctgggaaacagaagtctatatttacgaacacagagaggagtttcagaagctgattcagttgctgctctcaccatag

SEQ ID NO: 139052 - DNA, 2421 bp, Artificial Sequence
  derived and/or modified sequence
atgcagttctttgggaggcttgtcaataccttttccggcgtaacaaacctgttttccaatccattcagggtgaaggaggttgcggtagccgactacacatcctctgatagggtgagagaagaagggcagctgattctgttccagaatacgcctaaccgtacctgggactgcgtactcgtaaacccaaggaacagccagtcagggtttcgcctgttccagctcgagctggaggctgatgctctggttaatttccatcaatacagttcccagctccttccattctacgagagttcgcctcaagtgcttcatactgaggtgctgcagcacctcactgacctcatacgcaatcacccatcttggagcgtagcccacctggccgtggagctgggaattcgagaatgttttcaccactctagaatcatatcgtgtgcaaactgcgccgaaaatgaggaggggtgcacccccctccatttggcctgtaggaaaggcgatggggaaatcctggtcgagctcgtgcagtactgccacactcagatggacgttaccgattacaaaggagagactgtctttcattacgcagtgcagggggataactcccaggtcttacaactgctgggcagaaacgccgttgctgggttaaatcaggttaataaccagggcctgactcccctccacttagcgtgtcagctgggaaaacaggagatggtgagggtgcttctgctgtgtaatgctaggtgtaatatcatgggaccgaatgggtaccctattcattctgctatgaaattcagccaaaaaggctgcgcagagatgataatcagcatggactcatctcagatccacagtaaggatccgaggtacggtgcaagccctctgcactgggcgaaaaacgcagagatggctagaatgctgctcaagcgtgggtgcaatgtcaattccacaagctccgcagggaatacggcgctgcatgtggccgtcatgcggaatcgcttcgactgcgccattgtcctactcacccatggtgcaaatgcagatgctcgaggggaacatggtaatacccctctgcacctggctatgagcaaggacaacgtagagatgatcaaagctctgattgtattcggggctgaagtcgacaccccgaacgatttcggcgagaccccaacttttcttgcctccaagatcgggaggctggtgacccgcaaggcgattctgacgcttctgaggaccgtcggagccgagtattgtttcccgcctattcacggcgtccccgcagagcagggcagcgccgctccccaccatccctttagccttgagcgggcacagcctcctccaataagcctgaacaacctggagttgcaggatctcatgcacatctctagagcccgaaagccagctttcatcctcggcagtatgcgcgacgagaaaagaacccatgatcacctgctgtgcttggacggaggtggggtgaagggcttaattatcatccagctgctcattgcaatcgagaaagcgagcggggtcgccactaaggatctcttcgactgggtggcaggcacttcaaccgggggtattttggccctggctatccttcactctaagtctatggcctacatgcgcggtatgtacttccggatgaaggacgaggtgttcagaggctctagaccatatgagagcggccctctggaagaatttctcaaaagggaatttggagagcacaccaaaatgactgacgttaggaaaccaaaagtgatgctgacgggcacgctttctgatcgtcagccagccgagttgcatctgttccggaactatgacgctcccgagaccgtacgcgagcctagattcaatcagaacgtcaatctgcggcctcctgctcaaccctctgaccagctggtgtggcgggctgccaggagttcaggcgctgccccaacctacttcagacccaatggtagatttcttgatggcggactgctggctaacaatcctactttggacgctatgaccgagatccacgaatataatcaggacttgataagaaaagggcaagccaacaaggtcaaaaaactttctatcgttgtgagcctgggcactgggcgaagcccacaggtaccagtgacttgcgttgatgtctttagacccagcaatccttgggagttagcaaaaactgtatttggtgcaaaagaactgggaaagatggtcgtggactgctgcaccgaccccgacggccgagccgttgaccgagccagggcctggtgtgaaatggtagggattcagtatttcaggctaaaccctcagctagggactgacattatgctagatgaagtcagtgatactgtcctggtgaatgctttatgggaaaccgaggtgtacatttacgaacatcgggaagagttccagaaactgatccaattgctactgtccccctag

SEQ ID NO: 139053 - DNA, 1440 bp, Artificial Sequence
  derived and/or modified sequence
atgcagttctttggccgtctggtcaacacgttctcgggggtgactaacctgtttagtaatccattcagggtgaaggaggtcgccgtggcggactatactagtagcgaccgcgtccgcgaggaagggcagcttatcctatttcagaatacgccaaaccgaacttgggattgcgtcttggtcaacccccgtaattctcagtctgggttcaggctgttccagctcgaactggaggctgacgcgttggtgaatttccatcagtacagctcccagctgcttcccttctacgaaagctcaccacaggttctgcatacagaggtgctgcaacacttaacagatttgatccgaaatcacccctcgtggagcgtggcacacctcgccgtggagttgggtattagggagtgttttcatcattcccggattatttcatgtgctaattgtgcagagaacgaagagggatgcactcccctgcatctagcctgtcgcaaaggcgacggggaaatcctggtagagctggttcagtattgtcacacacagatggatgttacagactataagggcgagaccgtgtttcattacgcagtgcagggcgataattcccaggtacttcagctcttagggagaaacgcagtggcaggcctgaaccaggtgaataatcaggggttgactcccttacacttggcctgccagttaggtaaacaggagatggtgcgagttctactgctctgcaacgccaggtgcaacatcatggggcctaatggctacccgatccactctgccatgaagttctctcagaagggttgcgcggagatgatcatctcaatggactctagccagattcatagtaaagaccctcggtacggggcttccccactgcactgggcaaagaacgccgaaatggccaggatgctcttaaagcgaggatgcaacgtgaactccaccagctctgctgggaatacagcccttcacgtggcagtgatgcgtaaccggtttgattgtgccattgtgctgctgacccacggcgctaatgcggacgccaggggcgagcatgggaacactccattgcacctggccatgtccaaggacaatgtggagatgataaaggcccttatcgtcttcggtgccgaggttgacacaccaaacgattttggcgaaacaccaacatttctggcatccaaaattggtaggctcgtcactaggaaagcaattctgactctgctcaggaccgtcggcgcagaatactgctttccgcctattcacggagtcccagccgaacagggaagtgccgcaccacaccatccgttcagcctggagcgagcccagcctccacccataagcctgaataacttagagcttcaagacctaatgcatatcagccgggcacggaaacctgcctttatcctgggaagcatgcgcgacgagaaaagaactgacagaacttag

SEQ ID NO: 139054 - DNA, 2004 bp, Artificial Sequence
  derived and/or modified sequence
atgcagtttttcgggcgactagtaaacacatttagtggcgtcacgaatttattttctaatccattcagagtaaaggaagtggccgtggccgattacacaagtagtgacagagtaagggaggaagggcaactaattttatttcagaacactccaaatcgcacctgggattgtgttctggttaatccaagaaacagccagtccggtttcaggctcttccaattggagttggaggcagatgctttggttaacttccaccagtatagctcacagctgggcaagcaggagatggttcgtgtccttcttttatgtaacgcgcgatgcaacattatgggaccaaacggttacccgattcattcagctatgaaattctcacagaaaggctgtgccgagatgataatttccatggacagcagccaaatacactccaaggaccccaggtatggcgcttccccactgcattgggctaaaaatgcagaaatggcgcgaatgttgcttaaacgcggatgcaatgtaaattccaccagcagcgcaggcaacaccgccctccacgtggctgtgatgcggaaccggtttgattgcgccattgtattgctcacgcacggagccaacgccgacgcccgaggtgaacacggcaacactcctctgcacctcgccatgtcgaaggacaatgtcgagatgattaaagctctgatagtatttggcgcagaagtcgacaccccaaatgacttcggagagacaccaacattcctggccagcaagataggcagacttgtgacccggaaagccattctcaccctcctgaggactgttggcgcagagtattgctttccgcctatccatggggtcccagccgagcagggttccgctgctcctcaccatccctttagcctagaacgcgctcaaccccctccaatctccctgaacaaccttgagctgcaggacttgatgcatatcagccgagcccgaaagcctgcttttatactgggatccatgagggacgagaagcggacacacgatcacttgctctgcctggacggcggaggcgtaaaagggctgatcatcattcagctgttgatcgccattgaaaaggcgtcaggggtggccacaaaggacctttttgattgggttgccggaacctccacaggtggcattcttgctctggctattcttcacagtaagtctatggcctacatgcgcggtatgtattttcggatgaaggatgaagttttccgcggatcgcgcccatacgagtcaggtcccttggaagagttcctcaagagagagtttggcgagcacactaaaatgactgacgttagaaagcctaaagtcatgctaacagggaccctgtctgacaggcagccggctgagctgcacttgtttcggaactatgacgcacctgaaacagtgagggaaccaaggttcaatcagaacgtgaatctgaggccacccgcacagcccagtgaccagctagtttggcgcgctgccagatcatcaggcgcagcacctacgtacttccgcccaaacgggagatttctggacggtggcctgttggccaataaccctactttggacgccatgaccgagatccacgagtacaaccaggatctgattcggaaagggcaagcgaataaagtgaagaagcttagtatagtagtaagtctggggaccggtcggagccctcaggttccggtcacatgcgtggacgtcttccggcctagcaatccctgggaacttgccaagaccgtgttcggtgcaaaggaactcggcaaaatggtggtggattgctgcacggacccggacggcagggccgttgatagggccagagcctggtgtgaaatggtggggattcaatactttcgactgaatccccagctcggtaccgacatcatgctggatgaagtgagcgacactgtgctggtcaatgctttgtgggagacggaagtctatatttatgagcaccgagaagaatttcagaagctgatccaactactgctttccccttag

SEQ ID NO: 139055 - DNA, 3271 bp, Artificial Sequence
  derived and/or modified sequence
aagtgctgagtaagccgaggtgagtgacctcgcgggtgggcggggcctgggggtccgttccccaacttcctcggcgctccggactcccaagtctccgccggaccctcctttggatattcctcgtgtctccgattctgagacagagggggaagacggtggggcctccccacctgccccgcagaagatgcagttctttggccgcctggtcaataccttcagtggcgtcaccaacttgttctctaacccattccgggtgaaggaggtggctgtggccgactacacctcgagtgaccgagttcgggaggaagggcagctgattctgttccagaacactcccaaccgcacctgggactgcgtcctggtcaaccccaggaactcacagagtggattccgactcttccagctggagttggaggctgacgccctagtgaatttccatcagtattcttcccagctgctacccttctatgagagctcccctcaggtcctgcacactgaggtcctgcagcacctgaccgacctcatccgtaaccaccccagctggtcagtggcccacctggctgtggagctagggatccgcgagtgcttccatcacagccgtatcatcagctgtgccaattgcgcggagaacgaggagggctgcacacccctgcacctggcctgccgcaagggtgatggggagatcctggtggagctggtgcagtactgccacactcagatggatgtcaccgactacaagggagagaccgtcttccattatgctgtccagggtgacaattctcaggtgctgcagctccttggaaggaacgcagtggctggcctgaaccaggtgaataaccaagggctgaccccgctgcacctggcctgccagctggggaagcaggagatggtccgcgtgctgctgctgtgcaatgctcggtgcaacatcatgggccccaacggctaccccatccactcggccatgaagttctctcagaaggggtgtgcggagatgatcatcagcatggacagcagccagatccacagcaaagacccccgttacggagccagccccctccactgggccaagaacgcagagatggcccgcatgctgctgaaacggggctgcaacgtgaacagcaccagctccgcggggaacacggccctgcacgtggcggtgatgcgcaaccgcttcgactgtgccatagtgctgctgacccacggggccaacgcggatgcccgcggagagcacggcaacaccccgctgcacctggccatgtcgaaagacaacgtggagatgatcaaggccctcatcgtgttcggagcagaagtggacaccccgaatgactttggggagactcctacattcctagcctccaaaatcggcagacttgtcaccaggaaggcgatcttgactctgctgagaaccgtgggggccgaatactgcttcccacccatccacggggtccccgcggagcagggctctgcagcgccacatcatcccttctccctggaaagagctcagcccccaccgatcagcctaaacaacctagaactacaggatctcatgcacatctcacgggcccggaagccagcgttcatcctgggctccatgagggacgagaagcggacccacgaccacctgctgtgcctggatggaggaggagtgaaaggcctcatcatcatccagctcctcatcgccatcgagaaggcctcgggtgtggccaccaaggacctgtttgactgggtggcgggcaccagcactggaggcatcctggccctggccattctgcacagtaagtccatggcctacatgcgcggcatgtactttcgcatgaaggatgaggtgttccggggctccaggccctacgagtcggggcccctggaggagttcctgaagcgggagtttggggagcacaccaagatgacggacgtcaggaaacccaaggtgatgctgacagggacactgtctgaccggcagccggctgaactccacctcttccggaactacgatgctccagaaactgtccgggagcctcgtttcaaccagaacgttaacctcaggcctccagctcagccctcagaccagctggtgtggcgggcggcccgaagcagcggggcagctcctacttacttccgacccaatgggcgcttcctggacggtgggctgctggccaacaaccccacgctggatgccatgaccgagatccatgagtacaatcaggacctgatccgcaagggtcaggccaacaaggtgaagaaactctccatcgttgtctccctggggacagggaggtccccacaagtgcctgtgacctgtgtggatgtcttccgtcccagcaacccctgggagctggccaagactgtttttggggccaaggaactgggcaagatggtggtggactgttgcacggatccagacgggcgggctgtggaccgggcacgggcctggtgcgagatggtcggcatccagtacttcagattgaacccccagctggggacggacatcatgctggatgaggtcagtgacacagtgctggtcaacgccctctgggagaccgaggtctacatctatgagcaccgcgaggagttccagaagctcatccagctgctgctctcaccctgagggtccccagcctctcaccggccccagctgacctcgtccattcagcccctgccaggccaagcccagccactgccctcccgggcagatctgggcccaggcacctctgagtccatagaccaggcctgggagaatgccaagctgcctgcccgaggctggtcctgaaggcctgtctcccactaaccccgccttccagcactttctgtcattccaggctgggaaagtctagagccccctttggcccctttccctgactgtcaaggacaactgactcccccatcagctcaaacattaagggtacccgggcacaaccgtacccctgcccccagccccagcctccctgagggcctgccgggctgcctctgccccagcccccagcaagggcactcccaggcttcctggtgggtgcagcccactccctctgccctctgctccgttccctgggggctgggactaaagaaatgggtgtcccccaccccatcagctgggaaagcccaggccgcaggagtgggatgcccgttggactttgcccctcacactggcccagcccctcacactgccccaccccgagaaccctcagctctcaaaggtcactcctgggagtttcttcttcccaatggaagtggcttaagagccaaaactgaaataaatcatttggattcaagttca

SEQ ID NO: 139056 - DNA, 1567 bp, Artificial Sequence
  derived and/or modified sequence
ccgttccccaacttcctcggcgctccggactcccaagtctccgccggaccctcctttggatattcctcgtgtctccgattctgagacagagggggaagacggtggggcctccccacctgccccgcagaagatgcagttctttggccgcctggtcaataccttcagtggcgtcaccaacttgttctctaacccattccgggtgaaggaggtggctgtggccgactacacctcgagtgaccgagttcgggaggaagggcagctgattctgttccagaacactcccaaccgcacctgggactgcgtcctggtcaaccccaggaactcacagagtggattccgactcttccagctggagttggaggctgacgccctagtgaatttccatcagtattcttcccagctgctacccttctatgagagctcccctcaggtcctgcacactgaggtcctgcagcacctgaccgacctcatccgtaaccaccccagctggtcagtggcccacctggctgtggagctagggatccgcgagtgcttccatcacagccgtatcatcagctgtgccaattgcgcggagaacgaggagggctgcacacccctgcacctggcctgccgcaagggtgatggggagatcctggtggagctggtgcagtactgccacactcagatggatgtcaccgactacaagggagagaccgtcttccattatgctgtccagggtgacaattctcaggtgctgcagctccttggaaggaacgcagtggctggcctgaaccaggtgaataaccaagggctgaccccgctgcacctggcctgccagctggggaagcaggagatggtccgcgtgctgctgctgtgcaatgctcggtgcaacatcatgggccccaacggctaccccatccactcggccatgaagttctctcagaaggggtgtgcggagatgatcatcagcatggacagcagccagatccacagcaaagacccccgttacggagccagccccctccactgggccaagaacgcagagatggcccgcatgctgctgaaacggggctgcaacgtgaacagcaccagctccgcggggaacacggccctgcacgtggcggtgatgcgcaaccgcttcgactgtgccatagtgctgctgacccacggggccaacgcggatgcccgcggagagcacggcaacaccccgctgcacctggccatgtcgaaagacaacgtggagatgatcaaggccctcatcgtgttcggagcagaagtggacaccccgaatgactttggggagactcctacattcctagcctccaaaatcggcagacttgtcaccaggaaggcgatcttgactctgctgagaaccgtgggggccgaatactgcttcccacccatccacggggtccccgcggagcagggctctgcagcgccacatcatcccttctccctggaaagagctcagcccccaccgatcagcctaaacaacctagaactacaggatctcatgcacatctcacgggcccggaagccagcgttcatcctgggctccatgagggacgagaagcggacagacagaaca

SEQ ID NO: 139057 - DNA, 2755 bp, Artificial Sequence
  derived and/or modified sequence
ttgtttgcggaagtaggaggaagtagaagtgctgagtaagccgagagggggaagacggtggggcctccccacctgccccgcagaagatgcagttctttggccgcctggtcaataccttcagtggcgtcaccaacttgttctctaacccattccgggtgaaggaggtggctgtggccgactacacctcgagtgaccgagttcgggaggaagggcagctgattctgttccagaacactcccaaccgcacctgggactgcgtcctggtcaaccccaggaactcacagagtggattccgactcttccagctggagttggaggctgacgccctagtgaatttccatcagtattcttcccagctggggaagcaggagatggtccgcgtgctgctgctgtgcaatgctcggtgcaacatcatgggccccaacggctaccccatccactcggccatgaagttctctcagaaggggtgtgcggagatgatcatcagcatggacagcagccagatccacagcaaagacccccgttacggagccagccccctccactgggccaagaacgcagagatggcccgcatgctgctgaaacggggctgcaacgtgaacagcaccagctccgcggggaacacggccctgcacgtggcggtgatgcgcaaccgcttcgactgtgccatagtgctgctgacccacggggccaacgcggatgcccgcggagagcacggcaacaccccgctgcacctggccatgtcgaaagacaacgtggagatgatcaaggccctcatcgtgttcggagcagaagtggacaccccgaatgactttggggagactcctacattcctagcctccaaaatcggcagacttgtcaccaggaaggcgatcttgactctgctgagaaccgtgggggccgaatactgcttcccacccatccacggggtccccgcggagcagggctctgcagcgccacatcatcccttctccctggaaagagctcagcccccaccgatcagcctaaacaacctagaactacaggatctcatgcacatctcacgggcccggaagccagcgttcatcctgggctccatgagggacgagaagcggacccacgaccacctgctgtgcctggatggaggaggagtgaaaggcctcatcatcatccagctcctcatcgccatcgagaaggcctcgggtgtggccaccaaggacctgtttgactgggtggcgggcaccagcactggaggcatcctggccctggccattctgcacagtaagtccatggcctacatgcgcggcatgtactttcgcatgaaggatgaggtgttccggggctccaggccctacgagtcggggcccctggaggagttcctgaagcgggagtttggggagcacaccaagatgacggacgtcaggaaacccaaggtgatgctgacagggacactgtctgaccggcagccggctgaactccacctcttccggaactacgatgctccagaaactgtccgggagcctcgtttcaaccagaacgttaacctcaggcctccagctcagccctcagaccagctggtgtggcgggcggcccgaagcagcggggcagctcctacttacttccgacccaatgggcgcttcctggacggtgggctgctggccaacaaccccacgctggatgccatgaccgagatccatgagtacaatcaggacctgatccgcaagggtcaggccaacaaggtgaagaaactctccatcgttgtctccctggggacagggaggtccccacaagtgcctgtgacctgtgtggatgtcttccgtcccagcaacccctgggagctggccaagactgtttttggggccaaggaactgggcaagatggtggtggactgttgcacggatccagacgggcgggctgtggaccgggcacgggcctggtgcgagatggtcggcatccagtacttcagattgaacccccagctggggacggacatcatgctggatgaggtcagtgacacagtgctggtcaacgccctctgggagaccgaggtctacatctatgagcaccgcgaggagttccagaagctcatccagctgctgctctcaccctgagggtccccagcctctcaccggccccagctgacctcgtccattcagcccctgccaggccaagcccagccactgccctcccgggcagatctgggcccaggcacctctgagtccatagaccaggcctgggagaatgccaagctgcctgcccgaggctggtcctgaaggcctgtctcccactaaccccgccttccagcactttctgtcattccaggctgggaaagtctagagccccctttggcccctttccctgactgtcaaggacaactgactcccccatcagctcaaacattaagggtacccgggcacaaccgtacccctgcccccagccccagcctccctgagggcctgccgggctgcctctgccccagcccccagcaagggcactcccaggcttcctggtgggtgcagcccactccctctgccctctgctccgttccctgggggctgggactaaagaaatgggtgtcccccaccccatcagctgggaaagcccaggccgcaggagtgggatgcccgttggactttgcccctcacactggcccagcccctcacactgccccaccccgagaaccctcagctctcaaaggtcactcctgggagtttcttcttcccaatggaagtggcttaagagccaaaactgaaataaatcatttggattcaagttc

SEQ ID NO: 139058 - protein, 165 aa, Artificial Sequence
  derived and/or modified sequence
MGPLPVCLPIMLLLLLPSLLLLLLLPGPGSGEASRILRVHRRGILELAGTVGCVGPRTPIAYMKYGCFCGLGGHGQPRDAIDWCCHGHDCCYTRAEEAGCSPKTERYSWQCVNQSVLCGPAENKCQELLCKCDQEIANCLAQTEYNLKYLFYPQFLCEPDSPKCD

SEQ ID NO: 139059 - DNA, 498 bp, Artificial Sequence
  derived and/or modified sequence
atgggccccctgcccgtgtgcctgcccatcatgctgctgctgctgctgcccagcctgctgctgctgctgctgctgcccggccccggcagcggcgaggccagcagaatcctgagagtgcacagaagaggcatcctggagctggccggcaccgtgggctgcgtgggccccagaacccccatcgcctacatgaagtacggctgcttctgcggcctgggcggccacggccagcccagagacgccatcgactggtgctgccacggccacgactgctgctacaccagagccgaggaggccggctgcagccccaagaccgagagatacagctggcagtgcgtgaaccagagcgtgctgtgcggccccgccgagaacaagtgccaggagctgctgtgcaagtgcgaccaggagatcgccaactgcctggcccagaccgagtacaacctgaagtacctgttctacccccagttcctgtgcgagcccgacagccccaagtgcgactag

SEQ ID NO: 139060 - DNA, 498 bp, Artificial Sequence
  derived and/or modified sequence
atgggtccgctccctgtttgcttacccatcatgttattactcctgctgccatctctattacttcttttgttgctccccggcccagggagcggagaagcctctagaattctaagggttcaccgccggggcattcttgaattagccgggacagtgggctgcgtcgggcctcggactccgatcgcctatatgaagtacgggtgtttttgtggtctaggagggcatgggcaaccccgggatgcaatagactggtgctgtcatggccatgactgctgttatacgcgcgcggaggaagctgggtgttcccccaaaacagaaagatattcatggcagtgcgtgaaccaatccgtattatgcgggccagctgagaacaaatgtcaggagcttctttgcaagtgcgatcaggagatcgctaattgcctcgcacagacagagtacaacttgaagtacttgttttatccgcagtttctgtgcgagccagactctcccaagtgtgattag

SEQ ID NO: 139061 - DNA, 498 bp, Artificial Sequence
  derived and/or modified sequence
atgggacccctcccagtctgtcttcccatcatgctacttctcctattgccgtccctgctacttctgctgctgcttccagggcccggctcaggagaagcgagccgaatactgcgagtacaccggcgggggattctggaactggccggcactgttggatgcgtcgggccacggacccctattgcatacatgaagtacgggtgcttctgcggcctgggcggtcatggacaaccgcgggacgctattgattggtgctgccacgggcatgattgctgttacactagagccgaggaagccggttgtagccccaaaaccgaacgttactcatggcagtgtgtcaaccagtctgttctatgtggacctgccgagaacaagtgtcaggagctcctctgcaagtgtgatcaggaaattgctaactgtcttgcccaaactgagtataacctgaagtatctgttttatccccagtttctttgtgaacccgactccccaaagtgtgattag

SEQ ID NO: 139062 - DNA, 498 bp, Artificial Sequence
  derived and/or modified sequence
atgggccccctgcctgtgtgcctgcccatcatgctgctgctgctgctgcccagcctgctgctgctgctgctgctgcccggccctggcagcggggaggccagccgcatcctgcgggtgcacagaagaggcatcctggagctggccggcaccgtgggctgtgtgggccccaggacccccatcgcctacatgaagtatggctgcttctgtggcctgggcggccacggccagcccagagatgccatcgactggtgctgccacggccatgactgctgctacaccagggctgaggaggccggctgcagccccaagacagagcgctacagctggcagtgtgtgaaccagagcgtgctgtgtggccctgctgagaacaagtgccaggagctgctgtgcaagtgtgaccaggagatcgccaactgcctggcccagacagagtacaacctgaagtacctgttctacccccagttcctgtgtgagccagacagccccaagtgtgactag

SEQ ID NO: 139063 - DNA, 498 bp, Artificial Sequence
  derived and/or modified sequence
atgggccccctgcccgtgtgcctgcccatcatgctgctgctgctgttgccctccttgcttctgctccttctccttcctggacctggcagtggcgaagccagtaggatattgcgcgtccaccgacggggcattctggaactggcaggaaccgtaggctgcgtggggcctagaacacctatcgcatacatgaagtatggatgtttctgcggactggggggacatggtcagccgagagatgcaattgattggtgttgtcacggccacgactgttgttacacgagggctgaggaggcgggctgtagtccaaagaccgaaaggtactcatggcagtgtgttaatcagtccgtgctttgcggccctgccgagaataagtgtcaggagctcctgtgcaagtgtgatcaggagatagccaactgccttgctcaaactgagtataatctgaaatacctattctaccctcagttcctctgcgagcccgattctccgaagtgcgattag

SEQ ID NO: 139064 - DNA, 498 bp, Artificial Sequence
  derived and/or modified sequence
atgggccccctgcccgtgtgcctgcccatcatgctgctgctgctgcttccttctctgcttttgttactgcttctgcccgggccagggtccggcgaggcctcccgcatcctacgagtgcataggcgcgggatactcgagttagccggcaccgttggctgtgtgggaccaaggactccgattgcctatatgaagtacggctgcttttgcggtctcggaggtcatggccagccgagagatgctattgattggtgctgtcacgggcacgactgttgctatactagggccgaggaggccggctgctcaccaaaaacggagcgatactcctggcagtgcgtcaatcagagtgtactgtgtggtcccgcggagaataaatgccaggaattgctttgcaaatgtgatcaagagatcgcgaactgtctggcccagactgaatataacctgaagtacctgttttatccccagtttctgtgcgaacccgatagtcctaaatgcgattag

SEQ ID NO: 139065 - DNA, 498 bp, Artificial Sequence
  derived and/or modified sequence
atggggccactgccggtgtgtcttcccataatgctccttctcctgctcccaagtttgctcctattgctattgctccccggacctgggtccggcgaagcctcgagaatccttagagtccaccgcagagggatccttgagctggcaggtaccgtggggtgtgtgggacccaggacacccattgcctatatgaagtacggttgcttctgtggactgggaggccacggacagcctagggatgcgattgattggtgctgccatggccacgattgttgttacacacgggctgaagaagctggctgtagtcccaaaacagagagatactcctggcagtgtgtgaaccaatcagtcttatgcggacccgctgagaacaagtgccaggagctgctgtgcaaatgcgatcaggagatcgcgaactgcttagcccagacagagtataatctgaaatacctgttttacccccagttcctttgcgagcccgatagcccaaagtgtgactag

SEQ ID NO: 139066 - DNA, 498 bp, Artificial Sequence
  derived and/or modified sequence
atgggacccttgcctgtgtgcttaccaattatgttgttactgcttctgccatcactgctcctcttgctcctgctgccaggtccaggcagtggtgaagccagtaggatcctgagagtccaccgccgaggcatcctggagctggcagggacagtgggatgtgtgggaccaagaacccccattgcctatatgaagtacggctgcttctgcggactgggtggccacggtcaacctagggacgccatcgattggtgttgccacggccatgactgctgctacactagggcagaggaggcaggctgttcccctaaaaccgagagatatagctggcagtgcgtgaatcagtctgtcttgtgtggtcccgctgagaataaatgccaggaactgctatgcaagtgcgatcaggaaatagcaaactgcctggctcagacggagtataacctgaagtacctgttctacccgcagtttctgtgcgagccagatagccccaaatgcgactag

SEQ ID NO: 139067 - DNA, 995 bp, Artificial Sequence
  derived and/or modified sequence
ggccttccaaagtgctgggattacaggcgtgagtcaccgcgcccggccaaataaaataaaatgttaaagcaaattcaggactacccctcctccaagtcttctgttccctttgggcgcccaggtgagcgggggaggggctgggggagtaataacatcaaaagagcgccttttcctcccttattccgaggagacttccctgggcctgactcccggtcctgtccccagcgccccgcggcctctggagccccttcagtgaccaagatacagagatcaggacgcctttgcgccgccccaggtgcccgcccctagctggctctgcttgggccgcgagggaaggtgaggtcgggggcggagccggggcgtgacagccggggtgtgtgtccgccgggcttggtgcctccggtggccctgcagcaccgtcccacctctgccaccctccgatggggccgctacctgtgtgcctgccaatcatgctgctcctgctactgccgtcgctgctgctgctgctgcttctacctggccccgggtccggcgaggcctccaggatattacgtgtgcaccggcgtgggatcctggaactggcaggaactgtgggttgtgttggtccccgaacccccatcgcctatatgaaatatggttgcttttgtggcttgggaggccatggccagccccgcgatgccattgactggtgctgccatggccacgactgttgttacactcgagctgaggaggccggctgcagccccaagacagagcgctactcctggcagtgcgtcaatcagagcgtcctgtgcggaccggcagagaacaaatgccaagaactgttgtgcaagtgtgaccaggagattgctaactgcttagcccaaactgagtacaacttaaagtacctcttctacccccagttcctatgtgagccggactcgcccaagtgtgactgactaccttgacttgaaatgctcttttgcacaaggaaataaagcgtcctctcagtaatg

SEQ ID NO: 139068 - DNA, 1000 bp, Artificial Sequence
  derived and/or modified sequence
ggccttccaaagtgctgggattacaggcgtgagtcaccgcgcccggccaaataaaataaaatgttaaagcaaattcaggactacccctcctccaagtcttctgttccctttgggcgcccaggtgagcgggggaggggctgggggagtaataacatcaaaagagcgccttttcctcccttattccgaggagacttccctgggcctgactcccggtcctgtccccagcgccccgcggcctctggagccccttcagtgaccaagatacagagatcaggacgcctttgcgccgccccaggtgcccgcccctagctggctctgcttgggccgcgagggaaggtgaggtcgggggcggagccggggcgtgacagccggggtgtgtgtccgccgggcttggtgcctccggtggccctgcagcaccgtcccacctctgccaccctccgatggggccgctacctgtgtgcctgccaatcatgctgctcctgctactgccgtcgctgctgctgctgctgcttctacctggccccgggtccggcgaggcctccaggatattacgtgtgcaccggcgtgggatcctggaactggcaggaactgtgggttgtgttggtccccgaacccccatcgcctatatgaaatatggttgcttttgtggcttgggaggccatggccagccccgcgatgccattgactggtgctgccatggccacgactgttgttacactcgagctgaggaggccggctgcagccccaagacagagcgctactcctggcagtgcgtcaatcagagcgtcctgtgcggaccggcagagaacaaatgccaagaactgttgtgcaagtgtgaccaggagattgctaactgcttagcccaaactgagtacaacttaaagtacctcttctacccccagttcctatgtgagccggactcgcccaagtgtgactgactaccttgacttgaaatgctcttttgcacaaggaaataaagcgtcctctcagtaatgaacaa

SEQ ID NO: 139069 - protein, 374 aa, Artificial Sequence
  derived and/or modified sequence
MSRVPSPPPPAEMSSGPVAESWCYTQIKVVKFSYMWTINNFSFCREEMGEVIKSSTFSSGANDKLKWCLRVNPKGLDEESKDYLSLYLLLVSCPKSEVRAKFKFSILNAKGEETKAMESQRAYRFVQGKDWGFKKFIRRDFLLDEANGLLPDDKLTLFCEVSVVQDSVNISGQNTMNMVKVPECRLADELGGLWENSRFTDCCLCVAGQEFQAHKAILAARSPVFSAMFEHEMEESKKNRVEINDVEPEVFKEMMCFIYTGKAPNLDKMADDLLAAADKYALERLKVMCEDALCSNLSVENAAEILILADLHSADQLKTQAVDFINYHASDVLETSGWKSMVVSHPHLVAEAYRSLASAQCPFLGPPRKRLKQS

SEQ ID NO: 139070 - protein, 32 aa, Artificial Sequence
  derived and/or modified sequence
MSRVPSPPPPAEMSSGPVAESWCYTQIKVVKF

SEQ ID NO: 139071 - protein, 258 aa, Artificial Sequence
  derived and/or modified sequence
MESQRAYRFVQGKDWGFKKFIRRDFLLDEANGLLPDDKLTLFCEVSVVQDSVNISGQNTMNMVKVPECRLADELGGLWENSRFTDCCLCVAGQEFQAHKAILAARSPVFSAMFEHEMEESKKNRVEINDVEPEVFKEMMCFIYTGKAPNLDKMADDLLAAADKYALERLKVMCEDALCSNLSVENAAEILILADLHSADQLKTQAVDFINYHASDVLETSGWKSMVVSHPHLVAEAYRSLASAQCPFLGPPRKRLKQS

SEQ ID NO: 139072 - protein, 238 aa, Artificial Sequence
  derived and/or modified sequence
MSRVPSPPPPAEMSSGPVAESWCYTQIKVVKFSYMWTINNFSFCREEMGEVIKSSTFSSGANDKLKWCLRVNPKGLDEESKDYLSLYLLLVSCPKSEVRAKFKFSILNAKGEETKAMESQRAYRFVQGKDWGFKKFIRRDFLLDEANGLLPDDKLTLFCEVSVVQDSVNISGQNTMNMVKVPECRLADELGGLWENSRFTDCCLCVAGQEFQAHKAILAARSPVFSAMFEHEMEESKK

SEQ ID NO: 139073 - protein, 186 aa, Artificial Sequence
  derived and/or modified sequence
MSRVPSPPPPAEMSSGPVAESWCYTQIKVVKFSYMWTINNFSFCREEMGEVIKSSTFSSGANDKLKWCLRVNPKGLDEESKDYLSLYLLLVSCPKSEVRAKFKFSILNAKGEETKAMESQRAYRFVQGKDWGFKKFIRRDFLLDEANGLLPDDKLTLFCEVSVVQDSVNISGQNTMNMVKVPECRL

SEQ ID NO: 139074 - protein, 40 aa, Artificial Sequence
  derived and/or modified sequence
MSRVPSPPPPAEMSSGPVAESWCYTQIKVVKFSYMWTINN

SEQ ID NO: 139075 - protein, 262 aa, Artificial Sequence
  derived and/or modified sequence
MSRVPSPPPPAEMSSGPVAESWCYTQIKVVKFSYMWTINNFSFCREEMGEVIKSSTFSSGANDKLKWCLRVNPKGLDEESKDYLSLYLLLVSCPKSEVRAKFKFSILNAKGEETKAMESQRAYRFVQGKDWGFKKFIRRDFLLDEANGLLPDDKLTLFCEVSVVQDSVNISGQNTMNMVKVPECRLADELGGLWENSRFTDCCLCVAGQEFQAHKAILAARSPVFSAMFEHEMEESKKNRVEINDVEPEVFKEMMCFIYTGK

SEQ ID NO: 139076 - protein, 66 aa, Artificial Sequence
  derived and/or modified sequence
MSRVPSPPPPAEMSSGPVAESWCYTQIKVVKFSYMWTINNFSFCREEMGEVIKSSTFSSGANDKLK

SEQ ID NO: 139077 - protein, 327 aa, Artificial Sequence
  derived and/or modified sequence
MGEVIKSSTFSSGANDKLKWCLRVNPKGLDEESKDYLSLYLLLVSCPKSEVRAKFKFSILNAKGEETKAMESQRAYRFVQGKDWGFKKFIRRDFLLDEANGLLPDDKLTLFCEVSVVQDSVNISGQNTMNMVKVPECRLADELGGLWENSRFTDCCLCVAGQEFQAHKAILAARSPVFSAMFEHEMEESKKNRVEINDVEPEVFKEMMCFIYTGKAPNLDKMADDLLAAADKYALERLKVMCEDALCSNLSVENAAEILILADLHSADQLKTQAVDFINYHASDVLETSGWKSMVVSHPHLVAEAYRSLASAQCPFLGPPRKRLKQS

SEQ ID NO: 139078 - protein, 138 aa, Artificial Sequence
  derived and/or modified sequence
MSRVPSPPPPAEMSSGPVAESWCYTQIKVVKFSYMWTINNFSFCREEMGEVIKSSTFSSGANDKLKWCLRVNPKGLDEESKDYLSLYLLLVSCPKSEVRAKFKFSILNAKGEETKAMESQRAYRFVQGKDWGFKKFIR

SEQ ID NO: 139079 - protein, 117 aa, Artificial Sequence
  derived and/or modified sequence
MSRVPSPPPPAEMSSGPVAESWCYTQIKVVKFSYMWTINNFSFCREEMGEVIKSSTFSSGANDKLKWCLRVNPKGLDEESKDYLSLYLLLVSCPKSEVRAKFKFSILNAKGEETKAM

SEQ ID NO: 139080 - DNA, 1125 bp, Artificial Sequence
  derived and/or modified sequence
atgagcagggtcccttctcctcccccacccgccgagatgtcctcaggccccgtcgcagaaagttggtgctacacccaaattaaagtggtgaagtttagttatatgtggactatcaacaatttttcattctgtagagaggaaatgggtgaagtgataaagtctagcacattttcatccggagctaacgataaactgaaatggtgtctgagggtgaaccctaaaggcctggacgaggaatctaaagactatcttagcctctacctcctcctggtatcctgccctaaaagcgaagtccgggctaagttcaagttcagtatccttaatgcgaagggagaagagactaaggcaatggaaagccagagggcctatcgcttcgtgcaaggcaaggattggggcttcaagaaatttatcaggagggactttcttctggatgaggcaaacggcctcctgccagacgacaagctaaccttgttctgtgaggtctccgttgttcaggatagtgttaacattagcgggcaaaacaccatgaatatggttaaagtcccagagtgccggctcgcggacgaactaggcggtctatgggaaaactccaggtttacggactgctgtttatgtgtcgccggccaggaattccaggcgcacaaggcaatcctcgctgcacggtctccagtgttctccgcaatgttcgagcacgagatggaagaatcaaaaaagaacagagtggaaataaacgatgtggagccggaagtgtttaaggagatgatgtgtttcatttacaccgggaaagcccccaacctcgataagatggcagatgacctcctcgctgccgccgataagtacgccctggaacggctgaaagttatgtgcgaggacgctctgtgcagcaacttatccgtcgagaatgccgcagaaatcctgatcctagccgacctgcattctgctgaccagctaaaaacacaggccgtagatttcatcaattatcacgcctccgacgtgttagaaacctctgggtggaaatctatggtcgtgtctcacccgcacctggtggccgaggcatacaggtctctggcctcagctcaatgcccttttctcgggcctccccggaagaggctgaaacagagctag

SEQ ID NO: 139081 - DNA, 1125 bp, Artificial Sequence
  derived and/or modified sequence
atgtcccgggtccctagcccacctcccccagccgagatgtccagcggcccagtcgcggagagctggtgctatacccagatcaaagtcgtcaaattttcctacatgtggacaataaacaatttttcattctgccgcgaagaaatgggagaggttattaagagctcaaccttcagcagtggggctaacgacaaactcaaatggtgcttgagggtcaatcctaagggtctggatgaggaaagcaaagactatttgtccctctatctgttgttggtatcctgtcctaagtctgaagttcgggcgaaatttaaattcagcatactaaatgcgaagggggaagaaacgaaggctatggagtcccaaagggcctataggttcgttcagggcaaagactgggggttcaaaaaattcattcgcagagatttcctgctggatgaggcaaacgggcttttgcccgacgacaagttaacactcttctgcgaagtgagcgtggtacaggatagcgtaaatatctcggggcagaataccatgaatatggtgaaagtacccgagtgtagactggctgacgagctgggcggcctgtgggaaaattctcggttcaccgactgctgcctatgtgtagcagggcaggaatttcaggcacacaaggctatcctggcagcccgcagcccagtcttttctgctatgttcgaacatgagatggaggagagtaaaaaaaatcgtgtcgagatcaacgatgtggagcctgaagtgtttaaagaaatgatgtgcttcatctacacaggcaaggcgccgaatctggacaagatggccgatgaccttttagccgccgccgacaagtatgccctagagcggctgaaggtgatgtgtgaggacgccctctgctcaaatttgtctgtggaaaacgctgccgaaatactgatccttgccgatctgcactctgcagatcagttaaagactcaggccgtcgatttcatcaattatcacgcctccgacgtgctggaaacctccgggtggaagtcaatggttgtatctcacccccacttggttgccgaggcttaccggtccctggcatctgctcagtgtccattccttggccccccgcggaagcgccttaagcaatcctag

SEQ ID NO: 139082 - DNA, 1125 bp, Artificial Sequence
  derived and/or modified sequence
atgtcccgggtgcctagccccccccctcctgccgagatgtcaagtggacccgttgctgagtcctggtgttacacacagatcaaggtagtgaagttctcctacatgtggactattaataatttctcattctgtcgcgaagagatgggggaggtaatcaaatcatcaaccttttccagtggcgctaatgacaaactgaagtggtgcctgagagtgaatccgaaaggcctcgatgaagagtcaaaagactacctgagtttgtacctgctcttggtgtcatgccccaagagtgaagtacgcgccaaatttaagttcagcatattaaatgctaaaggggaggagactaaggcaatggagtcgcagagagcatatagattcgtacagggcaaggattgggggtttaagaaatttataagaagggacttcttactggatgaggccaatggcctcctcccagacgacaagctgacacttttttgcgaggtcagtgtagtgcaggacagtgtcaacataagcggccagaataccatgaatatggtaaaagtgccggaatgtagactcgccgatgaacttggcggcctgtgggaaaattcccgctttactgattgttgcttatgcgtggccggccaggaatttcaagctcataaagctatcttggcagcccgcagccctgtgttttctgccatgttcgagcacgaaatggaggagtctaaaaaaaaccgagttgagatcaacgatgttgaaccagaggtcttcaaggagatgatgtgcttcatctatacgggaaaggcgcccaatctggataagatggctgacgatctgttggcggctgccgacaaatatgcccttgagaggttaaaagttatgtgtgaagatgccttgtgtagcaatctatccgttgagaatgccgcagaaattttgatcctagcagatttacattctgcggatcaactgaaaacccaggcagtagactttatcaattatcacgcctccgacgtgcttgagacttccggatggaagagcatggtggtctctcacccccacctggttgccgaggcgtaccgttccctagcttctgcccagtgcccctttttagggcccccgaggaaaaggctgaagcaaagttag

SEQ ID NO: 139083 - DNA, 99 bp, Artificial Sequence
  derived and/or modified sequence
atgagccgcgtgccctctccccctccgccagccgagatgagttccggacctgtagcagaatcgtggtgttacactcagataaaagtcgtgaaattttag

SEQ ID NO: 139084 - DNA, 777 bp, Artificial Sequence
  derived and/or modified sequence
atggagagccaaagggcgtataggtttgttcaggggaaagactggggattcaagaagttcatccgccgcgactttttgctcgatgaagcaaatggactcctccccgacgataaactgacccttttctgcgaagtctccgtcgtacaagatagcgtgaatatctcaggtcaaaacaccatgaatatggttaaggttcctgagtgtagacttgcggacgaactgggcggactctgggagaattctcggtttacagactgctgtctttgcgtggccggccaggaattccaggcccataaggccatccttgccgcccggtcccctgtgttttcagcgatgttcgaacacgagatggaggagtccaagaaaaacagggtggagatcaacgatgttgaaccggaggtgtttaaggagatgatgtgcttcatatacaccggaaaagctccaaacctggacaaaatggccgacgatctcttagccgccgccgataaatatgcactagaacggcttaaggtcatgtgcgaggacgccctgtgctctaacctgagtgtcgaaaacgctgccgaaattcttatcttagccgatctgcattcagccgaccagcttaaaacccaagcagtcgactttatcaactaccacgcatccgatgtcctcgagacaagcgggtggaagtctatggtggtgtcccacccacacttagtggcagaggcttatcggagcctggcatccgctcagtgccctttcctcggaccacctcgaaagagactgaagcagagctag

SEQ ID NO: 139085 - DNA, 1125 bp, Artificial Sequence
  derived and/or modified sequence
atgtccagggttccctctcctccacctcctgctgagatgtcctccggccccgtcgcagagtcctggtgttacactcagataaaagtcgtgaaatttagttatatgtggaccataaacaatttcagcttttgccgtgaagaaatgggcgaagtgattaagagcagcaccttctcaagtggagccaatgataaactgaagtggtgtctccgggtgaaccccaaggggctagatgaggagtctaaggactacctctcactgtacctgttactggtgagctgtcccaaaagcgaggtgcgagccaagtttaagttttcaattctgaacgccaaaggtgaggagactaaagctatggagtcccaacgggcctataggtttgttcagggtaaggactggggttttaagaaatttataaggcgcgattttttactggacgaagcaaacggcctgctgcccgacgataagctgaccctcttttgtgaagtttctgtcgtgcaggacagcgtgaacatctcagggcagaacaccatgaatatggtcaaggttccggaatgtagactcgctgatgaattaggcggcctctgggaaaattcccgtttcactgattgttgcttatgtgtggctggccaagaattccaggcacacaaggcgattcttgcagctagatcccccgtgttcagtgctatgttcgagcatgagatggaagagtccaaaaagaatcgagtggagataaacgacgtggagcccgaggtattcaaggagatgatgtgctttatatacacaggaaaagccccaaatctggataaaatggccgacgacctattggccgcagcagacaagtatgcactggaacgactgaaagtgatgtgcgaagacgctctgtgcagcaatcttagcgtggagaacgcggctgagatccttatactagctgatctccactcagccgaccagctcaaaacacaggccgttgatttcattaactatcacgccagtgacgtcctggagacatctggttggaagtccatggttgtttctcacccacatctggtggccgaagcctaccggtctctggcttccgcccagtgcccctttctcggtcctcctaggaagcgtttaaagcagtcttag

SEQ ID NO: 139086 - DNA, 1125 bp, Artificial Sequence
  derived and/or modified sequence
atgagccgggtgcccagtcctcccccccccgccgagatgtctagtggaccagtcgccgagtcctggtgttatacccagattaaagtcgtcaaattttcctatatgtggacaattaataatttttccttctgcagggaagagatgggagaagtgattaaaagcagtacattctcttccggcgcgaacgacaagcttaaatggtgtctgcgtgtgaatccaaagggcttggacgaagaatccaaggactacctatcactgtatctactgctagtcagctgtcctaagtctgaagtgcgagctaagtttaaattttccatattgaacgctaaaggcgaggagactaaagctatggagagtcagcgggcctacagattcgttcaaggcaaggactggggattcaagaaatttatccggagagatttcttactggatgaggctaacggtctactgcccgacgataagttaactctcttttgtgaggtttctgtcgtgcaggatagcgttaacatttcaggtcagaacactatgaatatggtgaaagttccagaatgtcgcctggccgatgagttagggggcctgtgggagaactcacgcttcacggactgctgcttgtgcgttgcagggcaggaatttcaggcgcacaaagcaatcctcgccgctcgcagcccagtgttcagcgctatgtttgagcatgaaatggaagagagcaaaaagaaccgcgtggaaatcaatgatgtggaacccgaagtatttaaagaaatgatgtgtttcatttacaccggtaaagcacctaatcttgacaagatggccgacgacctcttagcagcggcggataagtacgctcttgaacgccttaaggttatgtgcgaggatgctctttgctccaatttgtctgtcgagaacgcggccgagattctgattcttgctgacctacattcagcagatcagctgaaaacacaggctgtcgactttataaattatcacgcttccgacgtgctagagactagtgggtggaagagcatggtggtgagccacccccacctggtcgctgaagcctatcgcagtcttgcaagtgcccagtgtccttttctgggcccaccacgtaagagactgaagcaatcttag

SEQ ID NO: 139087 - DNA, 717 bp, Artificial Sequence
  derived and/or modified sequence
atgagccgagtaccctccccacctcctcccgcggagatgtcctccggacctgtcgccgaaagctggtgttacacacagatcaaagttgtaaaattttcatatatgtggacaattaataacttctcattctgtcgcgaagaaatgggggaggtaattaaatcgagtacttttagctcaggcgcgaatgataagctaaagtggtgtctaagagtcaaccccaagggtctcgatgaagaatccaaagactatctgtccctgtatcttctcctcgtctcctgtcccaaatccgaggtgcgggcaaaattcaagtttagtatccttaacgcaaagggggaagaaacaaaagccatggagtcccagagggcataccggttcgtgcagggcaaggattggggatttaagaagttcatccgcagggacttcctgctagatgaggcaaatggcctcctgcctgatgacaagctcacattgttttgtgaggtgagcgtggtccaagacagtgtgaatattagcggacagaatactatgaatatggtgaaggtccccgagtgcaggctggcagatgagctcggggggctttgggaaaattcgaggtttactgactgctgcctttgcgtagccggacaagagttccaagctcataaggccatccttgccgcacgtagccccgtgttttctgctatgttcgaacacgaaatggaggagtccaagaagtag

SEQ ID NO: 139088 - DNA, 561 bp, Artificial Sequence
  derived and/or modified sequence
atgtctcgggtgccgtcccctcctccacctgccgaaatgtcaagcggtccggtcgctgaaagttggtgctacacccagatcaaagtggtaaaatttagctatatgtggaccattaataacttctccttctgccgggaggaaatgggggaggtgatcaaatcctccacgtttagttctggagccaatgacaagctcaagtggtgtttaagagtgaaccccaagggactggatgaagagagtaaagattatctttccctgtatttgcttctggtgtcctgtccaaagagcgaggttcgggctaagtttaagttcagcatcttgaatgcaaagggtgaggaaaccaaagccatggaatctcagagggcttaccggttcgtgcaggggaaggactggggctttaaaaaatttatcaggcgggattttttacttgacgaagccaacgggctgcttcccgacgataaattaactctcttctgcgaggtttctgtggtgcaggactccgttaacatctccggacaaaataccatgaacatggtgaaggtgcccgagtgccgactgtag

SEQ ID NO: 139089 - DNA, 123 bp, Artificial Sequence
  derived and/or modified sequence
atgagtagggttccaagtccgcccccccccgctgaaatgagcagcgggccagtggctgagtcgtggtgttacacgcagatcaaggtcgttaagttctcatatatgtggacaatcaacaattag

SEQ ID NO: 139090 - DNA, 789 bp, Artificial Sequence
  derived and/or modified sequence
atgtcccgggttccttccccccctccccctgcggagatgtctagcggccctgtcgccgagtcatggtgctacacgcagattaaggttgtcaaattcagctacatgtggaccatcaacaattttagcttctgtcgagaagaaatgggagaggtgatcaagtctagtacgtttagctctggagccaatgataaacttaagtggtgtcttcgcgttaatcccaaggggttggacgaagaatcaaaggactatctgagcctgtaccttttactcgtatcttgccctaaatcagaggtgcgcgccaagttcaagttctccatcctgaatgcgaaaggggaggagacgaaggcaatggagtctcaacgggcatacaggttcgtgcagggcaaagactggggttttaaaaagttcatccggagagactttctgctggacgaagctaacgggctactgcccgatgataagctgactctgttctgtgaagtgtcagtcgtacaagatagcgtgaatatctctggacaaaacacaatgaacatggttaaagtccccgagtgcagactggcagacgaattgggtggactctgggaaaattctagattcactgattgctgcctgtgcgttgccggacaggagttccaggcccacaaagctatcttagctgctaggtctccagtgtttagtgccatgtttgaacatgagatggaggagagcaagaagaacagagttgagataaacgacgttgagcccgaggtgtttaaggagatgatgtgcttcatctacaccgggaagtag

SEQ ID NO: 139091 - DNA, 201 bp, Artificial Sequence
  derived and/or modified sequence
atgagcagggtgccaagtcccccaccacctgctgagatgtcaagcggtcctgtggccgaatcttggtgctacacacagattaaggtggtaaaattttcctatatgtggacaataaataacttctctttctgccgcgaggagatgggcgaagtcatcaagtctagtaccttcagttcgggagccaatgataaactgaaatag

SEQ ID NO: 139092 - DNA, 984 bp, Artificial Sequence
  derived and/or modified sequence
atgggagaggtgattaagtctagcacgttctcctcaggcgccaatgacaaactcaagtggtgccttagagtgaatccgaaggggcttgatgaggagagtaaagattaccttagcctgtacctacttctcgtgtcatgccccaaaagcgaagttagggcaaaattcaagttctcgattctgaatgcaaaaggcgaagagacaaaggctatggaatctcaacgggcatacagattcgtgcaggggaaagactggggattcaagaagtttattaggcgcgattttttgctggatgaggccaatgggctgttgcccgacgacaaactgaccctgttttgtgaagtgagcgtggtgcaggatagcgtcaatatatccgggcagaatacaatgaatatggtaaaggtgcctgagtgtaggttagccgatgagttaggcggcctgtgggagaattcacgcttcaccgactgttgtctatgtgtggctggacaggagtttcaagctcacaaggcaattctagcggccaggagccctgtcttttccgcaatgttcgagcacgagatggaggagagcaagaaaaacagggtggaaattaacgacgtggaacctgaggtatttaaagagatgatgtgctttatttatactggcaaggcaccgaatttagacaagatggctgacgacctcctagccgctgctgacaagtacgcgctggagcgccttaaagtgatgtgtgaagatgcactctgctcaaatctgagcgtggagaatgcggctgaaattttaatcttggccgatctgcactccgctgatcagttgaagacacaggccgtcgacttcattaattatcacgcgtcagatgtgctagagacatctgggtggaaatccatggtggtgagccatccgcacctggttgcagaggcctatcggtccttggcttctgctcagtgtccttttctgggccctcccagaaagcgtctgaagcagagttag

SEQ ID NO: 139093 - DNA, 417 bp, Artificial Sequence
  derived and/or modified sequence
atgagccgcgtgcctagcccaccacctcccgcagagatgtccagcgggcccgtggctgaaagctggtgttatacacaaatcaaagtcgtcaagttttcatacatgtggaccattaacaattttagcttctgcagggaagagatgggcgaggttatcaagtccagcacatttagcagcggcgcaaacgataagcttaaatggtgtctccgagtcaatcccaaggggcttgatgaagagtcaaaggattatctgtctttgtatctgctcttagtgtcttgtcccaaaagtgaggttcgcgccaaatttaagttttccattctgaatgcaaagggggaggaaactaaagccatggaaagccaacgcgcttacagattcgtccaagggaaggattgggggttcaaaaaatttatccgctag

SEQ ID NO: 139094 - DNA, 354 bp, Artificial Sequence
  derived and/or modified sequence
atgagccgggttccttccccaccacctcctgcagaaatgagctctggccccgttgctgagagctggtgttacacccaaatcaaagtagttaaatttagttacatgtggaccattaacaacttttctttctgccgcgaagaaatgggtgaagttatcaagtctagtacattttcgtccggcgccaatgataagctgaaatggtgtctcagagtgaaccctaaaggcctagacgaagagtccaaagactatctgtctctgtatctgctcttggtgagctgtccaaaatcggaggtgcgggccaagtttaagttcagcattctgaacgcaaagggcgaagaaacaaaggccatgtag

SEQ ID NO: 139095 - DNA, 1125 bp, Artificial Sequence
  derived and/or modified sequence
atgagccgggtgcccagccccccacctcctgctgagatgagcagcggccctgtggccgagagctggtgctacacccagatcaaggtggtgaagttctcctacatgtggaccatcaacaacttctccttctgccgggaggagatgggagaggtgatcaagagcagcaccttcagcagcggggccaatgacaagctgaagtggtgcctgcgggtgaaccccaagggcctggatgaggagagcaaggactacctgagcctgtacctgctgctggtgtcctgccccaagtctgaggtgcgggccaagttcaagttcagcatcctgaatgccaagggggaggagaccaaggccatggagagccagagggcctacagatttgtgcagggcaaggactggggcttcaagaagttcatccggcgggacttcctgctggatgaggccaacggcctgctgcctgatgacaagctgaccctcttctgtgaggtgtctgtggtgcaggacagcgtgaacatcagcggccagaacaccatgaacatggtgaaggtgcctgaatgtcggctggctgatgagctgggcggcctgtgggagaacagccgcttcacagactgctgcctgtgtgtggccggccaggagttccaggcccacaaggccatcctggccgcccggagccctgtgttcagcgccatgtttgaacatgagatggaggagagcaagaagaacagagtggagatcaatgatgtggagcctgaggtgttcaaggagatgatgtgcttcatctacaccgggaaggcccccaacctggacaagatggctgatgacctgctggccgctgctgacaagtatgccctggagcggctgaaggtgatgtgtgaagatgccctgtgcagcaacctgtctgtggagaatgctgctgagatcctgatcctggccgacctgcacagcgctgaccagctgaagacccaggccgtggacttcatcaactaccacgccagtgatgtgctggagaccagcggctggaagtccatggtggtgagccacccccacctggtggccgaggcctaccgcagcctggccagcgcccagtgccccttcctgggcccccccaggaagaggctgaagcagagctag

SEQ ID NO: 139096 - DNA, 99 bp, Artificial Sequence
  derived and/or modified sequence
atgagccgggtgcccagccccccacctcctgctgagatgagcagcggccctgtggccgagagctggtgctacacccagatcaaggtggtgaagttctag

SEQ ID NO: 139097 - DNA, 777 bp, Artificial Sequence
  derived and/or modified sequence
atggagagccagagggcctacagatttgtgcagggcaaggactggggcttcaagaagttcatccggcgggacttcctgctggatgaggccaacggcctgctgcctgatgacaagctgaccctcttctgtgaggtgtctgtggtgcaggacagcgtgaacatcagcggccagaacaccatgaacatggtgaaggtgcctgaatgtcggctggctgatgagctgggcggcctgtgggagaacagccgcttcacagactgctgcctgtgtgtggccggccaggagttccaggcccacaaggccatcctggccgcccggagccctgtgttcagcgccatgtttgaacatgagatggaggagagcaagaagaacagagtggagatcaatgatgtggagcctgaggtgttcaaggagatgatgtgcttcatctacaccgggaaggcccccaacctggacaagatggctgatgacctgctggccgctgctgacaagtatgccctggagcggctgaaggtgatgtgtgaagatgccctgtgcagcaacctgtctgtggagaatgctgctgagatcctgatcctggccgacctgcacagcgctgaccagctgaagacccaggccgtggacttcatcaactaccacgccagtgatgtgctggagaccagcggctggaagtccatggtggtgagccacccccacctggtggccgaggcctaccgcagcctggccagcgcccagtgccccttcctgggcccccccaggaagaggctgaagcagagctag

SEQ ID NO: 139098 - DNA, 717 bp, Artificial Sequence
  derived and/or modified sequence
atgagccgggtgcccagccccccacctcctgctgagatgagcagcggccctgtggccgagagctggtgctacacccagatcaaggtggtgaagttctcctacatgtggaccatcaacaacttctccttctgccgggaggagatgggagaggtgatcaagagcagcaccttcagcagcggggccaatgacaagctgaagtggtgcctgcgggtgaaccccaagggcctggatgaggagagcaaggactacctgagcctgtacctgctgctggtgtcctgccccaagtctgaggtgcgggccaagttcaagttcagcatcctgaatgccaagggggaggagaccaaggccatggagagccagagggcctacagatttgtgcagggcaaggactggggcttcaagaagttcatccggcgggacttcctgctggatgaggccaacggcctgctgcctgatgacaagctgaccctcttctgtgaggtgtctgtggtgcaggacagcgtgaacatcagcggccagaacaccatgaacatggtgaaggtgcctgaatgtcggctggctgatgagctgggcggcctgtgggagaacagccgcttcacagactgctgcctgtgtgtggccggccaggagttccaggcccacaaggccatcctggccgcccggagccctgtgttcagcgccatgtttgaacatgagatggaggagagcaagaagtag

SEQ ID NO: 139099 - DNA, 561 bp, Artificial Sequence
  derived and/or modified sequence
atgagccgggtgcccagccccccacctcctgctgagatgagcagcggccctgtggccgagagctggtgctacacccagatcaaggtggtgaagttctcctacatgtggaccatcaacaacttctccttctgccgggaggagatgggagaggtgatcaagagcagcaccttcagcagcggggccaatgacaagctgaagtggtgcctgcgggtgaaccccaagggcctggatgaggagagcaaggactacctgagcctgtacctgctgctggtgtcctgccccaagtctgaggtgcgggccaagttcaagttcagcatcctgaatgccaagggggaggagaccaaggccatggagagccagagggcctacagatttgtgcagggcaaggactggggcttcaagaagttcatccggcgggacttcctgctggatgaggccaacggcctgctgcctgatgacaagctgaccctcttctgtgaggtgtctgtggtgcaggacagcgtgaacatcagcggccagaacaccatgaacatggtgaaggtgcctgaatgtcggctgtag

SEQ ID NO: 139100 - DNA, 123 bp, Artificial Sequence
  derived and/or modified sequence
atgagccgggtgcccagccccccacctcctgctgagatgagcagcggccctgtggccgagagctggtgctacacccagatcaaggtggtgaagttctcctacatgtggaccatcaacaactag

SEQ ID NO: 139101 - DNA, 789 bp, Artificial Sequence
  derived and/or modified sequence
atgagccgggtgcccagccccccacctcctgctgagatgagcagcggccctgtggccgagagctggtgctacacccagatcaaggtggtgaagttctcctacatgtggaccatcaacaacttctccttctgccgggaggagatgggagaggtgatcaagagcagcaccttcagcagcggggccaatgacaagctgaagtggtgcctgcgggtgaaccccaagggcctggatgaggagagcaaggactacctgagcctgtacctgctgctggtgtcctgccccaagtctgaggtgcgggccaagttcaagttcagcatcctgaatgccaagggggaggagaccaaggccatggagagccagagggcctacagatttgtgcagggcaaggactggggcttcaagaagttcatccggcgggacttcctgctggatgaggccaacggcctgctgcctgatgacaagctgaccctcttctgtgaggtgtctgtggtgcaggacagcgtgaacatcagcggccagaacaccatgaacatggtgaaggtgcctgaatgtcggctggctgatgagctgggcggcctgtgggagaacagccgcttcacagactgctgcctgtgtgtggccggccaggagttccaggcccacaaggccatcctggccgcccggagccctgtgttcagcgccatgtttgaacatgagatggaggagagcaagaagaacagagtggagatcaatgatgtggagcctgaggtgttcaaggagatgatgtgcttcatctacaccgggaagtag

SEQ ID NO: 139102 - DNA, 201 bp, Artificial Sequence
  derived and/or modified sequence
atgagccgggtgcccagccccccacctcctgctgagatgagcagcggccctgtggccgagagctggtgctacacccagatcaaggtggtgaagttctcctacatgtggaccatcaacaacttctccttctgccgggaggagatgggagaggtgatcaagagcagcaccttcagcagcggggccaatgacaagctgaagtag

SEQ ID NO: 139103 - DNA, 984 bp, Artificial Sequence
  derived and/or modified sequence
atgggagaggtgatcaagagcagcaccttcagcagcggggccaatgacaagctgaagtggtgcctgcgggtgaaccccaagggcctggatgaggagagcaaggactacctgagcctgtacctgctgctggtgtcctgccccaagtctgaggtgcgggccaagttcaagttcagcatcctgaatgccaagggggaggagaccaaggccatggagagccagagggcctacagatttgtgcagggcaaggactggggcttcaagaagttcatcagaagagacttcctgctggatgaggccaacggcctgctgcctgatgacaagctgaccctcttctgtgaggtgtctgtggtgcaggacagcgtgaacatcagcggccagaacaccatgaacatggtgaaggtgcctgagtgccgcctggctgatgagctgggcggcctgtgggagaacagccgcttcacagactgctgcctgtgtgtggccggccaggagttccaggcccacaaggccatcctggccgcccggagccctgtgttttctgccatgtttgagcacgagatggaggagagcaagaagaacagagtggagatcaatgatgtggagcctgaggtgttcaaggagatgatgtgcttcatctacacaggcaaggcccccaacctggacaagatggctgatgacctgctggccgctgctgacaagtatgccctggagcggctgaaggtgatgtgtgaagatgccctgtgcagcaacctgtctgtggagaatgctgctgagatcctgatcctggccgacctgcacagcgctgaccagctgaagacccaggccgtggacttcatcaactaccacgccagtgatgtgctggagaccagcggctggaagtccatggtggtgagccacccccacctggtggccgaggcctaccgcagcctggccagcgcccagtgccccttcctgggcccccccaggaagaggctgaagcagagctag

SEQ ID NO: 139104 - DNA, 417 bp, Artificial Sequence
  derived and/or modified sequence
atgagccgggtgcccagccccccacctcctgctgagatgagcagcggccctgtggccgagagctggtgctacacccagatcaaggtggtgaagttctcctacatgtggaccatcaacaacttctccttctgccgggaggagatgggagaggtgatcaagagcagcaccttcagcagcggggccaatgacaagctgaagtggtgcctgcgggtgaaccccaagggcctggatgaggagagcaaggactacctgagcctgtacctgctgctggtgtcctgccccaagtctgaggtgcgggccaagttcaagttcagcatcctgaatgccaagggggaggagaccaaggccatggagagccagagggcctacagatttgtgcagggcaaggactggggcttcaagaagttcatcagatag

SEQ ID NO: 139105 - DNA, 354 bp, Artificial Sequence
  derived and/or modified sequence
atgagccgggtgcccagccccccacctcctgctgagatgagcagcggccctgtggccgagagctggtgctacacccagatcaaggtggtgaagttctcctacatgtggaccatcaacaacttctccttctgccgggaggagatgggagaggtgatcaagagcagcaccttcagcagcggggccaatgacaagctgaagtggtgcctgcgggtgaaccccaagggcctggatgaggagagcaaggactacctgagcctgtacctgctgctggtgtcctgccccaagtctgaggtgcgggccaagttcaagttcagcatcctgaatgccaagggggaggagaccaaggccatgtag

SEQ ID NO: 139106 - DNA, 1125 bp, Artificial Sequence
  derived and/or modified sequence
atgagccgggtgcccagcccccccccccccgccgagatgagcagcggaccggtggctgaatcctggtgttacacccagattaaggtggtgaagttctcttacatgtggactattaataactttagcttctgcagggaagagatgggtgaagtcatcaaatcttcaaccttttcctctggagcgaatgacaaactgaagtggtgcctccgggtgaaccctaagggcctcgacgaagagagtaaggattatcttagtctctacctgctcttggtgagctgtcccaagtctgaagttagagcaaagttcaagttttccattctaaacgccaagggagaagaaaccaaggcgatggaatctcagcgggcgtaccgctttgtccagggaaaagactggggcttcaagaaattcattagacgggacttcctgctggacgaagctaatgggctgctgccagacgataagctgacacttttttgcgaagtttccgtcgtgcaggacagcgtgaacatttctggccagaacacgatgaatatggtgaaagtgcccgaatgtagactagcagacgagctgggcggcctttgggagaattcacgcttcaccgactgctgtctttgcgtcgcagggcaggagtttcaggcccacaaagcaatcctggccgccagaagcccagttttctctgccatgttcgagcacgaaatggaggagtcaaaaaaaaatagagtcgagattaatgacgtcgagcccgaggttttcaaagaaatgatgtgtttcatctatacagggaaggctcctaacctggacaaaatggctgatgatcttctagctgccgcggacaaatacgcccttgagcgtttaaaagttatgtgtgaggacgccctgtgctcaaatctgtctgtggaaaatgctgcagaaatcctcatcttggccgatctgcactccgccgatcagctgaagactcaggccgtggacttcatcaattaccacgcttcagatgtgcttgagaccagcggctggaagtccatggtggtgtcccaccctcatttagtagctgaagcataccgctcccttgcctctgcccagtgcccctttcttgggccacccaggaagaggctgaagcaatcctag

SEQ ID NO: 139107 - DNA, 1125 bp, Artificial Sequence
  derived and/or modified sequence
atgagccgggtgcccagcccccccccccccgccgagatgagcagcggacctgtggcagaaagttggtgctacactcaaataaaagtggtgaagttcagctacatgtggaccattaacaattttagcttttgcagagaagaaatgggagaggtgatcaaatccagcacattcagttcaggggctaatgacaaactcaagtggtgcctcagagtgaatcctaagggtctggatgaagaatccaaagactatctatccctgtacctacttttggtcagctgcccgaaaagtgaggtgcgggccaagtttaagtttagcatcctaaacgcaaagggagaggagaccaaggcgatggaatctcagcgcgcataccgatttgtgcaggggaaagactggggattcaagaagttcattagacgggattttctactggacgaggctaacggtctgctgcccgatgacaagttgacccttttctgcgaggtgagtgtggtgcaagactcagtgaatattagtggccagaataccatgaatatggttaaagttcctgaatgccgactggctgatgaacttggggggctgtgggagaattcccgttttactgattgttgcctctgtgtggcaggtcaggagttccaagcacataaggccattttggccgctcgctcccccgtcttttcagccatgttcgagcacgagatggaggaatccaagaagaaccgggtggagatcaatgatgtagaacctgaagtgttcaaggagatgatgtgtttcatctacacagggaaagcccctaacctcgataagatggccgacgacctgctcgccgccgccgataagtatgccctggaaagactgaaggtgatgtgcgaagatgctctgtgtagcaatttgtccgtggagaatgcagccgagatcttaattctcgctgatttacactctgccgaccaactgaaaacacaggctgttgattttattaattatcacgcatccgatgtgctggagacgtcagggtggaagtctatggtggtgagccaccctcacctggtcgctgaagcttatcggagtcttgccagtgcacagtgcccatttttgggcccgccccgcaagcggctgaagcagtcatag

SEQ ID NO: 139108 - DNA, 1125 bp, Artificial Sequence
  derived and/or modified sequence
atgagccgggtgcccagcccccccccccccgccgagatgagcagcgggccagtggcggagagctggtgttacacccagattaaggttgtcaaattttcttatatgtggactatcaataacttcagcttttgtagagaagaaatgggtgaagtgattaagtcgtccaccttctcaagtggagctaacgataagcttaagtggtgcctccgagtaaaccctaagggacttgatgaggaatctaaggactacctgtctctctatctcctgctggtttcctgtcccaagtctgaagtgcgcgcaaagttcaagttcagtatcttgaatgctaaaggcgaggagacaaaagcgatggaatcacagagagcctaccgattcgtgcagggaaaggattgggggtttaaaaaattcattcgacgagatttcctgctagacgaggccaacgggttactacctgacgataagctgaccctgttttgcgaagtttcagtcgtacaggatagcgttaacatatctgggcagaatactatgaatatggtcaaggtaccggaatgtcggttagcggacgagttggggggtctctgggagaacagtaggttcacggattgttgcttgtgcgttgcaggacaagaattccaggcccacaaggcaatcctcgcagctcggtcccccgtgttcagtgcaatgtttgaacacgaaatggaggagtccaaaaaaaatcgcgtggagattaatgatgtggagccggaagtgtttaaagagatgatgtgctttatctatactggcaaagcaccgaatttagataaaatggccgacgatttgctggccgccgccgacaaatacgccctggagaggctgaaagttatgtgcgaggacgctctctgctccaacctaagtgtcgaaaatgctgccgagattctcatcctcgcggatttgcacagcgctgatcagttaaaaactcaggcagtcgacttcatcaattaccacgcctccgatgtactggagacctcaggttggaaaagtatggttgtgagccatccgcacctagtggccgaggcttatcgcagtttagcttccgcacaatgtccgttcctcgggccccctaggaagagactgaagcagtcatag

SEQ ID NO: 139109 - DNA, 99 bp, Artificial Sequence
  derived and/or modified sequence
atgagccgggtgcccagcccccccccccccgccgagatgagcagcggacctgtggccgagtcttggtgctatactcagatcaaggtcgtcaaattttag

SEQ ID NO: 139110 - DNA, 777 bp, Artificial Sequence
  derived and/or modified sequence
atggagagccagcgggcctaccggttcgtgcagggcaaggactggggcttcaagaaattcatacggcgggatttcttattggatgaagcaaacggtttgttacccgacgataagctcactcttttctgcgaagtcagcgtagttcaggattccgtcaacatttccggacaaaacaccatgaacatggtgaaggtgcctgagtgccgcctggcagatgagcttggaggcctgtgggagaattctagattcacagattgctgtctgtgcgttgccggccaggaattccaggcacacaaagcaatcttggccgcgaggagcccggtgttctccgcgatgtttgaacatgagatggaggagtctaaaaagaatcgggtcgagatcaacgacgtagagcccgaagtctttaaggagatgatgtgcttcatctacaccggtaaagccccgaatctggataaaatggcagacgacttactcgctgcagctgataagtacgctctcgagaggctgaaggtgatgtgtgaagatgctttatgttccaatctgagtgtcgagaatgctgccgagatcctgatcctagcggacctccattccgcagatcagctaaaaacacaggcagtggactttattaactaccacgctagtgatgtcttggagacctctgggtggaagtcgatggtcgtgagccaccctcatctggtggctgaggcttatagaagtctggctagcgcccagtgcccttttctaggtccacctagaaaacgcctgaagcagagctag

SEQ ID NO: 139111 - DNA, 1125 bp, Artificial Sequence
  derived and/or modified sequence
atgagccgggtgcccagcccccccccccccgccgagatgagcagcggcccggtggctgaatcttggtgctacacccagatcaaggttgtgaaattcagttatatgtggaccataaacaatttctcattttgcagagaggaaatgggggaagttatcaagtcatctaccttttcctctggcgctaatgataaacttaagtggtgtctgcgagtgaaccctaaggggctcgacgaggagtccaaggactacctctctctatatctactgctggtgtcatgccccaagagcgaggtaagagccaagtttaaattcagtattctgaatgccaaaggggaagagaccaaggctatggaatcccagcgagcctaccggtttgtacaagggaaagactggggtttcaaaaagtttattcggcgggatttcctgctggatgaagcgaatgggctgctgcccgacgacaagttaaccttgttctgtgaggtgtcggtggtgcaggattcggtcaacatctctggtcaaaatactatgaacatggtgaaagtgcccgaatgcagacttgcagacgaactgggtggcctatgggagaacagccgcttcacagattgctgtttgtgtgtagctggacaggaattccaggcccacaaggccatactggctgccaggagcccagtgttctcagcaatgttcgaacacgagatggaagaaagcaagaagaatagggtggagataaacgatgtcgagccagaagtgtttaaggaaatgatgtgttttatctacaccgggaaagcccccaacctggacaagatggccgatgacttgttggctgctgccgataagtatgccttggaacgccttaaggtgatgtgtgaggatgccctctgcagtaacctctctgttgagaatgccgccgagattttgatcctggcagacttgcattctgctgaccagctgaagacgcaggccgtggacttcatcaattaccacgcctctgacgtgctggagacgtccgggtggaagtccatggtcgtatcccacccacacctggtcgcagaggcttatcggtctttagcgtctgcacagtgccccttcctcgggccacctcgtaaaaggcttaagcaaagttag

SEQ ID NO: 139112 - DNA, 1125 bp, Artificial Sequence
  derived and/or modified sequence
atgagccgggtgcccagcccccccccccccgccgagatgagcagcggcccagtcgcagaatcatggtgctatacacagatcaaggtggtcaaattcagctacatgtggacgattaataactttagcttttgtcgcgaagaaatgggggaggtgattaaatcatcgactttctctagcggtgccaatgacaagttgaagtggtgcctccgggttaaccctaagggacttgacgaggagagtaaggattatctgtccttatacctgcttttggtctcttgccctaagtctgaggtacgggctaagtttaagttcagcatcctcaatgcaaaaggcgaggaaacaaaagctatggaatcccagagagcgtatcggttcgtgcaaggcaaggactggggttttaagaaattcatcagaagggactttctgctggatgaagccaatgggctcttacccgatgataagctgactctcttctgtgaagttagcgtggtgcaagattctgtgaatatctcaggccagaacacgatgaacatggtcaaagtcccagaatgccgactagccgatgaacttggcggcctatgggaaaactcaagatttacagattgctgtctctgtgttgccgggcaggagttccaagcccacaaggcgatcctcgcagctcgctcccctgttttctctgccatgttcgagcatgaaatggaagaatccaagaagaaccgagttgaaattaatgatgtggaacctgaggtttttaaagagatgatgtgtttcatatatacaggcaaggcccctaatttggacaaaatggccgacgatctcctcgccgcagcagacaagtacgccctcgaacgcctgaaggtgatgtgtgaggatgctctgtgttcaaatctgtctgttgaaaacgcagctgaaatcttgattctcgccgatctacattccgcagaccagctcaagactcaggccgttgactttatcaactatcatgcgagcgacgtcttggagacttccgggtggaaatctatggttgtcagccaccctcacctcgtcgcagaggcttatagatctctcgccagcgcccaatgcccattcctgggaccccctaggaagcgtctcaaacagagttag

SEQ ID NO: 139113 - DNA, 717 bp, Artificial Sequence
  derived and/or modified sequence
atgagccgggtgcccagcccccccccccccgccgagatgagcagcgggcccgtagccgagtcctggtgttatacacaaattaaggtcgtgaagtttagctatatgtggacaatcaacaacttctccttctgtcgcgaggagatgggcgaggttatcaaaagttccaccttcagctctggcgcgaatgacaagttgaagtggtgcctccgtgtcaatcccaagggcctagacgaggaatctaaggactacctgagtctgtatctcttactcgtcagctgcccgaagtccgaagtacgcgctaaatttaagttcagcatcctaaatgccaaaggagaggagaccaaggcaatggaaagtcaaagagcctacaggtttgtccagggtaaagactgggggttcaaaaaattcatacggcgcgacttccttctcgatgaagccaacggccttctgcccgatgacaaactcaccttattttgtgaagtctccgttgttcaggacagtgtgaacatttcaggacagaacactatgaacatggtgaaggtccccgagtgcagactcgctgatgaactgggtgggctttgggaaaactctcggttcacagattgctgtctttgcgtggccggccaggagtttcaggcgcataaagccattctggccgccagatctcctgtcttcagcgcaatgttcgaacacgagatggaagagtccaagaagtag

SEQ ID NO: 139114 - DNA, 561 bp, Artificial Sequence
  derived and/or modified sequence
atgagccgggtgcccagcccccccccccccgccgagatgagcagcggacctgtcgctgagtcctggtgttacacccagatcaaagtggttaaattttcttatatgtggaccatcaataattttagcttttgccgagaggaaatgggggaagtcattaagtcttcaacgttcagtagcggcgccaatgataaactgaagtggtgtctccgtgtcaaccccaaaggcctcgatgaagaatcaaaggattacctcagcctctatctgttgttggttagctgtcccaaaagcgaggtgcgggctaaattcaagtttagcatcctgaatgccaagggtgaagagactaaggctatggagtctcagcgggcgtacaggtttgtgcagggtaaagattggggatttaagaagtttattcgacgcgacttccttctggacgaggccaacggcctgctgcccgacgacaagcttaccctgttctgtgaggtgtctgtcgtgcaggacagcgtcaacatctctggccagaataccatgaacatggtgaaagtgccagaatgccgcctgtag

SEQ ID NO: 139115 - DNA, 123 bp, Artificial Sequence
  derived and/or modified sequence
atgagccgggtgcccagcccccccccccccgccgagatgagcagcggaccagtcgctgagtcctggtgttatacccagattaaagtggttaaattcagctacatgtggaccattaacaactag

SEQ ID NO: 139116 - DNA, 789 bp, Artificial Sequence
  derived and/or modified sequence
atgagccgggtgcccagcccccccccccccgccgagatgagcagcggacccgtggcagagagctggtgctatacccagattaaagtagtaaagtttagttatatgtggaccatcaataactttagcttctgtagagaggagatgggagaggttattaagtcttccacgttttcgagtggggctaacgataagttaaagtggtgcctgagggtgaatcctaagggcttagacgaagaatccaaggattatctgtctctgtatctgctgctggtgagctgcccaaagtccgaagtgagagccaagttcaaattttccattctcaatgcgaagggcgaggaaaccaaggccatggagtcccagcgagcctatagattcgtgcagggtaaggactgggggttcaaaaaatttatacgccgagactttctgttggacgaagcaaatggtctgctgccagacgacaagctaacactgttctgcgaggtaagcgtagtgcaggatagtgtgaatatttccggccagaacactatgaacatggtaaaggtgcccgaatgcaggttggcagatgagctgggtgggttgtgggagaacagccgcttcaccgattgctgtttgtgcgtcgctggccaggagttccaggctcacaaggcaattctggctgcaagatcaccagtgttcagtgctatgttcgagcacgagatggaagagtccaaaaaaaatagggttgagatcaacgatgtggagcccgaagtctttaaggagatgatgtgtttcatttatactggaaagtag

SEQ ID NO: 139117 - DNA, 201 bp, Artificial Sequence
  derived and/or modified sequence
atgagccgggtgcccagcccccccccccccgccgagatgagcagcgggccggtggccgagtcatggtgttatactcagattaaagtggtgaagttcagctacatgtggaccattaataattttagtttctgcagggaggaaatgggggaagtaattaagtcatcaactttttccagcggggccaatgacaaactaaaatag

SEQ ID NO: 139118 - DNA, 984 bp, Artificial Sequence
  derived and/or modified sequence
atgggcgaggtgatcaagagcagcaccttcagcagcggcgccaacgacaagctaaaatggtgtctgagagttaaccccaaagggctggacgaggaatccaaggactacctatctttgtacctgctgttagtgagctgcccaaagagcgaagttagggctaagtttaagttttcaatccttaacgctaaaggtgaggaaacgaaagctatggagagtcagagggcctatcggtttgtgcaggggaaggattgggggttcaaaaaattcatccgcagggattttttactggacgaagcaaacgggttgctgcctgacgataaactcacactcttctgtgaagtgagtgttgtccaggactccgttaacattagtggccagaacacaatgaacatggtcaaggtgcctgaatgtcggctcgccgatgaactcggtggcttgtgggagaatagtcggttcactgactgttgtttgtgtgttgcagggcaggagttccaggcacacaaagcaattctcgcagccaggtctcccgtcttcagtgccatgtttgagcacgagatggaagaaagcaagaaaaatagggtggagattaacgacgtggaacctgaggtgtttaaggaaatgatgtgtttcatatacaccggcaaagcccctaaccttgataagatggctgacgaccttctagccgccgccgacaagtacgctctggaacgtcttaaggtgatgtgcgaggacgccctgtgttctaatctttctgtggagaatgccgctgagatcctgatcctggccgaccttcattccgcagatcagctgaagacacaggccgtggacttcataaattatcacgcatctgatgtgttggagacttctgggtggaagagcatggttgtatctcacccacatttagttgccgaggcgtacaggtcactggctagtgcacagtgtccctttcttggaccaccccgaaagcgcctcaagcaatcatag

SEQ ID NO: 139119 - DNA, 417 bp, Artificial Sequence
  derived and/or modified sequence
atgagccgggtgcccagcccccccccccccgccgagatgagcagcggtcctgtggccgagtcatggtgctatacccagatcaaggtggtgaaattttcctatatgtggacaatcaacaatttcagcttctgccgcgaggaaatgggagaagtgatcaaaagttcaacttttagtagcggcgcaaatgataaactcaaatggtgcctcagggttaatcctaagggtcttgatgaagaatcaaaagactacctgagcctgtacctcttgctggtgtcctgtcccaaatccgaggtgagggctaaattcaagttttccattctgaacgccaagggggaggagacaaaagcaatggagagccagagggcatacagattcgttcaagggaaggactggggattcaagaaatttatcaggtag

SEQ ID NO: 139120 - DNA, 354 bp, Artificial Sequence
  derived and/or modified sequence
atgagccgggtgcccagcccccccccccccgccgagatgagcagcgggccagtggcggaaagctggtgctatacacagattaaggttgtcaagttctcatatatgtggaccataaacaacttctccttctgcagggaagagatgggtgaggtgattaagagcagcaccttcagttctggcgccaatgacaagctcaagtggtgtctgcgagtcaatcctaagggccttgacgaggagtccaaagattacctgtctctgtacctcttgctagtgagttgtccaaagtccgaggtacgcgccaagttcaaattttccattcttaacgcaaaaggcgaggaaactaaggccatgtag

SEQ ID NO: 139121 - DNA, 2965 bp, Artificial Sequence
  derived and/or modified sequence
ggggaggaggccgcgcggggtggggtctggcggtacgcgctggctgcgtcgacgtgctgacgccatgacgccccggctggtgtgtgtcggtgtgtatgtgtgtgtgtgagtgtgcgcgctccgagtgtgtgtgtatttgtgtatcggcggtcccgcaggtcccggatgttgcggacagtatgaggcaagcgcagggggacggggaccagcagctgtcgccgccgctctcagagatttcctgttagacaagacaaattagagttttcctactgacttaacttgggtgaagagggaacagaaatctttgccccctgactttggaaatctcgtttaaccttcaaactggcgatgtcaagggttccaagtcctccacctccggcagaaatgtcgagtggccccgtagctgagagttggtgctacacacagatcaaggtagtgaaattctcctacatgtggaccatcaataactttagcttttgccgggaggaaatgggtgaagtcattaaaagttctacattttcatcaggagcaaatgataaactgaaatggtgtttgcgagtaaaccccaaagggttagatgaagaaagcaaagattacctgtcactttacctgttactggtcagctgtccaaagagtgaagttcgggcaaaattcaaattctccatcctgaatgccaagggagaagaaaccaaagctatggagagtcaacgggcatataggtttgtgcaaggcaaagactggggattcaagaaattcatccgtagagattttcttttggatgaggccaacgggcttctccctgatgacaagcttaccctcttctgcgaggtgagtgttgtgcaagattctgtcaacatttctggccagaataccatgaacatggtaaaggttcctgagtgccggctggcagatgagttaggaggactgtgggagaattcccggttcacagactgctgcttgtgtgttgccggccaggaattccaggctcacaaggctatcttagcagctcgttctccggtttttagtgccatgtttgaacatgaaatggaggagagcaaaaagaatcgagttgaaatcaatgatgtggagcctgaagtttttaaggaaatgatgtgcttcatttacacggggaaggctccaaacctcgacaaaatggctgatgatttgctggcagctgctgacaagtatgccctggagcgcttaaaggtcatgtgtgaggatgccctctgcagtaacctgtccgtggagaacgctgcagaaattctcatcctggccgacctccacagtgcagatcagttgaaaactcaggcagtggatttcatcaactatcatgcttcggatgtcttggagacctctgggtggaagtcaatggtggtgtcacatccccacttggtggctgaggcataccgctctctggcttcagcacagtgcccttttctgggacccccacgcaaacgcctgaagcaatcctaagatcctgcttgttgtaagactccgtttaatttccagaagcagcagccactgttgctgccactgaccaccaggtagacagcgcaatctgtggagcttttactctgttgtgaggggaagagactgcattgtggccccagacttttaaaacagcactaaataacttgggggaaacggggggagggaaaatgaaatgaaaaccctgttgctgcgtcactgtgttccctttggcctggctgagtttgatactgtggggattcagtttaggcgctggcccgaggatatcccagcggtggtacttcggagacacctgtctgcatctgactgagcagaacaaatcgtcaggtgcctggagcaaaaaggaaaaaaaaaaaagaaaggacattgagttttaacagaagggaaaaggaaagaagaaaagatttttgcagaatttctcaaaaatcagtttgtggattccagtagtatttatattgagagaaacaaattttagtccttctaactgtgctaaaacttggatatttgtgaaaactccttaccaccatacaagcatcagaagagctctcttgttgttagcacttattgtttgcaagaacagaatacatccttttatccttttatgaaaaatgacaagtgaaggcaaaaggggaaggttatttgatctggaagatgagtgttctgatgtggtggcttttgcaaaaatctttattggtgttgaaaactggaaaaaataactcatccagaattcatattgtcttgacaagaactatggttctctgtttttagatattgtggaaaatgtttttgggcatttttctctgattttatttcttctcccccacccctttttctaaaaaacaaacaaaaaaaaaaacacacaaaacaaaaacagaacaaaagaagagagaaggaaattttatcaattaaaaatgctgtgtgataaaatcccagcccagattgctcagctgtttgtacctgacttgccgcctgcataggagccagttctgttccttctgactagcccctcttcctccaggggagaacttccaaatgttaatttttttttttttgaaaatataaataattactattttgtactgtgtggtatctctggtcttttgtttcactcacctgccttgtctcttgggtctgagtcccttgcttaagggattttgaagtcctagttttcagcttgcagagattatgtctgaaatgcctaatgagtcgcagggatttgttgagactccgtaatctcaagttctctttgtgagctatcagcatctgccagtctcttgtcctccctgagtatctcacagtccatatcctgatgagggatcaggcccctacctctgccaaggcaagtaatggtagtgggcttttaaactgccccccgtatgttttaagacctaatccccacctcccttcttctaactaaatataaaaagatccaggggacataaatgtggagattaaataaagggaaattattgtctct

SEQ ID NO: 139122 - DNA, 2985 bp, Artificial Sequence
  derived and/or modified sequence
gtgctgacgccatgacgccccggctggtgtgtgtcggtgtgtatgtgtgtgtgtgagtgtgcgcgctccgagtgtgtgtgtatttgtgtatcggcggtcccgcaggtcccggatgttgcggacagtatgaggcaagcgcagggggacggggaccagcagctgtcgccgccgctctcagatcgagtcttgctctgtcacccaggctggagtgcagtggcgcgatctcagctcactgccacctttgcctcctgggttcaagcgattcttctgcctcagcctcccgagtagctgggattacagggtgaagagggaacagaaatctttgccccctgactttggaaatctcgtttaaccttcaaactggcgatgtcaagggttccaagtcctccacctccggcagaaatgtcgagtggccccgtagctgagagttggtgctacacacagatcaaggtagtgaaattctcctacatgtggaccatcaataactttagcttttgccgggaggaaatgggtgaagtcattaaaagttctacattttcatcaggagcaaatgataaactgaaatggtgtttgcgagtaaaccccaaagggttagatgaagaaagcaaagattacctgtcactttacctgttactggtcagctgtccaaagagtgaagttcgggcaaaattcaaattctccatcctgaatgccaagggagaagaaaccaaagctatggagagtcaacgggcatataggtttgtgcaaggcaaagactggggattcaagaaattcatccgtagagattttcttttggatgaggccaacgggcttctccctgatgacaagcttaccctcttctgcgaggtgagtgttgtgcaagattctgtcaacatttctggccagaataccatgaacatggtaaaggttcctgagtgccggctggcagatgagttaggaggactgtgggagaattcccggttcacagactgctgcttgtgtgttgccggccaggaattccaggctcacaaggctatcttagcagctcgttctccggtttttagtgccatgtttgaacatgaaatggaggagagcaaaaagaatcgagttgaaatcaatgatgtggagcctgaagtttttaaggaaatgatgtgcttcatttacacggggaaggctccaaacctcgacaaaatggctgatgatttgctggcagctgctgacaagtatgccctggagcgcttaaaggtcatgtgtgaggatgccctctgcagtaacctgtccgtggagaacgctgcagaaattctcatcctggccgacctccacagtgcagatcagttgaaaactcaggcagtggatttcatcaactatcatgcttcggatgtcttggagacctctgggtggaagtcaatggtggtgtcacatccccacttggtggctgaggcataccgctctctggcttcagcacagtgcccttttctgggacccccacgcaaacgcctgaagcaatcctaagatcctgcttgttgtaagactccgtttaatttccagaagcagcagccactgttgctgccactgaccaccaggtagacagcgcaatctgtggagcttttactctgttgtgaggggaagagactgcattgtggccccagacttttaaaacagcactaaataacttgggggaaacggggggagggaaaatgaaatgaaaaccctgttgctgcgtcactgtgttccctttggcctggctgagtttgatactgtggggattcagtttaggcgctggcccgaggatatcccagcggtggtacttcggagacacctgtctgcatctgactgagcagaacaaatcgtcaggtgcctggagcaaaaaggaaaaaaaaaaaagaaaggacattgagttttaacagaagggaaaaggaaagaagaaaagatttttgcagaatttctcaaaaatcagtttgtggattccagtagtatttatattgagagaaacaaattttagtccttctaactgtgctaaaacttggatatttgtgaaaactccttaccaccatacaagcatcagaagagctctcttgttgttagcacttattgtttgcaagaacagaatacatccttttatccttttatgaaaaatgacaagtgaaggcaaaaggggaaggttatttgatctggaagatgagtgttctgatgtggtggcttttgcaaaaatctttattggtgttgaaaactggaaaaaataactcatccagaattcatattgtcttgacaagaactatggttctctgtttttagatattgtggaaaatgtttttgggcatttttctctgattttatttcttctcccccacccctttttctaaaaaacaaacaaaaaaaaaaacacacaaaacaaaaacagaacaaaagaagagagaaggaaattttatcaattaaaaatgctgtgtgataaaatcccagcccagattgctcagctgtttgtacctgacttgccgcctgcataggagccagttctgttccttctgactagcccctcttcctccaggggagaacttccaaatgttaatttttttttttttgaaaatataaataattactattttgtactgtgtggtatctctggtcttttgtttcactcacctgccttgtctcttgggtctgagtcccttgcttaagggattttgaagtcctagttttcagcttgcagagattatgtctgaaatgcctaatgagtcgcagggatttgttgagactccgtaatctcaagttctctttgtgagctatcagcatctgccagtctcttgtcctccctgagtatctcacagtccatatcctgatgagggatcaggcccctacctctgccaaggcaagtaatggtagtgggcttttaaactgccccccgtatgttttaagacctaatccccacctcccttcttctaactaaatataaaaagatccaggggacataaatgtggagattaaataaagggaaattattgtctctaa

SEQ ID NO: 139123 - DNA, 3088 bp, Artificial Sequence
  derived and/or modified sequence
ggggaggaggccgcgcggggtggggtctggcggtacgcgctggctgcgtcgacgtgctgacgccatgacgccccggctggtgtgtgtcggtgtgtatgtgtgtgtgtgagtgtgcgcgctccgagtgtgtgtgtatttgtgtatcggcggtcccgcaggtcccggatgttgcggacagtatgaggcaagcgcagggggacggggaccagcagctgtcgccgccgctctcagatcgagtcttgctctgtcacccaggctggagtgcagtggcgcgatctcagctcactgccacctttgcctcctgggttcaagcgattcttctgcctcagcctcccgagtagctgggattacaggctctgggaaccacccttctactttctgtctctaggaatttcactactctagggtgaagagggaacagaaatctttgccccctgactttggaaatctcgtttaaccttcaaactggcgatgtcaagggttccaagtcctccacctccggcagaaatgtcgagtggccccgtagctgagagttggtgctacacacagatcaaggtagtgaaattctcctacatgtggaccatcaataactttagcttttgccgggaggaaatgggtgaagtcattaaaagttctacattttcatcaggagcaaatgataaactgaaatggtgtttgcgagtaaaccccaaagggttagatgaagaaagcaaagattacctgtcactttacctgttactggtcagctgtccaaagagtgaagttcgggcaaaattcaaattctccatcctgaatgccaagggagaagaaaccaaagctatggagagtcaacgggcatataggtttgtgcaaggcaaagactggggattcaagaaattcatccgtagagattttcttttggatgaggccaacgggcttctccctgatgacaagcttaccctcttctgcgaggtgagtgttgtgcaagattctgtcaacatttctggccagaataccatgaacatggtaaaggttcctgagtgccggctggcagatgagttaggaggactgtgggagaattcccggttcacagactgctgcttgtgtgttgccggccaggaattccaggctcacaaggctatcttagcagctcgttctccggtttttagtgccatgtttgaacatgaaatggaggagagcaaaaagaatcgagttgaaatcaatgatgtggagcctgaagtttttaaggaaatgatgtgcttcatttacacggggaaggctccaaacctcgacaaaatggctgatgatttgctggcagctgctgacaagtatgccctggagcgcttaaaggtcatgtgtgaggatgccctctgcagtaacctgtccgtggagaacgctgcagaaattctcatcctggccgacctccacagtgcagatcagttgaaaactcaggcagtggatttcatcaactatcatgcttcggatgtcttggagacctctgggtggaagtcaatggtggtgtcacatccccacttggtggctgaggcataccgctctctggcttcagcacagtgcccttttctgggacccccacgcaaacgcctgaagcaatcctaagatcctgcttgttgtaagactccgtttaatttccagaagcagcagccactgttgctgccactgaccaccaggtagacagcgcaatctgtggagcttttactctgttgtgaggggaagagactgcattgtggccccagacttttaaaacagcactaaataacttgggggaaacggggggagggaaaatgaaatgaaaaccctgttgctgcgtcactgtgttccctttggcctggctgagtttgatactgtggggattcagtttaggcgctggcccgaggatatcccagcggtggtacttcggagacacctgtctgcatctgactgagcagaacaaatcgtcaggtgcctggagcaaaaaggaaaaaaaaaaaagaaaggacattgagttttaacagaagggaaaaggaaagaagaaaagatttttgcagaatttctcaaaaatcagtttgtggattccagtagtatttatattgagagaaacaaattttagtccttctaactgtgctaaaacttggatatttgtgaaaactccttaccaccatacaagcatcagaagagctctcttgttgttagcacttattgtttgcaagaacagaatacatccttttatccttttatgaaaaatgacaagtgaaggcaaaaggggaaggttatttgatctggaagatgagtgttctgatgtggtggcttttgcaaaaatctttattggtgttgaaaactggaaaaaataactcatccagaattcatattgtcttgacaagaactatggttctctgtttttagatattgtggaaaatgtttttgggcatttttctctgattttatttcttctcccccacccctttttctaaaaaacaaacaaaaaaaaaaacacacaaaacaaaaacagaacaaaagaagagagaaggaaattttatcaattaaaaatgctgtgtgataaaatcccagcccagattgctcagctgtttgtacctgacttgccgcctgcataggagccagttctgttccttctgactagcccctcttcctccaggggagaacttccaaatgttaatttttttttttttgaaaatataaataattactattttgtactgtgtggtatctctggtcttttgtttcactcacctgccttgtctcttgggtctgagtcccttgcttaagggattttgaagtcctagttttcagcttgcagagattatgtctgaaatgcctaatgagtcgcagggatttgttgagactccgtaatctcaagttctctttgtgagctatcagcatctgccagtctcttgtcctccctgagtatctcacagtccatatcctgatgagggatcaggcccctacctctgccaaggcaagtaatggtagtgggcttttaaactgccccccgtatgttttaagacctaatccccacctcccttcttctaactaaatataaaaagatccaggggacataaatgtggagattaaataaagggaaattattgtctct

SEQ ID NO: 139124 - DNA, 1397 bp, Artificial Sequence
  derived and/or modified sequence
gtgtatcggcggtcccgcaggtcccggatgttgcggacagtatgaggcaagcgcagggggacggggaccagcagctgtcgccgccgctctcagggtgaagagggaacagaaatctttgccccctgactttggaaatctcgtttaaccttcaaactggcgatgtcaagggttccaagtcctccacctccggcagaaatgtcgagtggccccgtagctgagagttggtgctacacacagacaggtgtttgcgagtaaaccccaaagggttagatgaagaaagcaaagattacctgtcactttacctgttactggtcagctgtccaaagagtgaagttcgggcaaaattcaaattctccatcctgaatgccaagggagaagaaaccaaagctatggagagtcaacgggcatataggtttgtgcaaggcaaagactggggattcaagaaattcatccgtagagattttcttttggatgaggccaacgggcttctccctgatgacaagcttaccctcttctgcgaggtgagtgttgtgcaagattctgtcaacatttctggccagaataccatgaacatggtaaaggttcctgagtgccggctggcagatgagttaggaggactgtgggagaattcccggttcacagactgctgcttgtgtgttgccggccaggaattccaggctcacaaggctatcttagcagctcgttctccggtttttagtgccatgtttgaacatgaaatggaggagagcaaaaagaatcgagttgaaatcaatgatgtggagcctgaagtttttaaggaaatgatgtgcttcatttacacggggaaggctccaaacctcgacaaaatggctgatgatttgctggcagctgctgacaagtatgccctggagcgcttaaaggtcatgtgtgaggatgccctctgcagtaacctgtccgtggagaacgctgcagaaattctcatcctggccgacctccacagtgcagatcagttgaaaactcaggcagtggatttcatcaactatcatgcttcggatgtcttggagacctctgggtggaagtcaatggtggtgtcacatccccacttggtggctgaggcataccgctctctggcttcagcacagtgcccttttctgggacccccacgcaaacgcctgaagcaatcctaagatcctgcttgttgtaagactccgtttaatttccagaagcagcagccactgttgctgccactgaccaccaggtagacagcgcaatctgtggagcttttactctgttgtgaggggaagagactgcattgtggccccagacttttaaaacagcactaaataacttgggggaaacggggggagggaaaatgaaatgaaaaccctgttgctgcgtcactgtgttccctttggcct

SEQ ID NO: 139125 - DNA, 1932 bp, Artificial Sequence
  derived and/or modified sequence
atatagcttaaagcatttaactggaaaggaccttggaaatccttttaaaggaggatgggggtggaaatgcacaggttgcttctctctctctctctctttttttttttttttgagacggtcacccaggctgtagtgcagtggcgtgatctcggctcactgtggcctccacctcccaagtagctgggattacaggcttgcgccatcatgcagggctaatttttgtatttttagtagagacgaggtttcatcatgttggccaggctggtctggaactcctgacctcaagtgatctgcccaccttggcctcccaaagtgctgggattaaaggcatgagccaccacgcctggcctaggttgttcctctactgtgaatcttgaggttatggtttccactagactatagtgctcaactatagtggcctattttaagtggccttataattcctaaccaaagtgacttgtgaaacagaggaccctggataaatttaaatgttataaagatgataaaatgtacagagatttcctgttagacaagacaaattagagttttcctactgacttaacttgggtgaagagggaacagaaatctttgccccctgactttggaaatctcgtttaaccttcaaactggcgatgtcaagggttccaagtcctccacctccggcagaaatgtcgagtggccccgtagctgagagttggtgctacacacagatcaaggtagtgaaattctcctacatgtggaccatcaataactttagcttttgccgggaggaaatgggtgaagtcattaaaagttctacattttcatcaggagcaaatgataaactgaaatggtgtttgcgagtaaaccccaaagggttagatgaagaaagcaaagattacctgtcactttacctgttactggtcagctgtccaaagagtgaagttcgggcaaaattcaaattctccatcctgaatgccaagggagaagaaaccaaagctatggagagtcaacgggcatataggtttgtgcaaggcaaagactggggattcaagaaattcatccgtagagattttcttttggatgaggccaacgggcttctccctgatgacaagcttaccctcttctgcgaggtgagtgttgtgcaagattctgtcaacatttctggccagaataccatgaacatggtaaaggttcctgagtgccggctggcagatgagttaggaggactgtgggagaattcccggttcacagactgctgcttgtgtgttgccggccaggaattccaggctcacaaggctatcttagcagctcgttctccggtttttagtgccatgtttgaacatgaaatggaggagagcaaaaagaatcgagttgaaatcaatgatgtggagcctgaagtttttaaggaaatgatgtgcttcatttacacggggaaggctccaaacctcgacaaaatggctgatgatttgctggcagctgctgacaagtatgccctggagcgcttaaaggtcatgtgtgaggatgccctctgcagtaacctgtccgtggagaacgctgcagaaattctcatcctggccgacctccacagtgcagatcagttgaaaactcaggcagtggatttcatcaactatcatgcttcggatgtcttggagacctctgggtggaagtcaatggtggtgtcacatccccacttggtggctgaggcataccgctctctggcttcagcacagtgcccttttctgggacccccacgcaaacgcctgaagcaatcctaagatcctgcttgttgtaagactccgtttaatttccagaagcagcagccactgttgctgccactgaccaccaggtagacagcgcaatctgtggagcttttactctgttgtgaggggaagagactgcattgtggccccagacttttaaaacagcactaaataacttgggggaaacggg

SEQ ID NO: 139126 - DNA, 1865 bp, Artificial Sequence
  derived and/or modified sequence
aagataggcggagtcttgagggaggaggagcagggaaacccagggaggggaggggaggagaagggagtaatggggaggaggccgcgcggggtggggtctggcggtacgcgctggctgcgtcgacgtgctgacgccatgacgccccggctggtgtgtgtcggtgtgtatgtgtgtgtgtgagtgtgcgcgctccgagtgtgtgtgtatttgtgtatcggcggtcccgcaggtcccggatgttgcggacagtatgaggcaagcgcagggggacggggaccagcagctgtcgccgccgctctcagggtgaagagggaacagaaatctttgccccctgactttggaaatctcgtttaaccttcaaactggcgatgtcaagggttccaagtcctccacctccggcagaaatgtcgagtggccccgtagctgagagttggtgctacacacagatcaaggtagtgaaattctcctacatgtggaccatcaataactttagcttttgccgggaggaaatgggtgaagtcattaaaagttctacattttcatcaggagcaaatgataaactgaaatggtgtttgcgagtaaaccccaaagggttagatgaagaaagcaaagattacctgtcactttacctgttactggtcagctgtccaaagagtgaagttcgggcaaaattcaaattctccatcctgaatgccaagggagaagaaaccaaagctatggagagtcaacgggcatataggtttgtgcaaggcaaagactggggattcaagaaattcatccgtagagattttcttttggatgaggccaacgggcttctccctgatgacaagcttaccctcttctgcgaggtgagtgttgtgcaagattctgtcaacatttctggccagaataccatgaacatggtaaaggttcctgagtgccggctggcagatgagttaggaggactgtgggagaattcccggttcacagactgctgcttgtgtgttgccggccaggaattccaggctcacaaggctatcttagcagctcgttctccggtttttagtgccatgtttgaacatgaaatggaggagagcaaaaagaatcgagttgaaatcaatgatgtggagcctgaagtttttaaggaaatgatgtgcttcatttacacggggaaggctccaaacctcgacaaaatggctgatgatttgctggcagctgctgacaagtatgccctggagcgcttaaaggtcatgtgtgaggatgccctctgcagtaacctgtccgtggagaacgctgcagaaattctcatcctggccgacctccacagtgcagatcagttgaaaactcaggcagtggatttcatcaactatcatgcttcggatgtcttggagacctctgggtggaagtcaatggtggtgtcacatccccacttggtggctgaggcataccgctctctggcttcagcacagtgcccttttctgggacccccacgcaaacgcctgaagcaatcctaagatcctgcttgttgtaagactccgtttaatttccagaagcagcagccactgttgctgccactgaccaccaggtagacagcgcaatctgtggagcttttactctgttgtgaggggaagagactgcattgtggccccagacttttaaaacagcactaaataacttgggggaaacggggggagggaaaatgaaatgaaaaccctgttgctgcgtcactgtgttccctttggcctggctgagtttgatactgtggggattcagtttaggcgctggcccgaggatatcccagcggtggtacttcggagacacctgtctgcatctgactgagcagaacaaatcgtcaggtgcctggagcaaaaaggaaaaaaaaaaaa

SEQ ID NO: 139127 - DNA, 984 bp, Artificial Sequence
  derived and/or modified sequence
ggtgtgtgtcggtgtgtatgtgtgtgtgtgagtgtgcgcgctccgagtgtgtgtgtatttgtgtatcggcggtcccgcaggtcccggatgttgcggacagtatgaggcaagcgcagggggacggggaccagcagctgtcgccgccgctctcagagatttcctgttagacaagacaaattagagttttcctactgacttaacttgggtgaagagggaacagaaatctttgccccctgactttggaaatctcgtttaaccttcaaactggcgatgtcaagggttccaagtcctccacctccggcagaaatgtcgagtggccccgtagctgagagttggtgctacacacagatcaaggtagtgaaattctcctacatgtggaccatcaataactttagcttttgccgggaggaaatgggtgaagtcattaaaagttctacattttcatcaggagcaaatgataaactgaaatggtgtttgcgagtaaaccccaaagggttagatgaagaaagcaaagattacctgtcactttacctgttactggtcagctgtccaaagagtgaagttcgggcaaaattcaaattctccatcctgaatgccaagggagaagaaaccaaagctatggagagtcaacgggcatataggtttgtgcaaggcaaagactggggattcaagaaattcatccgtagagattttcttttggatgaggccaacgggcttctccctgatgacaagcttaccctcttctgcgaggtgagtgttgtgcaagattctgtcaacatttctggccagaataccatgaacatggtaaaggttcctgagtgccggctggcagatgagttaggaggactgtgggagaattcccggttcacagactgctgcttgtgtgttgccggccaggaattccaggctcacaaggctatcttagcagctcgttctccggtttttagtgccatgtttgaacatgaaatggaggagagcaaaaag

SEQ ID NO: 139128 - DNA, 919 bp, Artificial Sequence
  derived and/or modified sequence
agtgtgcgcgctccgagtgtgtgtgtatttgtgtatcggcggtcccgcaggtcccggatgttgcggacagtatgaggcaagcgcagggggacggggaccagcagctgtcgccgccgctctcagatcgagtcttgctctgtcacccaggctggagtgcagtggcgcgatctcagctcactgccacctttgcctcctgggttcaagcgattcttctgcctcagcctcccgagtagctgggattacagagatttcctgttagacaagacaaattagagttttcctactgacttaacttgggtgaagagggaacagaaatctttgccccctgactttggaaatctcgtttaaccttcaaactggcgatgtcaagggttccaagtcctccacctccggcagaaatgtcgagtggccccgtagctgagagttggtgctacacacagatcaaggtagtgaaattctcctacatgtggaccatcaataactttagcttttgccgggaggaaatgggtgaagtcattaaaagttctacattttcatcaggagcaaatgataaactgaaatggtgtttgcgagtaaaccccaaagggttagatgaagaaagcaaagattacctgtcactttacctgttactggtcagctgtccaaagagtgaagttcgggcaaaattcaaattctccatcctgaatgccaagggagaagaaaccaaagctatggagagtcaacgggcatataggtttgtgcaaggcaaagactggggattcaagaaattcatccgtagagattttcttttggatgaggccaacgggcttctccctgatgacaagcttaccctcttctgcgaggtgagtgttgtgcaagattctgtcaacatttctggccagaataccatgaacatggtaaaggttcctgagtgccggct

SEQ ID NO: 139129 - DNA, 428 bp, Artificial Sequence
  derived and/or modified sequence
gtcccggatgttgcggacagtatgaggcaagcgcagggggacggggaccagcagctgtcgccgccgctctcagagatttcctgttagacaagacaaattagagttttcctactgacttaacttgaaaagttcttcaggaaggtcgggcatggtgactcatgcctgtaatcccagcactttgggaggctgaggcaggaagattgcttgagctcaggagttcgagaccatcctggtcaacatgggtgaagagggaacagaaatctttgccccctgactttggaaatctcgtttaaccttcaaactggcgatgtcaagggttccaagtcctccacctccggcagaaatgtcgagtggccccgtagctgagagttggtgctacacacagatcaaggtagtgaaattctcctacatgtggaccatcaataact

SEQ ID NO: 139130 - DNA, 1134 bp, Artificial Sequence
  derived and/or modified sequence
gtgctgacgccatgacgccccggctggtgtgtgtcggtgtgtatgtgtgtgtgtgagtgtgcgcgctccgagtgtgtgtgtatttgtgtatcggcggtcccgcaggtcccggatgttgcggacagtatgaggcaagcgcagggggacggggaccagcagctgtcgccgccgctctcaggctctgggaaccacccttctactttctgtctctaggaatttcactactctagagatttcctgttagacaagacaaattagagttttcctactgacttaacttgggtgaagagggaacagaaatctttgccccctgactttggaaatctcgtttaaccttcaaactggcgatgtcaagggttccaagtcctccacctccggcagaaatgtcgagtggccccgtagctgagagttggtgctacacacagatcaaggtagtgaaattctcctacatgtggaccatcaataactttagcttttgccgggaggaaatgggtgaagtcattaaaagttctacattttcatcaggagcaaatgataaactgaaatggtgtttgcgagtaaaccccaaagggttagatgaagaaagcaaagattacctgtcactttacctgttactggtcagctgtccaaagagtgaagttcgggcaaaattcaaattctccatcctgaatgccaagggagaagaaaccaaagctatggagagtcaacgggcatataggtttgtgcaaggcaaagactggggattcaagaaattcatccgtagagattttcttttggatgaggccaacgggcttctccctgatgacaagcttaccctcttctgcgaggtgagtgttgtgcaagattctgtcaacatttctggccagaataccatgaacatggtaaaggttcctgagtgccggctggcagatgagttaggaggactgtgggagaattcccggttcacagactgctgcttgtgtgttgccggccaggaattccaggctcacaaggctatcttagcagctcgttctccggtttttagtgccatgtttgaacatgaaatggaggagagcaaaaagaatcgagttgaaatcaatgatgtggagcctgaagtttttaaggaaatgatgtgcttcatttacacggggaagg

SEQ ID NO: 139131 - DNA, 773 bp, Artificial Sequence
  derived and/or modified sequence
taaagcatttaactggaaaggaccttggaaatccttttaaaggaggatgggggtggaaatgcacaggttgcttctctctctctctctctttttttttttttttgagacggtcacccaggctgtagtgcagtggcgtgatctcggctcactgtggcctccacctcccaagtagctgggattacaggcttgcgccatcatgcagggctaatttttgtatttttagtagagacgaggtttcatcatgttggccaggctggtctggaactcctgacctcaagtgatctgcccaccttggcctcccaaagtgctgggattaaaggcatgagccaccacgcctggcctaggttgttcctctactgtgaatcttgaggttatggtttccactagactatagtgctcaactatagtggcctattttaagtggccttataattcctaaccaaagtgacttgtgaaacagaggaccctggataaatttaaatgttataaagatgataaaatgtacagggtgaagagggaacagaaatctttgccccctgactttggaaatctcgtttaaccttcaaactggcgatgtcaagggttccaagtcctccacctccggcagaaatgtcgagtggccccgtagctgagagttggtgctacacacagatcaaggtagtgaaattctcctacatgtggaccatcaataactttagcttttgccgggaggaaatgggtgaagtcattaaaagttctacattttcatcaggagcaaatgataaactgaaatg

SEQ ID NO: 139132 - DNA, 1454 bp, Artificial Sequence
  derived and/or modified sequence
gtgtgtgtatttgtgtatcggcggtcccgcaggtcccggatgttgcggacagtatgaggcaagcgcagggggacggggaccagcagctgtcgccgccgctctcagagatttcctgttagacaagacaaattagagttttcctactgacttaacttgaataaatatatacttgatactggatgaaaaactcagttttaccaggactgggattagagggtgaagagggaacagaaatctttgccccctgactttggaaatctcgtttaaccttcaaactggcgatgtcaagggttccaagtcctccacctccggcagaaatgtcgcttttgccgggaggaaatgggtgaagtcattaaaagttctacattttcatcaggagcaaatgataaactgaaatggtgtttgcgagtaaaccccaaagggttagatgaagaaagcaaagattacctgtcactttacctgttactggtcagctgtccaaagagtgaagttcgggcaaaattcaaattctccatcctgaatgccaagggagaagaaaccaaagctatggagagtcaacgggcatataggtttgtgcaaggcaaagactggggattcaagaaattcatccgtagagattttcttttggatgaggccaacgggcttctccctgatgacaagcttaccctcttctgcgaggtgagtgttgtgcaagattctgtcaacatttctggccagaataccatgaacatggtaaaggttcctgagtgccggctggcagatgagttaggaggactgtgggagaattcccggttcacagactgctgcttgtgtgttgccggccaggaattccaggctcacaaggctatcttagcagctcgttctccggtttttagtgccatgtttgaacatgaaatggaggagagcaaaaagaatcgagttgaaatcaatgatgtggagcctgaagtttttaaggaaatgatgtgcttcatttacacggggaaggctccaaacctcgacaaaatggctgatgatttgctggcagctgctgacaagtatgccctggagcgcttaaaggtcatgtgtgaggatgccctctgcagtaacctgtccgtggagaacgctgcagaaattctcatcctggccgacctccacagtgcagatcagttgaaaactcaggcagtggatttcatcaactatcatgcttcggatgtcttggagacctctgggtggaagtcaatggtggtgtcacatccccacttggtggctgaggcataccgctctctggcttcagcacagtgcccttttctgggacccccacgcaaacgcctgaagcaatcctaagatcctgcttgttgtaagactccgtttaatttccagaagcagcagccactgttgctgccactgaccaccaggtagacagcgcaatctgtggagcttttactctgttgtgaggggaagagactgcattgtgg

SEQ ID NO: 139133 - DNA, 873 bp, Artificial Sequence
  derived and/or modified sequence
atgacgccccggctggtgtgtgtcggtgtgtatgtgtgtgtgtgagtgtgcgcgctccgagtgtgtgtgtatttgtgtatcggcggtcccgcaggtcccggatgttgcggacagtatgaggcaagcgcagggggacggggaccagcagctgtcgccgccgctctcagatcgagtcttgctctgtcacccaggctggagtgcagtggcgcgatctcagctcactgccacctttgcctcctgggttcaagcgattcttctgcctcagcctcccgagtagctgggattacaggctctgggaaccacccttctactttctgtctctaggaatttcactactctagagatttcctgttagacaagacaaattagagttttcctactgacttaacttgggtgaagagggaacagaaatctttgccccctgactttggaaatctcgtttaaccttcaaactggcgatgtcaagggttccaagtcctccacctccggcagaaatgtcgagtggccccgtagctgagagttggtgctacacacagatcaaggtagtgaaattctcctacatgtggaccatcaataactttagcttttgccgggaggaaatgggtgaagtcattaaaagttctacattttcatcaggagcaaatgataaactgaaatggtgtttgcgagtaaaccccaaagggttagatgaagaaagcaaagattacctgtcactttacctgttactggtcagctgtccaaagagtgaagttcgggcaaaattcaaattctccatcctgaatgccaagggagaagaaaccaaagctatggagagtcaacgggcatataggtttgtgcaaggcaaagactggggattcaagaaattcatccgta

SEQ ID NO: 139134 - DNA, 563 bp, Artificial Sequence
  derived and/or modified sequence
gtgtatcggcggtcccgcaggtcccggatgttgcggacagtatgaggcaagcgcagggggacggggaccagcagctgtcgccgccgctctcaggctctgggaaccacccttctactttctgtctctaggaatttcactactctagggtgaagagggaacagaaatctttgccccctgactttggaaatctcgtttaaccttcaaactggcgatgtcaagggttccaagtcctccacctccggcagaaatgtcgagtggccccgtagctgagagttggtgctacacacagatcaaggtagtgaaattctcctacatgtggaccatcaataactttagcttttgccgggaggaaatgggtgaagtcattaaaagttctacattttcatcaggagcaaatgataaactgaaatggtgtttgcgagtaaaccccaaagggttagatgaagaaagcaaagattacctgtcactttacctgttactggtcagctgtccaaagagtgaagttcgggcaaaattcaaattctccatcctgaatgccaagggagaagaaaccaaagctatgg

SEQ ID NO: 139135 - DNA, 1125 bp, Artificial Sequence
  derived and/or modified sequence
atgtcacgggtgccttcccccccacctcctgcagagatgtcctccggaccggtggctgagagctggtgttatacacagattaaggtcgtgaagtttagctatatgtggacgatcaacaactttagcttctgccgagaagaaatgggagaggtaattaaaagctctactttcagcagcggggcaaatgataagctgaaatggtgtctccgcgtgaaccctaaagggctagacgaggagtccaaggattatcttagtctgtacctgctgctggttagctgccctaaaagcgaagtaagagctaagttcaagttctccatcctgaatgcaaagggggaggaaaccaaagcaatggagagccagcgggcataccggtttgtccagggaaaagattggggattcaagaaattcattcgacgggattttcttcttgacgaggcaaatgggctcctcccagatgacaaactgaccctcttctgtgaggtgtcagtggtccaggatagcgtgaacatctctggacagaacaccatgaatatggtcaaagtgcctgaatgtagactcgcagacgagctgggcggactctgggagaactcgcggttcaccgactgctgcctgtgcgtggccggacaagaattccaggctcataaagccattctggccgctcggagtccagttttctccgctatgttcgagcatgaaatggaggaatccaaaaaaaatagggtggagattaatgacgttgagcctgaggtctttaaagaaatgatgtgttttatttataccggcaaggcacctaacctcgacaagatggcagatgacttgcttgccgctgccgataaatatgctctggaaaggttaaaggtaatgtgtgaagacgcactttgttctaatctgagcgttgaaaatgcagcagagatccttatcttggcggaccttcatagtgcagatcagctaaagacacaagccgtggatttcatcaactaccacgctagcgacgtgcttgaaacgtcaggctggaagtctatggtcgtgtcacatccacatcttgttgctgaggcttaccgctccctcgccagcgcacagtgtcctttcttgggcccacctcggaagcgcctgaaacagtcatag

SEQ ID NO: 139136 - DNA, 1125 bp, Artificial Sequence
  derived and/or modified sequence
atgtctcgtgtcccctctcctccaccaccggcagagatgtcgagcggcccagtggctgagagctggtgctacacacagataaaagtggtgaaatttagctatatgtggactattaacaacttcagcttctgtagggaagaaatgggcgaggtgatcaagtcaagtacctttagcagcggggcaaacgataaactcaagtggtgccttcgcgtgaaccccaaaggtctggacgaggaaagtaaggactatctatccctttacctgctgctcgtctcatgccccaagagtgaggtacgcgcaaaattcaagttttctattctgaatgccaagggcgaggagacgaaagccatggagagtcagagagcgtacaggtttgttcagggtaaggattggggctttaagaaattcattcggcgtgattttttactggacgaggcaaatggtctactccccgatgacaaactgactctgttttgtgaggtgagtgttgtgcaggattcagtgaatataagcgggcagaataccatgaatatggtgaaggtaccggaatgcagattggctgatgagctggggggactctgggagaactctaggttcaccgactgctgcctgtgtgtcgcaggtcaggagtttcaggcccataaagctatccttgccgcacgcagccccgtcttcagtgcaatgtttgagcacgagatggaagagagtaaaaaaaatcgcgtcgagattaatgatgttgaacccgaagtgtttaaggagatgatgtgttttatatacacgggcaaagcaccaaatctggataagatggccgatgacttgcttgctgcagcggacaaatacgccttagagcggctcaaagttatgtgcgaggacgctctgtgtagtaacttatctgtggagaacgcagccgaaatactcatcctggccgacctgcactccgcagaccagctgaaaactcaggcagtggattttatcaactaccacgccagcgatgtgcttgagacttcaggctggaaatcgatggtcgtaagccacccacacctcgtcgcagaggcttaccggagcctggcttctgcacagtgcccctttcttggcccaccgcgaaagagattaaaacagtcctag

SEQ ID NO: 139137 - DNA, 1125 bp, Artificial Sequence
  derived and/or modified sequence
atgagcagagtcccgtcacctccaccacctgctgaaatgtcctcaggccctgtcgccgagtcttggtgctatacacagattaaagtcgtcaaatttagttatatgtggacaatcaataatttttccttctgcagggaagagatgggcgaagttatcaagagctccacgttctccagcggagccaacgacaagctgaagtggtgcctacgcgtcaatccaaaggggctggacgaggagtcaaaggattacctatcactgtatcttttgttagtttcctgccctaagagtgaggtccgcgcaaaattcaaattttctattctcaatgcaaagggtgaggaaaccaaagccatggaatctcagagggcgtataggttcgtgcaaggaaaggattggggattcaagaaatttatacgtcgggacttcttgctcgacgaggcaaacggactgctccccgacgacaagctgactttgttttgtgaggtgagcgtagttcaggattctgttaacatctctggtcagaataccatgaacatggtgaaggtgcccgaatgtagactggccgacgaactgggagggctgtgggagaactccaggtttaccgactgttgcctgtgcgtagccggtcaggagttccaagcacacaaagctatattagccgcacgctccccagttttttctgcaatgttcgagcacgagatggaagaatctaaaaagaacagggtagaaatcaatgatgtggagccagaggtgtttaaagaaatgatgtgctttatttacacggggaaggctcccaacctcgataaaatggcagatgacctgctggccgcagcagacaagtacgccctagagaggcttaaagtaatgtgcgaggacgctctgtgctctaacctgtccgtggagaatgccgcagaaatcctgatcctggcagaccttcacagtgccgatcagctaaaaacacaagccgtggatttcattaactaccacgcctctgatgtcctggaaacttctgggtggaagagcatggtggtcagccacccgcatctggtggccgaggcctacagaagccttgcttccgctcagtgcccgtttctcgggcctcccagaaagcgcctcaagcagtcttag

SEQ ID NO: 139138 - DNA, 99 bp, Artificial Sequence
  derived and/or modified sequence
atgtcacgggtcccaagtccccctcccccagccgagatgagctccggaccagtggctgaaagttggtgttacacgcagatcaaagtggtgaagttttag

SEQ ID NO: 139139 - DNA, 777 bp, Artificial Sequence
  derived and/or modified sequence
atggagtcccagcgggcatacagattcgtccagggcaaagattggggcttcaaaaaatttattaggcgagattttctgctggacgaagctaatggtctattgcccgacgataaattgactcttttctgcgaggtgtccgtggtccaggattccgtgaatattagtggacagaacacaatgaacatggttaaagtccctgagtgcagactggccgacgagctgggaggactctgggaaaactcgcgcttcacagactgctgtctgtgcgtcgctgggcaagaattccaagcacacaaggccatcctggctgcgcgatcgcctgtgttttcagccatgttcgaacacgagatggaagagtccaagaaaaaccgggtggagataaatgacgtggagccagaggtcttcaaagagatgatgtgctttatttacacagggaaggcaccaaatttagataaaatggccgacgatctcctcgctgcagcagataagtacgcgctcgaacggttaaaggtcatgtgtgaagatgcattatgctctaacctcagcgtcgagaatgctgctgagatcctcattctcgctgatctacactccgcggatcagttgaagactcaagctgttgacttcattaactaccatgctagcgatgttttggagacttcagggtggaaatccatggtcgtatcccacccacatctggtagcagaggcctaccgtagtctcgcgagcgcccagtgtccgttcttggggcctccgaggaagcggctgaagcagtcctag

SEQ ID NO: 139140 - DNA, 1125 bp, Artificial Sequence
  derived and/or modified sequence
atgtcccgggtcccttccccgccaccgcctgccgagatgtcttcagggccagttgcggaaagttggtgctacactcagataaaagttgttaagttctcctacatgtggacaattaataactttagcttttgcagagaagagatgggagaggtcatcaaaagttctaccttctcgtccggtgctaatgataagctgaagtggtgcttgcgtgtgaaccccaaagggctggacgaagagtcaaaagactacctcagcctgtatctgctgctcgtctcttgccccaaatccgaagttcgagcaaagtttaagttctccatactcaatgccaaaggtgaggagacaaaagctatggagtcgcaaagagcctacagattcgtccaaggaaaggactggggctttaaaaaatttatccggagagactttctgctggacgaagctaacggactgctgcctgacgacaagctgacattgttttgtgaggtatctgtggtgcaggattccgtgaatatttccggtcaaaatacaatgaacatggtgaaagttccggagtgtaggctcgctgacgagttggggggattatgggaaaacagcagattcactgactgctgcctttgcgtcgcaggccaggaattccaggcgcataaggccattctagccgctcgaagccccgtcttctccgccatgtttgagcacgaaatggaagaatcaaagaaaaatcgcgtcgaaattaacgatgtcgagcctgaggtgtttaaggagatgatgtgctttatctacaccggcaaggccccaaatttggataagatggccgacgacctgctcgcggctgcagacaagtatgccctggaaaggttgaaggtgatgtgcgaagacgcactgtgcagcaatctctcagttgaaaatgcagcagaaattctcattctggccgatttgcactccgccgaccagcttaagacccaagcagtggatttcatcaactaccacgcttctgatgttttagaaaccagcggctggaagagcatggtggtctcccacccacatctggttgccgaggcataccgctcactggcttcggcgcagtgtccatttctcggtccaccacgcaaacgactgaagcaaagttag

SEQ ID NO: 139141 - DNA, 1125 bp, Artificial Sequence
  derived and/or modified sequence
atgtcgcgcgttccttcaccccctccacctgcggaaatgtcttcaggccctgtggcagagagctggtgctatacccagataaaggtagtcaagttctcatatatgtggaccatcaataacttcagtttctgccgagaggagatgggagaggtgattaaaagcagcacgttctcctcgggggctaacgacaagctcaaatggtgccttcgcgtaaaccctaagggcttagacgaagaaagcaaggactatctttcactctacctattgctggtctcgtgccctaagagcgaagtgcgcgctaagttcaaatttagcatcctcaacgctaagggcgaagaaaccaaggctatggagagccaaagagcttacagatttgttcagggcaaggactggggatttaagaaatttatcaggagggatttcctcctggacgaggcgaatggcctcttgcccgatgataaactgaccctattttgcgaagtgagcgtcgtccaagattctgtgaacatctctggccagaacactatgaatatggtgaaagtgccggagtgccggctagccgacgagctgggtgggctgtgggagaatagcaggtttactgattgctgcctgtgtgtagccggtcaggaatttcaagcgcacaaggctatccttgccgcacggtctccagtgttttcagcaatgtttgaacacgaaatggaagaatctaaaaagaacagggtcgaaattaacgatgtcgagcccgaagtgtttaaggaaatgatgtgctttatttatacagggaaggcccctaatctcgataaaatggcagacgacctattagcggctgccgacaagtatgcactggaacgtcttaaagtgatgtgtgaggacgctctgtgttcaaatctgtctgtagaaaacgcagccgagatcctgatcctcgccgatttgcattctgcagatcagctgaagactcaggctgtggatttcataaattaccacgcatctgatgtgctggaaaccagcggatggaagtcaatggtcgtcagtcatccacatttagtggctgaagcctataggtcactcgcgagcgcacagtgtccgtttctgggtccaccacgcaaacgcctcaaacagtcatag

SEQ ID NO: 139142 - DNA, 717 bp, Artificial Sequence
  derived and/or modified sequence
atgtccagggtacctagccccccacctccagccgaaatgtcaagcgggcctgtggctgagagttggtgttacactcaaatcaaagttgtcaagttttcctacatgtggaccataaataacttctctttttgtagggaagagatgggcgaagtgattaaaagcagtaccttttcctccggtgcaaacgataaattaaagtggtgtttgcgggttaatcctaagggactagacgaagaatctaaagattatttgtcactgtacctcctgctggtgagttgcccaaagtctgaggtacgcgcaaaattcaagttttctatcttgaatgccaaaggggaggagaccaaagctatggaaagccaaagggcatatcgcttcgttcagggaaaagactggggatttaagaagtttattcgcagggatttcctcctcgacgaggccaacggcctcctgcccgacgataaattaaccttgttctgtgaagtgtctgtggtgcaagattccgtgaatattagtggccagaataccatgaacatggtcaaagtccccgagtgtcgcttagctgacgagctgggcggtttgtgggagaattcacgcttcaccgattgttgcttgtgcgtggccggacaggaatttcaggcacataaggcgattctggccgctaggagccctgtcttcagtgccatgttcgaacacgaaatggaagagagtaagaaatag

SEQ ID NO: 139143 - DNA, 561 bp, Artificial Sequence
  derived and/or modified sequence
atgagtagggtgccctccccaccacctcctgccgaaatgtccagcggccctgtggcagaatcttggtgttatactcaaatcaaggtagtcaaattttcatatatgtggactattaataatttctctttctgccgtgaagagatgggcgaagtgataaagagcagtacttttagttcaggagcaaacgacaaactcaagtggtgcctcagagtgaaccctaaaggcttggacgaggaaagtaaagattatctcagtctctacctgctgctggtctcatgccctaaatccgaagtcagggccaaattcaaattctcaatcctgaatgccaaaggtgaggagacgaaggcaatggagagtcagcgagcctatcgttttgtgcagggtaaggattggggctttaagaagtttatacgccgagactttttacttgatgaggcaaatggtttgctgcctgatgacaagttgaccctattctgtgaggtctcagtggttcaagacagcgtgaacatttcgggtcagaacacaatgaacatggtgaaagtgcccgaatgtcggctttag

SEQ ID NO: 139144 - DNA, 123 bp, Artificial Sequence
  derived and/or modified sequence
atgagccgcgtgcctagcccaccaccaccagccgaaatgtcctccgggcctgttgccgagtcttggtgctacacgcagatcaaggtggtgaagttttcctatatgtggacaatcaacaactag

SEQ ID NO: 139145 - DNA, 789 bp, Artificial Sequence
  derived and/or modified sequence
atgtcacgggttccctcgcctcctccccctgctgagatgagttccgggccagtcgcagagtcttggtgttacactcagatcaaggttgtcaagttttcgtacatgtggaccatcaataattttagtttttgccgggaagaaatgggtgaggtgattaaatcttctacattttcctccggagcaaacgacaagctgaaatggtgcctgcgagtgaacccaaaagggttggatgaagagtccaaggactacttgtccctatatctgttacttgtcagctgccccaagtccgaggtgcgagccaagttcaaatttagcatcctgaatgcgaaaggcgaggaaactaaggctatggaatcccaacgcgcataccggttcgttcagggcaaagattggggttttaaaaaatttatccggagggacttcctgctggacgaggcaaacggcctactgcctgatgacaaattgactttattctgcgaggtgtcagttgtgcaggattctgtgaacatatctgggcagaacactatgaacatggtgaaggtgccagagtgtcgcctggccgatgagctgggcggtttgtgggaaaattccaggttcacggactgttgtttgtgcgttgcgggacaagagtttcaggcccacaaggccattctggctgcgaggtcacctgtcttctcggcaatgtttgaacacgaaatggaagaaagcaagaagaaccgggtggagataaatgacgttgagcccgaagtattcaaagagatgatgtgcttcatttataccgggaagtag

SEQ ID NO: 139146 - DNA, 201 bp, Artificial Sequence
  derived and/or modified sequence
atgtcacgcgtgccgtcccctccaccaccagcggaaatgtccagtgggcctgtagccgagagctggtgctatactcaaattaaagtagtaaaattcagttacatgtggacaattaataatttttccttctgccgtgaagagatgggagaggtgataaaaagttcaactttcagcagtggggctaatgataagctgaaatag

SEQ ID NO: 139147 - DNA, 984 bp, Artificial Sequence
  derived and/or modified sequence
atgggggaggtaattaagtcctccacctttagctctggggcaaacgataagttgaagtggtgtcttagagtgaatccaaaaggactcgacgaggaatctaaggattatctgtccttatatctactgctcgtgagctgcccgaagtccgaagtcagggctaaatttaaattctcaattctgaatgcaaagggggaggagaccaaagcgatggagtctcaaagagcctatcggttcgttcaaggcaaagactggggattcaaaaaattcattcgcagagatttcctgctcgacgaggcaaacgggctgttgcccgacgacaaactgaccttgttctgcgaagtgtctgtcgtccaggacagtgtaaatataagtggacagaacacaatgaatatggtaaaggttcccgagtgccgactggccgacgagttaggcggtctgtgggaaaattccaggtttaccgattgctgtctgtgtgtcgctgggcaggagtttcaggcccacaaggctatcctggccgctcgaagtcctgtcttttcggcgatgttcgagcatgaaatggaggaaagcaagaagaacagagtggaaatcaacgacgttgagcctgaagtgttcaaggagatgatgtgctttatttacacaggcaaggccccaaatttagataaaatggccgacgacctgctggccgcagctgataaatatgccctggagcgtctgaaagtgatgtgtgaagacgccctgtgctctaatctgtccgttgagaatgctgccgagatactgattctggctgatctccattccgcggatcagttaaaaacgcaagctgtggactttatcaattaccatgcgtccgacgtcctggagacaagcggatggaaatccatggttgtgtcgcacccccatctggtggcagaagcataccgatctctggcatcagcacagtgtccattcttgggcccaccccgtaagagactaaagcagtcttag

SEQ ID NO: 139148 - DNA, 417 bp, Artificial Sequence
  derived and/or modified sequence
atgtctcgggtgccatccccgccacctccggctgaaatgagttctggaccagttgcggaatcttggtgctacacgcaaatcaaagtcgtgaagtttagttatatgtggacaattaacaacttttctttctgccgagaagaaatgggagaggtcataaagtcatctacattctccagtggggctaatgacaaattgaagtggtgtctgcgggtcaaccccaaggggctggacgaggaatctaaggactatttgagtctctatctgttattagtttcctgcccaaagagcgaagttcgggcaaaatttaagttctctatcctgaatgctaagggagaggaaactaaggctatggagtcccagcgggcatatagatttgtgcagggtaaggactggggattcaaaaaattcattagatag

SEQ ID NO: 139149 - DNA, 354 bp, Artificial Sequence
  derived and/or modified sequence
atgtctagggtaccttctcctcctcctccagctgagatgtcgagtggccctgtagccgaaagctggtgctacactcaaattaaagtggtaaagttttcatacatgtggactattaacaatttttccttttgccgagaggagatgggcgaggtcattaaatcttcgaccttcagtagtggggcaaatgataagctgaagtggtgtttgagggtgaatcctaagggcctcgacgaggagtctaaggactatttgagtctgtatctgttactggtatcctgccctaaaagtgaggtccgtgcgaaattcaaatttagcatcctgaatgctaaaggcgaagaaaccaaagccatgtag

SEQ ID NO: 139150 - DNA, 1125 bp, Artificial Sequence
  derived and/or modified sequence
atgagcagagtgcccagcccccccccccccgccgagatgagcagcggccccgtggccgagagctggtgctacacccagatcaaggtggtgaagttcagctacatgtggaccatcaacaacttcagcttctgcagagaggagatgggcgaggtgatcaagagcagcaccttcagcagcggcgccaacgacaagctgaagtggtgcctgagagtgaaccccaagggcctggacgaggagagcaaggactacctgagcctgtacctgctgctggtgagctgccccaagagcgaggtgagagccaagttcaagttcagcatcctgaacgccaagggcgaggagaccaaggccatggagagccagagagcctacagattcgtgcagggcaaggactggggcttcaagaagttcatcagaagagacttcctgctggacgaggccaacggcctgctgcccgacgacaagctgaccctgttctgcgaggtgagcgtggtgcaggacagcgtgaacatcagcggccagaacaccatgaacatggtgaaggtgcccgagtgcagactggccgacgagctgggcggcctgtgggagaacagcagattcaccgactgctgcctgtgcgtggccggccaggagttccaggcccacaaggccatcctggccgccagaagccccgtgttcagcgccatgttcgagcacgagatggaggagagcaagaagaacagagtggagatcaacgacgtggagcccgaggtgttcaaggagatgatgtgcttcatctacaccggcaaggcccccaacctggacaagatggccgacgacctgctggccgccgccgacaagtacgccctggagagactgaaggtgatgtgcgaggacgccctgtgcagcaacctgagcgtggagaacgccgccgagatcctgatcctggccgacctgcacagcgccgaccagctgaagacccaggccgtggacttcatcaactaccacgccagcgacgtgctggagaccagcggctggaagagcatggtggtgagccacccccacctggtggccgaggcctacagaagcctggccagcgcccagtgccccttcctgggcccccccagaaagagactgaagcagagctag

SEQ ID NO: 139151 - DNA, 99 bp, Artificial Sequence
  derived and/or modified sequence
atgagcagagtgcccagcccccccccccccgccgagatgagcagcggccccgtggccgagagctggtgctacacccagatcaaggtggtgaagttctag

SEQ ID NO: 139152 - DNA, 777 bp, Artificial Sequence
  derived and/or modified sequence
atggagagccagagagcctacagattcgtgcagggcaaggactggggcttcaagaagttcatcagaagagacttcctgctggacgaggccaacggcctgctgcccgacgacaagctgaccctgttctgcgaggtgagcgtggtgcaggacagcgtgaacatcagcggccagaacaccatgaacatggtgaaggtgcccgagtgcagactggccgacgagctgggcggcctgtgggagaacagcagattcaccgactgctgcctgtgcgtggccggccaggagttccaggcccacaaggccatcctggccgccagaagccccgtgttcagcgccatgttcgagcacgagatggaggagagcaagaagaacagagtggagatcaacgacgtggagcccgaggtgttcaaggagatgatgtgcttcatctacaccggcaaggcccccaacctggacaagatggccgacgacctgctggccgccgccgacaagtacgccctggagagactgaaggtgatgtgcgaggacgccctgtgcagcaacctgagcgtggagaacgccgccgagatcctgatcctggccgacctgcacagcgccgaccagctgaagacccaggccgtggacttcatcaactaccacgccagcgacgtgctggagaccagcggctggaagagcatggtggtgagccacccccacctggtggccgaggcctacagaagcctggccagcgcccagtgccccttcctgggcccccccagaaagagactgaagcagagctag

SEQ ID NO: 139153 - DNA, 717 bp, Artificial Sequence
  derived and/or modified sequence
atgagcagagtgcccagcccccccccccccgccgagatgagcagcggccccgtggccgagagctggtgctacacccagatcaaggtggtgaagttcagctacatgtggaccatcaacaacttcagcttctgcagagaggagatgggcgaggtgatcaagagcagcaccttcagcagcggcgccaacgacaagctgaagtggtgcctgagagtgaaccccaagggcctggacgaggagagcaaggactacctgagcctgtacctgctgctggtgagctgccccaagagcgaggtgagagccaagttcaagttcagcatcctgaacgccaagggcgaggagaccaaggccatggagagccagagagcctacagattcgtgcagggcaaggactggggcttcaagaagttcatcagaagagacttcctgctggacgaggccaacggcctgctgcccgacgacaagctgaccctgttctgcgaggtgagcgtggtgcaggacagcgtgaacatcagcggccagaacaccatgaacatggtgaaggtgcccgagtgcagactggccgacgagctgggcggcctgtgggagaacagcagattcaccgactgctgcctgtgcgtggccggccaggagttccaggcccacaaggccatcctggccgccagaagccccgtgttcagcgccatgttcgagcacgagatggaggagagcaagaagtag

SEQ ID NO: 139154 - DNA, 561 bp, Artificial Sequence
  derived and/or modified sequence
atgagcagagtgcccagcccccccccccccgccgagatgagcagcggccccgtggccgagagctggtgctacacccagatcaaggtggtgaagttcagctacatgtggaccatcaacaacttcagcttctgcagagaggagatgggcgaggtgatcaagagcagcaccttcagcagcggcgccaacgacaagctgaagtggtgcctgagagtgaaccccaagggcctggacgaggagagcaaggactacctgagcctgtacctgctgctggtgagctgccccaagagcgaggtgagagccaagttcaagttcagcatcctgaacgccaagggcgaggagaccaaggccatggagagccagagagcctacagattcgtgcagggcaaggactggggcttcaagaagttcatcagaagagacttcctgctggacgaggccaacggcctgctgcccgacgacaagctgaccctgttctgcgaggtgagcgtggtgcaggacagcgtgaacatcagcggccagaacaccatgaacatggtgaaggtgcccgagtgcagactgtag

SEQ ID NO: 139155 - DNA, 123 bp, Artificial Sequence
  derived and/or modified sequence
atgagcagagtgcccagcccccccccccccgccgagatgagcagcggccccgtggccgagagctggtgctacacccagatcaaggtggtgaagttcagctacatgtggaccatcaacaactag

SEQ ID NO: 139156 - DNA, 789 bp, Artificial Sequence
  derived and/or modified sequence
atgagcagagtgcccagcccccccccccccgccgagatgagcagcggccccgtggccgagagctggtgctacacccagatcaaggtggtgaagttcagctacatgtggaccatcaacaacttcagcttctgcagagaggagatgggcgaggtgatcaagagcagcaccttcagcagcggcgccaacgacaagctgaagtggtgcctgagagtgaaccccaagggcctggacgaggagagcaaggactacctgagcctgtacctgctgctggtgagctgccccaagagcgaggtgagagccaagttcaagttcagcatcctgaacgccaagggcgaggagaccaaggccatggagagccagagagcctacagattcgtgcagggcaaggactggggcttcaagaagttcatcagaagagacttcctgctggacgaggccaacggcctgctgcccgacgacaagctgaccctgttctgcgaggtgagcgtggtgcaggacagcgtgaacatcagcggccagaacaccatgaacatggtgaaggtgcccgagtgcagactggccgacgagctgggcggcctgtgggagaacagcagattcaccgactgctgcctgtgcgtggccggccaggagttccaggcccacaaggccatcctggccgccagaagccccgtgttcagcgccatgttcgagcacgagatggaggagagcaagaagaacagagtggagatcaacgacgtggagcccgaggtgttcaaggagatgatgtgcttcatctacaccggcaagtag

SEQ ID NO: 139157 - DNA, 201 bp, Artificial Sequence
  derived and/or modified sequence
atgagcagagtgcccagcccccccccccccgccgagatgagcagcggccccgtggccgagagctggtgctacacccagatcaaggtggtgaagttcagctacatgtggaccatcaacaacttcagcttctgcagagaggagatgggcgaggtgatcaagagcagcaccttcagcagcggcgccaacgacaagctgaagtag

SEQ ID NO: 139158 - DNA, 984 bp, Artificial Sequence
  derived and/or modified sequence
atgggcgaggtgatcaagagcagcaccttcagcagcggcgccaacgacaagctgaagtggtgcctgagagtgaaccccaagggcctggacgaggagagcaaggactacctgagcctgtacctgctgctggtgagctgccccaagagcgaggtgagagccaagttcaagttcagcatcctgaacgccaagggcgaggagaccaaggccatggagagccagagagcctacagattcgtgcagggcaaggactggggcttcaagaagttcatcagaagagacttcctgctggacgaggccaacggcctgctgcccgacgacaagctgaccctgttctgcgaggtgagcgtggtgcaggacagcgtgaacatcagcggccagaacaccatgaacatggtgaaggtgcccgagtgcagactggccgacgagctgggcggcctgtgggagaacagcagattcaccgactgctgcctgtgcgtggccggccaggagttccaggcccacaaggccatcctggccgccagaagccccgtgttcagcgccatgttcgagcacgagatggaggagagcaagaagaacagagtggagatcaacgacgtggagcccgaggtgttcaaggagatgatgtgcttcatctacaccggcaaggcccccaacctggacaagatggccgacgacctgctggccgccgccgacaagtacgccctggagagactgaaggtgatgtgcgaggacgccctgtgcagcaacctgagcgtggagaacgccgccgagatcctgatcctggccgacctgcacagcgccgaccagctgaagacccaggccgtggacttcatcaactaccacgccagcgacgtgctggagaccagcggctggaagagcatggtggtgagccacccccacctggtggccgaggcctacagaagcctggccagcgcccagtgccccttcctgggcccccccagaaagagactgaagcagagctag

SEQ ID NO: 139159 - DNA, 417 bp, Artificial Sequence
  derived and/or modified sequence
atgagcagagtgcccagcccccccccccccgccgagatgagcagcggccccgtggccgagagctggtgctacacccagatcaaggtggtgaagttcagctacatgtggaccatcaacaacttcagcttctgcagagaggagatgggcgaggtgatcaagagcagcaccttcagcagcggcgccaacgacaagctgaagtggtgcctgagagtgaaccccaagggcctggacgaggagagcaaggactacctgagcctgtacctgctgctggtgagctgccccaagagcgaggtgagagccaagttcaagttcagcatcctgaacgccaagggcgaggagaccaaggccatggagagccagagagcctacagattcgtgcagggcaaggactggggcttcaagaagttcatcagatag

SEQ ID NO: 139160 - DNA, 354 bp, Artificial Sequence
  derived and/or modified sequence
atgagcagagtgcccagcccccccccccccgccgagatgagcagcggccccgtggccgagagctggtgctacacccagatcaaggtggtgaagttcagctacatgtggaccatcaacaacttcagcttctgcagagaggagatgggcgaggtgatcaagagcagcaccttcagcagcggcgccaacgacaagctgaagtggtgcctgagagtgaaccccaagggcctggacgaggagagcaaggactacctgagcctgtacctgctgctggtgagctgccccaagagcgaggtgagagccaagttcaagttcagcatcctgaacgccaagggcgaggagaccaaggccatgtag

SEQ ID NO: 139161 - DNA, 600 bp, Artificial Sequence
  derived and/or modified sequence
atggccaacagaggccccgcctacggcctgagcagagaggtgcagcagaagatcgagaagcagtacgacgccgacctggagcagatcctgatccagtggatcaccacccagtgcagaaaggacgtgggcagaccccagcccggcagagagaacttccagaactggctgaaggacggcaccgtgctgtgcgagctgatcaacgccctgtaccccgagggccaggcccccgtgaagaagatccaggccagcaccatggccttcaagcagatggagcagatcagccagttcctgcaggccgccgagagatacggcatcaacaccaccgacatcttccagaccgtggacctgtgggagggcaagaacatggcctgcgtgcagagaaccctgatgaacctgggcggcctggccgtggccagagacgacggcctgttcagcggcgaccccaactggttccccaagaagagcaaggagaaccccagaaacttcagcgacaaccagctgcaggagggcaagaacgtgatcggcctgcagatgggcaccaacagaggcgccagccaggccggcatgaccggctacggcatgcccagacagatcctgtag

SEQ ID NO: 139162 - DNA, 564 bp, Artificial Sequence
  derived and/or modified sequence
atggccaacagaggccccgcctacggcctgagcagagaggtgcagcagaagatcgagaagcagtacgacgccgacctggagcagatcctgatccagtggatcaccacccagtgcagaaaggacgtgggcagaccccagcccggcagagagaacttccagaactggctgaaggacggcaccgtgctgtgcgagctgatcaacgccctgtaccccgagggccaggcccccgtgaagaagatccaggccagcaccatggccttcaagcagatggagcagatcagccagttcctgcaggccgccgagagatacggcatcaacaccaccgacatcttccagaccgtggacctgtgggagggcaagaacatggcctgcgtgcagagaaccctgatgaacctgggcggcctggccgtggccagagacgacggcctgttcagcggcgaccccaactggttccccaagaagagcaaggagaaccccagaaacttcagcgacaaccagctgcaggagggcaagaacgtgatcggcctgcagatgggcaccaacagaggcgccagccaggcctag

SEQ ID NO: 139163 - DNA, 600 bp, Artificial Sequence
  derived and/or modified sequence
atggccaatagaggcccagcatatggtctgtcccgggaggttcagcagaaaattgagaaacagtacgacgccgacttggagcagatcctaatccaatggattactacgcagtgccggaaggacgtagggaggccccaacccgggagagagaattttcagaactggttaaaagatgggactgtgctttgcgagctgattaacgcattataccctgaaggtcaggccccagtgaagaagattcaggcttccactatggctttcaaacagatggagcagatttctcagttcctgcaggcagccgagcgttatggcattaacactaccgacattttccaaaccgtggacctatgggaaggaaagaacatggcctgcgtccagcggacattgatgaatttgggtgggcttgcagtagcccgtgacgacgggttgtttagtggagaccccaactggttccctaaaaaaagcaaggagaatccaaggaatttctcagataatcaactgcaggagggtaaaaacgttataggtctgcagatggggactaaccgcggcgcaagccaggccggcatgaccggatacgggatgccaagacaaatactctag

SEQ ID NO: 139164 - DNA, 600 bp, Artificial Sequence
  derived and/or modified sequence
atggcaaatcgagggcccgcatatggactcagccgggaggttcaacagaaaattgaaaaacagtatgatgcggatcttgaacagatactcatccaatggatcacgacccagtgccgcaaagatgtgggccgccctcagcctggccgtgagaacttccagaattggttgaaggatggaacggtcctctgtgaacttattaacgcgctctaccccgaaggacaagcccccgtaaagaaaatccaggctagtactatggcattcaaacagatggaacagataagccaatttttgcaggcagccgaacgatatggcattaatacgacagatatctttcagaccgtcgatctgtgggaaggcaagaacatggcctgtgtacaaagaactctcatgaatttaggagggctcgccgtggcaagagatgacggcctgttcagcggcgatcccaattggtttccaaagaagagcaaagagaaccctaggaacttcagcgataaccagttacaggaaggaaaaaatgttattggactgcagatgggtacaaacaggggggccagccaggctggtatgacaggatacggcatgcccaggcagatactgtag

SEQ ID NO: 139165 - DNA, 564 bp, Artificial Sequence
  derived and/or modified sequence
atggccaacagagggccggcatatgggctgagcagagaagtgcagcagaaaatcgaaaaacagtacgacgcggacctggagcagatactgattcagtggatcactacccaatgcagaaaggatgttgggaggcctcagcccggcagggagaatttccaaaattggctgaaagacgggacagttctgtgcgaactgattaacgctctctaccctgagggccaagcccctgtcaaaaaaatccaggcatcaaccatggccttcaaacagatggaacagatttcacagttcttacaggctgcagaacggtacgggataaacaccacagacatcttccagaccgtcgatttatgggaaggcaaaaacatggcttgtgtgcagcggacattaatgaatcttggcggacttgccgtggcgcgagatgacgggctattcagtggagacccgaattggtttcccaagaagtcaaaagaaaacccacggaacttcagcgacaatcagctgcaagaaggtaaaaatgttatcgggcttcagatgggcactaatcggggagccagtcaagcatag

SEQ ID NO: 139166 - DNA, 600 bp, Artificial Sequence
  derived and/or modified sequence
atggccaacagaggccctgcctacggcctgagccgggaggtgcagcagaagattgagaagcagtatgatgctgacctggagcagatcctgatccagtggatcaccacccagtgcaggaaggatgtgggccggccccagcccggccgggagaacttccagaactggctgaaggatggcaccgtgctgtgtgagctgatcaatgccctgtacccagagggccaggcccctgtgaagaagatccaggccagcaccatggccttcaagcagatggagcagatcagccagttcctgcaggccgctgagagatatggcatcaacaccacagacatcttccagacagtggacctgtgggagggcaagaacatggcctgtgtgcagaggaccctgatgaacctgggcggcctggccgtggccagagatgatggcctcttcagcggggaccccaactggttccccaagaagagcaaagaaaaccccaggaacttcagtgacaaccagctgcaggagggcaagaatgtcatcggcctgcagatgggcaccaacagaggagccagccaggccggcatgacaggctacggcatgccccggcagatcctgtag

SEQ ID NO: 139167 - DNA, 564 bp, Artificial Sequence
  derived and/or modified sequence
atggccaacagaggccctgcctacggcctgagccgggaggtgcagcagaagattgagaagcagtatgatgctgacctggagcagatcctgatccagtggatcaccacccagtgcaggaaggatgtgggccggccccagcccggccgggagaacttccagaactggctgaaggatggcaccgtgctgtgtgagctgatcaatgccctgtacccagagggccaggcccctgtgaagaagatccaggccagcaccatggccttcaagcagatggagcagatcagccagttcctgcaggccgctgagagatatggcatcaacaccacagacatcttccagacagtggacctgtgggagggcaagaacatggcctgtgtgcagaggaccctgatgaacctgggcggcctggccgtggccagagatgatggcctcttcagcggggaccccaactggttccccaagaagagcaaagaaaaccccaggaacttcagtgacaaccagctgcaggagggcaagaatgtcatcggcctgcagatgggcaccaacagaggagccagccaggcctag

SEQ ID NO: 139168 - DNA, 600 bp, Artificial Sequence
  derived and/or modified sequence
atggccaaccggggccccgcctacggcctgagccgggaggtgcagcagaagattgaaaaacaatacgacgcagaccttgaacagatccttattcagtggatcactacacaatgtcgcaaggacgttgggcggccgcaacctggtagggaaaattttcagaactggctgaaagacggaaccgtgctgtgcgaacttatcaatgcactttatcctgagggtcaggcgcccgtgaaaaagatccaggcttccaccatggccttcaagcagatggaacaaatctctcaatttcttcaggcagcggaaaggtacgggatcaataccaccgacatctttcagacagtggatttgtgggaggggaagaacatggcctgtgtgcaacggacacttatgaatctcggtggtttagccgttgcaagggacgatggcttatttagtggggaccctaactggtttcctaaaaagagcaaagaaaatccgaggaacttctccgataatcaattgcaggaagggaaaaatgtaattggactgcagatggggacgaacagaggagcaagtcaggccggaatgaccggatatggcatgcctcgccagattctgtag

SEQ ID NO: 139169 - DNA, 600 bp, Artificial Sequence
  derived and/or modified sequence
atggccaaccggggccccgcctacggcctgagccgggaggtgcagcagaaaatcgagaagcagtatgacgcagacctcgaacagattctgattcagtggattaccacacagtgtcgcaaggacgtgggacgcccgcaaccaggaagagagaacttccaaaattggctaaaggacggcacagtcctgtgcgagttaatcaacgcgctgtatcctgagggccaggcccctgttaagaagatccaagcgtctaccatggcctttaagcagatggaacaaatctcccagttcttgcaggcagccgaaaggtatggaattaataccacagacatctttcagacagtggacctgtgggaagggaagaatatggcctgtgtgcagagaaccctcatgaacctagggggcctggcagtggcgcgtgacgacggtcttttctctggggatcccaattggttccccaaaaagtctaaggagaatcctcggaatttctccgataaccagttgcaggagggaaaaaacgtgatcgggctacaaatgggcacaaaccgcggtgcgagccaggcaggtatgacagggtacggaatgcccagacagattctgtag

SEQ ID NO: 139170 - DNA, 564 bp, Artificial Sequence
  derived and/or modified sequence
atggccaaccggggccccgcctacggcctgagccgggaggtgcagcagaagatcgaaaagcagtatgatgcggacttggagcagatcctcatacagtggattaccacacagtgccggaaggacgtgggccgcccccagcccgggcgcgaaaactttcagaattggttgaaggacggcaccgtactctgcgaacttatcaacgcactctatcccgaaggacaggcacctgttaagaagattcaggcgagtacaatggcctttaaacagatggagcaaatttctcagttcctgcaggctgcagagaggtacggtatcaataccactgacatctttcagactgttgatttgtgggagggcaagaacatggcatgtgtccagcgtactttgatgaatctgggagggctggccgtcgctcgcgatgacgggttgtttagtggagatcccaattggtttcctaagaagagcaaagaaaacccgcgcaacttctcggacaaccagctccaggaggggaaaaacgtcattggcctgcaaatgggcactaatcgtggagccagtcaggcatag

SEQ ID NO: 139171 - DNA, 600 bp, Artificial Sequence
  derived and/or modified sequence
atggcgaaccgtggacccgcttatggcctgtccagagaggtacagcagaagattgagaaacagtatgacgcggatctagagcaaattctcatccaatggattacaacacaatgtcggaaggacgtcgggaggccccaaccaggcagggagaacttccagaactggctaaaagacgggaccgtactatgcgaactgatcaatgctctgtatccggagggccaggcacccgtaaagaagattcaggcttcaactatggccttcaaacagatggaacaaatatcgcagttcctgcaggcggctgagcggtacggcatcaatacaaccgatatcttccagacagtggacttatgggagggtaaaaatatggcgtgcgtgcaacgcactctgatgaacctgggcggtctagccgtggctcgcgacgacgggctgttctcaggcgaccccaattggtttcccaaaaaaagtaaagaaaacccaaggaactttagcgataaccagctgcaggagggcaagaatgtgataggcttgcaaatggggaccaatcggggagcatcgcaggcgggtatgaccggctatgggatgccccgacagattttgtag

SEQ ID NO: 139172 - DNA, 600 bp, Artificial Sequence
  derived and/or modified sequence
atggctaatcggggaccggcttatggactcagtcgcgaagttcagcagaagatcgagaagcagtacgatgctgatctggagcaaatactgatccaatggattaccacacagtgcaggaaggacgtagggaggccccagccgggacgggagaatttccagaattggctcaaagatggcaccgtgctgtgcgagttaatcaatgcattgtatccagaagggcaggctccagtgaaaaaaatacaggcctccacaatggcatttaaacagatggagcagatatctcagttccttcaggccgctgagcggtacggtatcaacaccaccgacatctttcagaccgtggatctgtgggaaggcaagaatatggcctgcgtgcaaagaactctaatgaatcttggcggtctggcagtggcaagagacgatgggctgttttccggggaccctaattggtttcctaagaagtcaaaagagaatcccaggaatttctccgataaccagttacaagaggggaagaatgtgatcgggctccagatgggcactaataggggcgcttcccaggctgggatgacaggttacggcatgccccgacaaatactgtag

SEQ ID NO: 139173 - DNA, 564 bp, Artificial Sequence
  derived and/or modified sequence
atggcaaacagaggcccagcctacggcttgtccagagaggtacaacaaaagatcgagaaacagtatgacgcagatctcgagcagatactcatccaatggatcactacgcagtgtcgaaaagacgtgggccgacctcaaccgggaagagaaaacttccagaattggctgaaggatgggacagtgctttgcgagctgataaatgcactgtacccagaagggcaggctcccgtgaaaaagattcaggcctctaccatggcctttaagcagatggaacagatctctcagtttctccaagcagccgagagatacggcattaacacaaccgacatcttccagacagtggacttgtgggaaggcaagaacatggcctgtgtgcagcggaccttaatgaatttggggggactagccgtggccagagacgatggcctgttttcgggcgatccaaattggttcccaaaaaagagcaaagagaaccccagaaacttcagcgacaaccagctgcaggaaggaaaaaacgtgataggattgcaaatgggcacgaaccgtggggcttcccaggcctag

SEQ ID NO: 139174 - protein, 1050 aa, Artificial Sequence
  derived and/or modified sequence
MEPGRGGTETVGKFEFSRKDLIGHGAFAVVFKGRHREKHDLEVAVKCINKKNLAKSQTLLGKEIKILKELKHENIVALYDFQEMANSVYLVMEYCNGGDLADYLHAMRTLSEDTIRLFLQQIAGAMRLLHSKGIIHRDLKPQNILLSNPAGRRANPNSIRVKIADFGFARYLQSNMMAATLCGSPMYMAPEVIMSQHYDGKADLWSIGTIVYQCLTGKAPFQASSPQDLRLFYEKNKTLVPTIPRETSAPLRQLLLALLQRNHKDRMDFDEFFHHPFLDASPSVRKSPPVPVPSYPSSGSGSSSSSSSTSHLASPPSLGEMQQLQKTLASPADTAGFLHSSRDSGGSKDSSCDTDDFVMVPAQFPGDLVAEAPSAKPPPDSLMCSGSSLVASAGLESHGRTPSPSPPCSSSPSPSGRAGPFSSSRCGASVPIPVPTQVQNYQRIERNLQSPTQFQTPRSSAIRRSGSTSPLGFARASPSPPAHAEHGGVLARKMSLGGGRPYTPSPQVGTIPERPGWSGTPSPQGAEMRGGRSPRPGSSAPEHSPRTSGLGCRLHSAPNLSDLHVVRPKLPKPPTDPLGAVFSPPQASPPQPSHGLQSCRNLRGSPKLPDFLQRNPLPPILGSPTKAVPSFDFPKTPSSQNLLALLARQGVVMTPPRNRTLPDLSEVGPFHGQPLGPGLRPGEDPKGPFGRSFSTSRLTDLLLKAAFGTQAPDPGSTESLQEKPMEIAPSAGFGGSLHPGARAGGTSSPSPVVFTVGSPPSGSTPPQGPRTRMFSAGPTGSASSSARHLVPGPCSEAPAPELPAPGHGCSFADPITANLEGAVTFEAPDLPEETLMEQEHTEILRGLRFTLLFVQHVLEIAALKGSASEAAGGPEYQLQESVVADQISLLSREWGFAEQLVLYLKVAELLSSGLQSAIDQIRAGKLCLSSTVKQVVRRLNELYKASVVSCQGLSLRLQRFFLDKQRLLDRIHSITAERLIFSHAVQMVQSAALDEMFQHREGCVPRYHKALLLLEGLQHMLSDQADIENVTKCKLCIERRLSALLTGICA

SEQ ID NO: 139175 - DNA, 3153 bp, Artificial Sequence
  derived and/or modified sequence
atggagcccggcagaggcggcaccgagaccgtgggcaagttcgagttcagcagaaaggacctgatcggccacggcgccttcgccgtggtgttcaagggcagacacagagagaagcacgacctggaggtggccgtgaagtgcatcaacaagaagaacctggccaagagccagaccctgctgggcaaggagatcaagatcctgaaggagctgaagcacgagaacatcgtggccctgtacgacttccaggagatggccaacagcgtgtacctggtgatggagtactgcaacggcggcgacctggccgactacctgcacgccatgagaaccctgagcgaggacaccatcagactgttcctgcagcagatcgccggcgccatgagactgctgcacagcaagggcatcatccacagagacctgaagccccagaacatcctgctgagcaaccccgccggcagaagagccaaccccaacagcatcagagtgaagatcgccgacttcggcttcgccagatacctgcagagcaacatgatggccgccaccctgtgcggcagccccatgtacatggcccccgaggtgatcatgagccagcactacgacggcaaggccgacctgtggagcatcggcaccatcgtgtaccagtgcctgaccggcaaggcccccttccaggccagcagcccccaggacctgagactgttctacgagaagaacaagaccctggtgcccaccatccccagagagaccagcgcccccctgagacagctgctgctggccctgctgcagagaaaccacaaggacagaatggacttcgacgagttcttccaccaccccttcctggacgccagccccagcgtgagaaagagcccccccgtgcccgtgcccagctaccccagcagcggcagcggcagcagcagcagcagcagcagcaccagccacctggccagcccccccagcctgggcgagatgcagcagctgcagaagaccctggccagccccgccgacaccgccggcttcctgcacagcagcagagacagcggcggcagcaaggacagcagctgcgacaccgacgacttcgtgatggtgcccgcccagttccccggcgacctggtggccgaggcccccagcgccaagcccccccccgacagcctgatgtgcagcggcagcagcctggtggccagcgccggcctggagagccacggcagaacccccagccccagccccccctgcagcagcagccccagccccagcggcagagccggccccttcagcagcagcagatgcggcgccagcgtgcccatccccgtgcccacccaggtgcagaactaccagagaatcgagagaaacctgcagagccccacccagttccagacccccagaagcagcgccatcagaagaagcggcagcaccagccccctgggcttcgccagagccagccccagcccccccgcccacgccgagcacggcggcgtgctggccagaaagatgagcctgggcggcggcagaccctacacccccagcccccaggtgggcaccatccccgagagacccggctggagcggcacccccagcccccagggcgccgagatgagaggcggcagaagccccagacccggcagcagcgcccccgagcacagccccagaaccagcggcctgggctgcagactgcacagcgcccccaacctgagcgacctgcacgtggtgagacccaagctgcccaagccccccaccgaccccctgggcgccgtgttcagccccccccaggccagccccccccagcccagccacggcctgcagagctgcagaaacctgagaggcagccccaagctgcccgacttcctgcagagaaaccccctgccccccatcctgggcagccccaccaaggccgtgcccagcttcgacttccccaagacccccagcagccagaacctgctggccctgctggccagacagggcgtggtgatgaccccccccagaaacagaaccctgcccgacctgagcgaggtgggccccttccacggccagcccctgggccccggcctgagacccggcgaggaccccaagggccccttcggcagaagcttcagcaccagcagactgaccgacctgctgctgaaggccgccttcggcacccaggcccccgaccccggcagcaccgagagcctgcaggagaagcccatggagatcgcccccagcgccggcttcggcggcagcctgcaccccggcgccagagccggcggcaccagcagccccagccccgtggtgttcaccgtgggcagcccccccagcggcagcacccccccccagggccccagaaccagaatgttcagcgccggccccaccggcagcgccagcagcagcgccagacacctggtgcccggcccctgcagcgaggcccccgcccccgagctgcccgcccccggccacggctgcagcttcgccgaccccatcaccgccaacctggagggcgccgtgaccttcgaggcccccgacctgcccgaggagaccctgatggagcaggagcacaccgagatcctgagaggcctgagattcaccctgctgttcgtgcagcacgtgctggagatcgccgccctgaagggcagcgccagcgaggccgccggcggccccgagtaccagctgcaggagagcgtggtggccgaccagatcagcctgctgagcagagagtggggcttcgccgagcagctggtgctgtacctgaaggtggccgagctgctgagcagcggcctgcagagcgccatcgaccagatcagagccggcaagctgtgcctgagcagcaccgtgaagcaggtggtgagaagactgaacgagctgtacaaggccagcgtggtgagctgccagggcctgagcctgagactgcagagattcttcctggacaagcagagactgctggacagaatccacagcatcaccgccgagagactgatcttcagccacgccgtgcagatggtgcagagcgccgccctggacgagatgttccagcacagagagggctgcgtgcccagataccacaaggccctgctgctgctggagggcctgcagcacatgctgagcgaccaggccgacatcgagaacgtgaccaagtgcaagctgtgcatcgagagaagactgagcgccctgctgaccggcatctgcgcctag

SEQ ID NO: 139176 - DNA, 3153 bp, Artificial Sequence
  derived and/or modified sequence
atggaacctggtagggggggcacggaaacggttggcaaatttgaattcagtagaaaggatctgattggacatggcgcattcgctgttgtcttcaaggggcggcaccgcgagaaacacgacctcgaggttgccgtgaagtgcatcaataagaaaaacctcgccaaaagccagactctcctgggtaaagagattaaaattctaaaagagttaaaacatgaaaacattgtggcattgtatgatttccaagagatggcaaattctgtttacctggtaatggagtactgtaacggcggcgatctcgctgactatctgcatgccatgagaactctctccgaggacactatccgtttatttcttcagcagattgctggggccatgcggcttttgcatagtaaggggatcatccacagagacctgaagccacagaacatactgttgtcaaacccagccggtagacgtgctaacccgaactctattagggtgaaaattgcagatttcggattcgcccggtatctgcaaagcaacatgatggcagcaaccttatgtggcagcccaatgtacatggccccagaggtcatcatgtcccagcattatgatggcaaggcagatctctggtccatcggcacaatcgtgtatcaatgtctcacggggaaagcaccctttcaggcgtcctctcctcaggatctccgactcttctatgagaaaaacaagacgctggtccctaccattccccgagaaacgtcagcacctttacggcagctccttctggccctgctacaacgcaaccataaagaccgaatggactttgatgagttttttcaccatccatttctggatgcgagcccaagtgtccgtaagtcgccgcccgtgcccgtgccatcgtatcccagcagcggatctggaagcagctcaagcagttcctctacaagccatcttgctagtccgccgtcactgggtgagatgcagcagctccagaaaacactcgcctcgcctgccgatacggccggattcctgcactcgtcgagagactctgggggatcgaaggactcctcatgcgataccgacgacttcgttatggtgcctgcccaatttcccggcgacctggtcgcggaggctccctctgctaagccacctccagacagcctgatgtgttctggttcctcactggtggcatctgctggtctggaatcacacggcagaacaccatctccctcaccgccctgctcctcaagccctagccctagtggtagagctggacctttctcctcgtcacgctgcggcgcttctgtgcccatccccgttcctacgcaggtccagaactaccagcggatcgaaagaaacttacaatctcccacccagttccagaccccacgctcttccgccatccgtcgaagtggttcaacgagccccctgggcttcgccagggcgtcaccgagcccaccggcccatgcggaacatggcggcgtgctggcccgaaaaatgtccctgggtggtggcagaccctacacaccgtctccccaggtgggaacgattcccgagcgcccaggttggagcggtactcctagccctcagggcgcggagatgcgcgggggtcggagcccccgtccagggagctcagcccccgaacactctccaagaacttctggcctcggatgtcgtctgcattctgctcccaacttgtctgatttgcacgtggttcgaccaaagttaccgaaacctcctacagatcctcttggtgccgtcttttctcccccccaagcgtcacctccccagccgagccacgggctgcagtcctgcagaaatcttaggggaagccccaaactgccagactttctgcagcgcaaccccttgccgcctattctaggcagccccacaaaggctgtgccaagttttgactttccaaagactcccagcagtcagaatttgctcgctcttctggctaggcagggcgtagtgatgactcctcctcgtaatcgtacacttccagacctgtcggaagttggccctttccacggacagccactggggcccggtctgcgccccggagaggacccaaagggccccttcggcagaagtttttctacatctaggttgacggatctgctgctcaaggccgccttcgggacacaagcccccgaccctggctcaaccgaatccttgcaggagaaacctatggagattgcaccctctgccggctttgggggcagtctacaccccggcgcaagagctggcggtacttcgtctccaagtcccgtcgtttttaccgtgggatctccaccatccggatctactcctcctcagggtcctagaacacgaatgttttcagctgggccaactggcagtgcttctagctccgcgaggcatcttgtacccggtccctgttctgaagccccagcccccgagcttcccgccccgggtcatggctgttctttcgctgacccgatcacggcaaacctggagggggcagtcacctttgaagcaccagacctgcccgaagaaaccctaatggaacaggagcatacagaaattctgcggggtttacgcttcacccttttatttgtacagcacgtactggagattgccgccctgaagggttccgcatccgaggcagccggggggcctgaataccagctccaggagtctgtggtggctgatcagatatctctgctgagcagggaatgggggttcgctgagcaactggttctctacctgaaagtggccgagctgcttagctccggtttgcaaagtgccattgaccagattcgcgcagggaagctgtgccttagtagtaccgtgaagcaggttgtgaggcgattgaatgaactgtacaaagctagcgtggtgtcatgccaagggctgtcattacgcctgcagcggtttttcttggataagcagcgacttctggatcgaatacactcaataaccgccgagaggcttatctttagccacgctgtacagatggtgcagagtgcagctcttgatgaaatgtttcagcatagagagggatgcgtaccacgataccataaggcactgctgctcctagagggcctgcagcatatgctctctgaccaggccgacatagagaacgtcaccaaatgcaagctttgcatcgagcgccggctgtctgccctgcttacaggtatatgtgcatag

SEQ ID NO: 139177 - DNA, 3153 bp, Artificial Sequence
  derived and/or modified sequence
atggagcccggccggggcggcacagagaccgtgggcaagtttgagttcagcaggaaggacctgattggccacggggcctttgctgtggtgttcaagggccgccaccgggagaagcatgacctggaggtggccgtgaagtgcatcaacaagaagaacctggccaagagccagaccctgctgggcaaggagatcaagatcctgaaggagctgaagcatgaaaatattgtggccctgtatgacttccaggagatggccaacagcgtgtacctggtgatggagtactgcaatggaggagacctggccgactacctgcacgccatgaggaccctgtctgaggacaccatccgcctcttcctgcagcagattgctggggccatgaggctgctgcacagcaagggcatcatccaccgggacctgaagccccagaacatcctgctgagcaacccagctggccggcgggccaaccccaacagcatccgggtgaagattgctgactttggatttgcccgctacctgcagagcaacatgatggccgccaccctgtgtggcagccccatgtacatggcccctgaggtgatcatgagccagcactatgatggcaaggctgacctgtggagcatcggcaccatcgtgtaccagtgcctgaccgggaaggcccccttccaggccagcagcccccaggacctgcggctcttctatgagaagaacaagaccctggtgcccaccatcccccgggagaccagcgcccccctgcggcagctgctgctggccctgctgcagaggaaccacaaggacaggatggactttgatgagttcttccaccaccccttcctggatgccagccccagcgtgaggaagagcccccctgtgcctgtgcccagctaccccagcagcggcagcggcagcagcagcagcagcagcagcaccagccacctggccagcccccccagcctgggggagatgcagcagctgcagaagaccctggccagccctgctgacacagctggcttcctgcacagcagccgggacagcggcggcagcaaggacagcagctgtgacacagatgactttgtgatggtgcctgcccagtttcctggggacctggtggccgaggcccccagcgccaagcccccaccagacagcctgatgtgcagcggcagcagcctggtggccagcgctggcctggagagccacggccgcacccccagccccagccccccctgcagcagcagccccagccccagcggccgggccggccccttcagcagcagccgctgtggggcctctgtgcccatccctgtgcccacccaggtgcagaactaccagagaattgaaagaaacctgcagagccccacccagttccagacccccaggagcagcgccatcagaagaagtggcagcaccagccccctgggctttgcccgggccagccccagccccccagcccacgccgagcacggcggcgtgctggccaggaagatgagcctgggcggcggccggccctacacccccagcccccaggtgggcaccatccctgagaggcctggctggagcggcacccccagcccccagggcgctgagatgaggggcggccgcagcccccggcccggcagcagcgcccctgagcacagccccaggaccagcggcctgggctgccgcctgcacagcgcccccaacctgagtgacctgcacgtggtgcggcccaagctgcccaagcccccaacagaccccctgggcgctgtgttcagccccccccaggccagccccccccagcccagccacggcctgcagagctgcaggaacctgcggggcagccccaagctgcctgacttcctgcagaggaaccccctgccccccatcctgggcagccccaccaaggctgtgcccagctttgacttccccaagacccccagcagccagaacctgctggccctgctggcccggcagggcgtggtgatgaccccaccaagaaacagaaccctgcctgacctgtctgaggtgggccccttccacggccagcccctgggccctggcctgcggcctggagaggaccccaagggccccttcggccgctccttcagcaccagccggctgacagacctgctgctgaaggccgccttcggcacccaggccccagaccccggcagcacagagagcctgcaggagaagcccatggagatcgcccccagcgctggctttggaggcagcctgcaccctggggcccgggccggcggcaccagcagccccagccctgtggtgttcaccgtgggcagccccccatctggcagcaccccaccccagggccccaggaccaggatgttttctgctggccccactggaagtgccagcagcagcgcccggcacctggtgcccggcccctgcagcgaggccccagcccctgagctgcctgcccctggccacggctgcagctttgctgaccccatcacagccaacctggagggcgctgtgacctttgaggccccagacctgcctgaggagaccctgatggagcaggagcacacagagatcctgcggggcctgcgcttcaccctgctgtttgtgcagcacgtgctggagattgctgccctgaagggcagcgccagcgaggccgccggcggccctgagtaccagctgcaggagagcgtggtggccgaccagatcagcctgctgagccgggagtggggctttgctgagcagctggtgctgtacctgaaggtggccgagctgctgagcagcggcctgcagagcgccatcgaccagatccgggccggcaagctgtgcctgagcagcacagtgaagcaggtggtgcggcggctgaatgagctgtacaaggcctctgtggtgtcctgccagggcctgagcctgcggctgcagcgcttcttcctggacaagcagaggctgctggaccgcatccacagcatcacagctgagcggctcatcttcagccatgctgtgcagatggtgcagagcgctgccctggatgagatgttccagcaccgggagggctgtgtgccccgctaccacaaggccctgctgctgctggagggcctgcagcacatgctgagtgaccaggccgacattgaaaatgtgaccaagtgcaagctgtgcattgaaagaaggctgagcgccctgctgaccggcatctgtgcctag

SEQ ID NO: 139178 - DNA, 3153 bp, Artificial Sequence
  derived and/or modified sequence
atggagcccggccggggcggcaccgagaccgtgggcaagttcgagttttcccgcaaagacttgattggccatggagccttcgctgtggtcttcaaaggtaggcacagggagaaacacgatttggaagttgcagtcaagtgcataaacaagaaaaatctggccaaatcccagaccctactgggaaaagagattaagattctcaaggaactgaagcacgaaaacattgtcgcgctgtacgacttccaagagatggcgaatagcgtctacctggtcatggaatattgtaacggcggcgacctagctgattatctccacgcaatgcggacactttccgaggataccattagactctttctgcagcaaatagcgggggccatgcgcctccttcattccaagggaatcatccaccgagacctgaagccccagaatatattgctcagcaatcctgctggcagaagggccaatcctaattctatacgggtaaagatcgccgattttggatttgccagatatctgcagtctaacatgatggccgcaactctatgtggaagccctatgtacatggcgccagaggtgatcatgtcacagcactatgatggaaaagcagacctgtggtccatcgggacaatcgtgtaccagtgtctgactggcaaagcaccttttcaggcatcttctccccaggacctgcggctattttatgaaaaaaataaaacattggtccccaccatacctcgagaaacctctgcccctctgcggcaactgctcctggcattgctgcaaagaaatcacaaggaccgcatggattttgacgaattcttccatcatcctttcctggacgcatcaccctcagtcaggaaatcccccccagtaccagtgcccagttaccccagttcaggctctggcagtagcagctcgagtagcagcacaagccacctcgcctcaccacccagcctgggggaaatgcaacaattgcagaaaaccctggcgagccccgctgacactgccggttttctgcattcttctcgagattccggaggaagtaaggactctagttgtgataccgacgacttcgtgatggtgcccgcccaattccccggagacctggtggcagaggcccccagcgcaaagccaccaccggactcgctaatgtgcagcgggagttccctcgtggcgagcgcaggtctcgaatcccatggtcgaacaccatcaccttctcccccatgttcatcctcaccatcccctagcgggagagctggccccttctcatcttcacgttgtggagcctctgtgcccattcctgtgcctacacaagtccaaaattaccaacggatcgagagaaacctgcagagcccgacacaatttcagactcccagatcatcagccattcgcagatctgggtctacatcgccgctcggttttgcaagagcgagcccaagtcccccagcccacgccgagcacggtggagtacttgctcggaaaatgtcactggggggagggcgcccgtacacccccagcccacaagtgggtacaatacccgaacgccccggttggagcggcacccctagccctcagggtgctgaaatgcgcgggggcagaagccctaggccagggtcttcagcccctgaacacagccctcgcacaagtggccttggttgtaggctgcatagtgcacccaacctttcagacttgcatgtggtccgtccaaagttacctaaacccccgaccgacccacttggggctgtgtttagccctcctcaagcctcacccccccaaccaagtcacggccttcagagttgccgtaatctgagagggtcccccaagctcccagacttcctgcagcgcaacccgctcccacctattcttggttctcccaccaaggccgtgccttcgttcgattttcccaagacgccctctagtcagaacctgttagccctgttggcccggcagggtgtggtgatgacgcccccaaggaacaggaccctccctgatctctctgaagttggccccttccatgggcagcccctgggccccggcctgagacctggggaggatccaaagggaccgtttgggcggagcttcagtacatcccgcctcactgacctgttgctgaaggcggcctttggcacacaggctccggatccagggagcacggaatctttacaggagaaacctatggagatagcacccagcgctggcttcggcggctctctgcacccaggcgccagagctggagggacttcatcccccagcccagtggtgttcaccgtgggctcacccccatctgggagcacgcccccacagggccccagaacaaggatgttctctgctgggccaacaggaagcgcgagtagctctgcccgacacctggtgccaggcccttgtagcgaagcacctgcacctgagctgccagcacccgggcacggctgctcttttgcagaccccattacagctaatcttgaaggggcggtgacgttcgaagcacctgatcttcccgaagagacacttatggagcaagaacacaccgaaatcctgcgtggtctgcggttcacactgctattcgtgcagcatgtgctggaaatcgcagcattgaaaggcagtgctagtgaggcggctggcggccccgaataccagctccaagagtcagttgtggcggatcagattagtttactgtcacgcgagtggggcttcgctgagcagttggtgctgtacctgaaagttgcagaactactctcatcagggctacagagcgcaatcgaccagataagagcgggcaaattgtgccttagttccacagtcaagcaagtggtccggaggctgaatgaactctataaggcaagcgtggtgtcttgtcaaggattatctctgcggctccagcggtttttcctcgataaacagagactcctggaccgcatccacagtattaccgctgaacgcctgatattctcccacgcagtgcagatggtacaatctgcagcattggacgaaatgttccagcatagagaggggtgtgtgcccaggtatcacaaagccctgctgctcctggagggcctccaacacatgctatccgaccaggctgatattgaaaacgttacgaaatgcaagctgtgcattgaacggagattgtccgccctgctcacggggatttgtgcttag

SEQ ID NO: 139179 - DNA, 3153 bp, Artificial Sequence
  derived and/or modified sequence
atggagcccggaagaggaggcactgaaacagtgggcaagttcgaattctctagaaaagatctgatcgggcacggagcgttcgcggtcgtgttcaaaggcagacaccgggagaagcatgacttggaagtcgccgtgaaatgcataaacaagaagaacctggccaagagccaaaccttgttaggcaaagaaataaaaatcctgaaggagctgaagcacgagaacatcgtcgctctatatgactttcaagaaatggctaattccgtgtacctagtgatggaatattgtaacggcggtgatctcgccgactatctccatgcgatgagaactctatccgaggacacaatccgactattcctgcaacagattgccggagcaatgcggctccttcatagcaaaggcattattcaccgagacctgaaacctcagaacatccttctgtccaatccagccggtagacgagctaaccccaacagcatacgggtgaagattgctgatttcgggttcgctcggtacttgcagtccaatatgatggccgctacgctgtgcggcagtcccatgtacatggcacctgaagtaattatgtctcagcattacgacggtaaagcggacctgtggagtattggcacgatcgtttaccaatgcctgactggaaaggcacctttccaggccagcagcccacaggatcttcgcttgttttacgagaagaacaagactttggttccgactattccacgggagacctctgcccctctgcgccaacttctcctggcactgttgcagcgtaatcacaaggaccgaatggattttgacgagttcttccaccacccctttctggatgcctcacccagcgtgagaaaatctccgcctgtccccgtcccttcatacccaagttctggctcaggttcttcgtcttcgagctcctcaacatcccatctcgccagccctcccagtctgggcgagatgcagcaactgcagaagactctggcatctcccgctgacaccgccggatttttgcacagctcacgcgattcaggaggatcaaaagactcatcttgtgatactgatgacttcgtgatggtccctgcgcagtttcccggtgatctggtggccgaagctccttcagcgaaaccccctccagactctctcatgtgtagcggctctagcctggtcgcaagcgcaggacttgaatcacacggcagaactccatctccgagtcccccttgttcttcctcacccagcccttcaggccgtgctggacctttttcctccagcagatgtggcgcttccgtgcctatccccgtgcctactcaagtgcaaaactatcaacgaatagagaggaatctccagagccctactcagtttcagacccctcgttcctccgctattcggaggagcggatctaccagccctctcgggttcgctcgggcatccccttcaccgcctgctcacgctgagcatggtggcgtgctcgcaagaaaaatgagcttgggtggtgggagaccttatactccgtcaccccaagtggggaccatcccagagcgcccagggtggtccggcacacctagcccgcaaggtgcggaaatgcgcggtggccgaagccctaggcccggttccagcgcgccagaacattctccgagaacctctgggttggggtgtaggctccatagtgctcctaacctgtccgacctgcacgtggtgcgacctaagctgccaaagccacccacggacccactcggagcagtctttagccctcctcaggcttctccaccacagccctcgcatggcctgcagtcctgccgcaacttgagagggtcccccaaacttcctgatttcctccaaagaaatcctcttccccctattctggggagcccaactaaagcagtgccttcgtttgatttccctaaaactccttccagccagaatctactggcccttttagcacggcaaggggtcgtgatgacgcccccaaggaacaggacccttcccgacctgagcgaagtaggcccatttcacggacaaccccttggcccaggcctgcgccctggcgaggaccccaagggcccattcggacggtctttcagtaccagtaggctgaccgacctgttgttgaaagccgctttcggaacacaagcccctgatccaggcagtacggagagtctgcaggagaaacccatggagatcgcacctagtgctggcttcgggggatctttacatccaggggcaagggccggtggaacctccagccccagtcccgtggtctttaccgttggcagccccccatccggatcgacaccaccacagggaccgagaacgcggatgttttctgcaggacctactggctcagcttcatcctctgcaagacatctcgtccctggcccttgctccgaggccccagctccagagctacccgcacctggacacggatgcagctttgccgaccccataaccgctaacctggagggggcagtcactttcgaagcaccagatctccctgaggagaccctcatggaacaagaacacacagagattctgcgtggcctgcgatttacgctgctcttcgtgcagcacgtgctagagatcgctgctcttaaaggaagcgcgtctgaggctgcaggcggacctgagtatcaactccaagaaagtgtggttgcagatcagatttctctgttgtctagggagtgggggttcgcagaacagctcgtgctgtatctgaaagtggctgaacttctgagttcaggcctccagtccgccattgatcagatccgcgcaggaaagctgtgtcttagtagcacggtgaagcaggttgtgcgcagacttaatgagctgtacaaagcctccgtggtatcatgtcaggggctgtccctgcggctacagcgcttttttttagacaagcagcgcctcctggacaggatacattccatcacagccgagagactgatttttagtcatgccgtgcaaatggtgcaatccgcggcactagatgagatgtttcagcaccgggagggatgtgtgccacgctaccacaaagccctgctgctgttggaggggcttcagcacatgctcagcgatcaggccgatatcgagaacgtgacaaagtgtaaactttgtattgagcgtcgactctcggcgctcttaactgggatttgtgcctag

SEQ ID NO: 139180 - DNA, 5293 bp, Artificial Sequence
  derived and/or modified sequence
gaggcccgggcgccgcggctcttttgtttctccgttggggccgagcccgggccctagttggagccggagtcggagtcggagtcggatccggattcggattagcagcccgggaagagtgccgtggcacaggcgccggagggagcgcgaccctcggaccccgcctggcccgcggggctgggacccggccccggcctgcccgatggggcgcgcggccccggagatgcgccctcgcccggccccgcgcccccggccccgcgcccccggcccgcccgccccggcccgcgcctccgcctgagtcccccgcgccttggcccgccaccccccgccccgcgcccccggcccgcctgcgccatggagcccggccgcggcggcacagagaccgtgggcaagttcgagttctcccgcaaggacctgatcggccacggcgccttcgcggtggtcttcaagggccgccaccgcgagaagcacgatttggaggtcgccgtcaagtgcattaacaagaagaacctcgccaagtctcagacgctgctggggaaggaaatcaaaatcctgaaggaactgaaacatgaaaacatcgtggccctgtacgacttccaggaaatggctaattctgtctacctggttatggagtactgcaacggtggggacctggccgactacctgcacgccatgcgcacgctgagcgaggacaccatcaggctcttcctgcagcagatcgcgggcgccatgcggcttctgcacagcaaaggcatcatccaccgcgacctgaaaccgcagaacatcctgctgtccaaccccgccggccgccgcgccaaccccaacagcatccgcgtcaagatcgctgacttcggcttcgcgcggtacctccagagcaacatgatggcggccacactctgcggctcccccatgtacatggcccccgaggtcatcatgtcccagcactacgacgggaaggcggacctgtggagcatcggcaccatcgtctaccagtgcctgacggggaaggcgcccttccaggccagcagcccccaggacctgcgcctgttctacgagaagaacaagacgttggtccccaccatcccccgggagacctcggccccgctgcggcagctgctcctggccctactgcaacgcaaccacaaggaccgcatggacttcgatgagttttttcatcaccctttcctcgatgccagcccctcggtcaggaaatccccacccgtgcctgtgccctcgtacccaagctcggggtccggcagcagctccagcagcagctccacctcccacctggcctccccgccgtccctgggcgagatgcagcagctgcagaagaccctggcctccccggctgacaccgctggcttcctgcacagctcccgggactctggtggcagcaaggactcttcctgtgacacagacgacttcgtcatggtccccgcgcagtttccaggtgacctggtggctgaggcgcccagtgccaaacccccgccagacagcctgatgtgcagtgggagctcactggtggcctctgcgggcttggagagccacggccggaccccatctccatccccaccctgcagcagctcccccagtccctcaggccgggctggcccgttctccagcagcaggtgcggcgcctctgtccccatcccagtccccacgcaggtgcagaactaccagcgcattgagcgaaacctgcagtcacccacccagttccaaacacctcggtcctctgccatccgcaggtcaggcagcaccagccccctgggctttgcaagggccagcccctcgccccctgcccacgctgagcatggaggcgtcctggccaggaagatgtctctgggtggaggccggccctacacgccatctcctcaagttggaaccatccctgagcggccaggctggagcgggacgccctccccacagggagctgagatgcggggtggcaggtcccctcgtccaggctcctctgcacccgagcactctccccgcacttccgggctgggctgccgcctgcacagcgcccccaacctgtctgacttgcacgtcgtccgccccaagctgcccaaaccccccacggaccccctgggagctgtgttcagcccaccacaggccagccctccccagccgtcccacggcctgcagtcctgccggaacctgcggggctcacccaagctgcccgacttcctgcagcgaaaccccctgccccccatcctgggctcccccaccaaggctgtgccctcctttgacttcccgaagacccccagctcccagaacctgctggccctcctagcccggcagggcgtggtgatgacgccccctcgaaaccggacgctgcccgacctctcggaggtgggacccttccatggtcagccgttgggccctggcctgcggccaggcgaggaccccaagggcccctttggccggtctttcagcaccagccgcctcactgacctgctccttaaggcggcgtttgggacacaagccccggacccgggcagcacggagagcctgcaggagaagcccatggagatcgcaccctcagctggctttggagggagcctgcacccaggagcccgtgctgggggcaccagcagcccttccccggtggtcttcaccgtgggctctcccccgagcgggagcacgcccccccagggcccccgcaccaggatgttctcagcgggccccactggctctgccagctcttctgcccgccacctggtgcctgggccctgcagcgaggccccagcccctgagctccctgctccaggacacggctgcagctttgccgaccccattactgcgaacctggagggggctgtgaccttcgaggcccccgacctccctgaggagaccctcatggagcaagagcacacggagatcctgcgtggcctgcgcttcacgctgctgttcgtgcagcacgtcctggagatcgcagccctgaagggcagcgccagtgaggcggcggggggccctgagtaccagctgcaggagagtgtggtggccgaccagatcagcctgctgagccgagaatggggcttcgcggaacagctggtgctgtacctgaaggtggccgagctactgtcctccggcctgcaaagtgccatcgaccagatccgggccggcaagctctgcctgtcgtccactgtgaagcaggtggtgcgcaggctgaatgagctgtacaaggccagcgtggtgtcctgccagggcctgagcctgcggctgcagcgcttcttcctggacaagcagcggctcctggaccgcattcacagcatcactgccgagaggctcatcttcagccacgctgtgcagatggtgcagtcggctgccctggacgagatgttccagcaccgtgagggctgcgtcccacgctaccacaaggccctgctgctcctggaggggctgcagcacatgctctcggaccaggccgacatcgagaacgtcaccaagtgcaagctgtgcattgagcggagactctcggcgctgctgactggcatctgtgcctgacctttctggcctggctgggccccccgtcctgccgagccctgcagagtgggctctgtgtgctggctggactcctcgggacaagcccatggcgctgatcgctggtgctgagccctgccctgggccccacggacagtcagcctgccggcctccctgcagctcacggggcagaaccagcacatctggagccacacagcttggggggtgtctcccatcttttacaggtggggatcacagaatttctgcccctccagctgcctggctcagcaggcgtgggtgccaccaccctctagccccagggcagccccggaggacaggcaagggcctgagaccactgccgactcaaagccaaagcgagctcctgcttagggaaggtcagcaggcactgtgcccaggaagagcctgcggcctcggcgtcccccagtctccaggagcctctccctccgagatacccacccagctttgtcaatcacccaagcactttatgcatatagagacagaacctggacctcaccagggactgctgggcagcgattcctggcagtggcctggtgtttgtacatacacatatgcagacacatgccagggccccccaagcccgagcaccggaccacgttgctgcccaggtctggacctcagcgggagaactggctccggggggagtggggccctgcgctagaggcagaggcagttctttgttcaagcgttcctctggggaccggcagcagaggcaccgtgttctctcagccctggatacgtcttgtaatctttcacactttattcctaaaacgtgtcttatttttatgcagctcattttttctttaaaggagaaaacttgtaggtgtttaagaattggttttgggagggcgaggactgggccaggttagaggcagatggcacaggggcgtgtggcgggcgggtgaggctgctttgcacacctgtgttggtggctgtcccctgccgcccctccctgtggcagcagcaggacaggtgtgtgcccagcaccctccctacctgggcctggaagcagatgaggggaatacttcatgcaaagaaaaaagtaacatgtgcaaaagctccccgtccagctttgacagtcagttttgatgtcagctcctcggcagggtaggcctgatgacagccctgtccctccctgcctctgccttgcccaaggccacggagggcatctgcagagaggcctgccttccggattccaggcgggcatgccctgcaaaccccgcctgggcctcccttggtctgcccagccctcgattagccctgcctgaatcagtagatacttgaacgagtccccagtctgcgggaggcagtggtggggccatggacccatgcggggggttccagggtcacacgccacataacagacaaaaatacacacacgtgtgtttttctttgcaatacttgaaatattgccactgtgcttggacttagaagaagaaaatccccgtgacttcttcctcatcaccttgatggctttattctcaccttgtggggcatgtttgtatttattgcttcatggccgactggaatcctgagtcctgggaagctggcactgcggggatcttgcccggtgtcctggtcctcttgcttccgtcgcggccgcatgtgcgtgtgtccaagcaggtcctgggcgcctcaactgctgcccctggttgaatgttctcttgatagtgctggaccctttgtctattttaaagcgaattttgtgtgatttcctgccctttgcgttatattgtataataccaacgtaaggaaataaacctttggaattgtt

SEQ ID NO: 139181 - protein, 1411 aa, Artificial Sequence
  derived and/or modified sequence
MLRRILQRTPGRVGSQGSDLDSSATPINTVDVNNESSSEGFICPQCMKSLGSADELFKHYEAVHDAGNDSGHGGESNLALKRDDVTLLRQEVQDLQASLKEEKWYSEELKKELEKYQGLQQQEAKPDGLVTDSSAELQSLEQQLEEAQTENFNIKQMKDLFEQKAAQLATEIADIKSKYDEERSLREAAEQKVTRLTEELNKEATVIQDLKTELLQRPGIEDVAVLKKELVQVQTLMDNMTLERERESEKLKDECKKLQSQYASSEATISQLRSELAKGPQEVAVYVQELQKLKSSVNELTQKNQTLTENLLKKEQDYTKLEEKHNEESVSKKNIQATLHQKDLDCQQLQSRLSASETSLHRIHVELSEKGEATQKLKEELSEVETKYQHLKAEFKQLQQQREEKEQHGLQLQSEINQLHSKLLETERQLGEAHGRLKEQRQLSSEKLMDKEQQVADLQLKLSRLEEQLKEKVTNSTELQHQLDKTKQQHQEQQALQQSTTAKLREAQNDLEQVLRQIGDKDQKIQNLEALLQKSKENISLLEKEREDLYAKIQAGEGETAVLNQLQEKNHTLQEQVTQLTEKLKNQSESHKQAQENLHDQVQEQKAHLRAAQDRVLSLETSVNELNSQLNESKEKVSQLDIQIKAKTELLLSAEAAKTAQRADLQNHLDTAQNALQDKQQELNKITTQLDQVTAKLQDKQEHCSQLESHLKEYKEKYLSLEQKTEELEGQIKKLEADSLEVKASKEQALQDLQQQRQLNTDLELRATELSKQLEMEKEIVSSTRLDLQKKSEALESIKQKLTKQEEEKKILKQDFETLSQETKIQHEELNNRIQTTVTELQKVKMEKEALMTELSTVKDKLSKVSDSLKNSKSEFEKENQKGKAAILDLEKTCKELKHQLQVQMENTLKEQKELKKSLEKEKEASHQLKLELNSMQEQLIQAQNTLKQNEKEEQQLQGNINELKQSSEQKKKQIEALQGELKIAVLQKTELENKLQQQLTQAAQELAAEKEKISVLQNNYEKSQETFKQLQSDFYGRESELLATRQDLKSVEEKLSLAQEDLISNRNQIGNQNKLIQELKTAKATLEQDSAKKEQQLQERCKALQDIQKEKSLKEKELVNEKSKLAEIEEIKCRQEKEITKLNEELKSHKLESIKEITNLKDAKQLLIQQKLELQGKADSLKAAVEQEKRNQQILKDQVKKEEEELKKEFIEKEAKLHSEIKEKEVGMKKHEENEAKLTMQITALNENLGTVKKEWQSSQRRVSELEKQTDDLRGEIAVLEATVQNNQDERRALLERCLKGEGEIEKLQTKVLELQRKLDNTTAAVQELGRENQSLQIKHTQALNRKWAEDNEVQNCMACGKGFSVTVRRHHCRQCGNIFCAECSAKNALTPSSKKPVRVCDACFNDLQG

SEQ ID NO: 139182 - protein, 310 aa, Artificial Sequence
  derived and/or modified sequence
LRRVDHETPGRVGSQGSDLDSSATPINTVDVNNESSSEGFICPQCMKSLGSADELFKHYEAVHDAGNDSGHGGESNLALKRDDVTLLRQEVQDLQASLKEEKWYSEELKKELEKYQGLQQQEAKPDGLVTDSSAELQSLEQQLEEAQTENFNIKQMKDLFEQKAAQLATEIADIKSKYDEERSLREAAEQKVTRLTEELNKEATVIQDLKTELLQRPGIEDVAVLKKELVQVQTLMDNMTLERERESEKLKDECKKLQSQYASSEATISQLRSELAKGPQEVAVYVQELQKLKSSVNELTQKNQKKKKKK

SEQ ID NO: 139183 - DNA, 4236 bp, Artificial Sequence
  derived and/or modified sequence
atgctgagaagaatcctgcagagaacccccggcagagtgggcagccagggcagcgacctggacagcagcgccacccccatcaacaccgtggacgtgaacaacgagagcagcagcgagggcttcatctgcccccagtgcatgaagagcctgggcagcgccgacgagctgttcaagcactacgaggccgtgcacgacgccggcaacgacagcggccacggcggcgagagcaacctggccctgaagagagacgacgtgaccctgctgagacaggaggtgcaggacctgcaggccagcctgaaggaggagaagtggtacagcgaggagctgaagaaggagctggagaagtaccagggcctgcagcagcaggaggccaagcccgacggcctggtgaccgacagcagcgccgagctgcagagcctggagcagcagctggaggaggcccagaccgagaacttcaacatcaagcagatgaaggacctgttcgagcagaaggccgcccagctggccaccgagatcgccgacatcaagagcaagtacgacgaggagagaagcctgagagaggccgccgagcagaaggtgaccagactgaccgaggagctgaacaaggaggccaccgtgatccaggacctgaagaccgagctgctgcagagacccggcatcgaggacgtggccgtgctgaagaaggagctggtgcaggtgcagaccctgatggacaacatgaccctggagagagagagagagagcgagaagctgaaggacgagtgcaagaagctgcagagccagtacgccagcagcgaggccaccatcagccagctgagaagcgagctggccaagggcccccaggaggtggccgtgtacgtgcaggagctgcagaagctgaagagcagcgtgaacgagctgacccagaagaaccagaccctgaccgagaacctgctgaagaaggagcaggactacaccaagctggaggagaagcacaacgaggagagcgtgagcaagaagaacatccaggccaccctgcaccagaaggacctggactgccagcagctgcagagcagactgagcgccagcgagaccagcctgcacagaatccacgtggagctgagcgagaagggcgaggccacccagaagctgaaggaggagctgagcgaggtggagaccaagtaccagcacctgaaggccgagttcaagcagctgcagcagcagagagaggagaaggagcagcacggcctgcagctgcagagcgagatcaaccagctgcacagcaagctgctggagaccgagagacagctgggcgaggcccacggcagactgaaggagcagagacagctgagcagcgagaagctgatggacaaggagcagcaggtggccgacctgcagctgaagctgagcagactggaggagcagctgaaggagaaggtgaccaacagcaccgagctgcagcaccagctggacaagaccaagcagcagcaccaggagcagcaggccctgcagcagagcaccaccgccaagctgagagaggcccagaacgacctggagcaggtgctgagacagatcggcgacaaggaccagaagatccagaacctggaggccctgctgcagaagagcaaggagaacatcagcctgctggagaaggagagagaggacctgtacgccaagatccaggccggcgagggcgagaccgccgtgctgaaccagctgcaggagaagaaccacaccctgcaggagcaggtgacccagctgaccgagaagctgaagaaccagagcgagagccacaagcaggcccaggagaacctgcacgaccaggtgcaggagcagaaggcccacctgagagccgcccaggacagagtgctgagcctggagaccagcgtgaacgagctgaacagccagctgaacgagagcaaggagaaggtgagccagctggacatccagatcaaggccaagaccgagctgctgctgagcgccgaggccgccaagaccgcccagagagccgacctgcagaaccacctggacaccgcccagaacgccctgcaggacaagcagcaggagctgaacaagatcaccacccagctggaccaggtgaccgccaagctgcaggacaagcaggagcactgcagccagctggagagccacctgaaggagtacaaggagaagtacctgagcctggagcagaagaccgaggagctggagggccagatcaagaagctggaggccgacagcctggaggtgaaggccagcaaggagcaggccctgcaggacctgcagcagcagagacagctgaacaccgacctggagctgagagccaccgagctgagcaagcagctggagatggagaaggagatcgtgagcagcaccagactggacctgcagaagaagagcgaggccctggagagcatcaagcagaagctgaccaagcaggaggaggagaagaagatcctgaagcaggacttcgagaccctgagccaggagaccaagatccagcacgaggagctgaacaacagaatccagaccaccgtgaccgagctgcagaaggtgaagatggagaaggaggccctgatgaccgagctgagcaccgtgaaggacaagctgagcaaggtgagcgacagcctgaagaacagcaagagcgagttcgagaaggagaaccagaagggcaaggccgccatcctggacctggagaagacctgcaaggagctgaagcaccagctgcaggtgcagatggagaacaccctgaaggagcagaaggagctgaagaagagcctggagaaggagaaggaggccagccaccagctgaagctggagctgaacagcatgcaggagcagctgatccaggcccagaacaccctgaagcagaacgagaaggaggagcagcagctgcagggcaacatcaacgagctgaagcagagcagcgagcagaagaagaagcagatcgaggccctgcagggcgagctgaagatcgccgtgctgcagaagaccgagctggagaacaagctgcagcagcagctgacccaggccgcccaggagctggccgccgagaaggagaagatcagcgtgctgcagaacaactacgagaagagccaggagaccttcaagcagctgcagagcgacttctacggcagagagagcgagctgctggccaccagacaggacctgaagagcgtggaggagaagctgagcctggcccaggaggacctgatcagcaacagaaaccagatcggcaaccagaacaagctgatccaggagctgaagaccgccaaggccaccctggagcaggacagcgccaagaaggagcagcagctgcaggagagatgcaaggccctgcaggacatccagaaggagaagagcctgaaggagaaggagctggtgaacgagaagagcaagctggccgagatcgaggagatcaagtgcagacaggagaaggagatcaccaagctgaacgaggagctgaagagccacaagctggagagcatcaaggagatcaccaacctgaaggacgccaagcagctgctgatccagcagaagctggagctgcagggcaaggccgacagcctgaaggccgccgtggagcaggagaagagaaaccagcagatcctgaaggaccaggtgaagaaggaggaggaggagctgaagaaggagttcatcgagaaggaggccaagctgcacagcgagatcaaggagaaggaggtgggcatgaagaagcacgaggagaacgaggccaagctgaccatgcagatcaccgccctgaacgagaacctgggcaccgtgaagaaggagtggcagagcagccagagaagagtgagcgagctggagaagcagaccgacgacctgagaggcgagatcgccgtgctggaggccaccgtgcagaacaaccaggacgagagaagagccctgctggagagatgcctgaagggcgagggcgagatcgagaagctgcagaccaaggtgctggagctgcagagaaagctggacaacaccaccgccgccgtgcaggagctgggcagagagaaccagagcctgcagatcaagcacacccaggccctgaacagaaagtgggccgaggacaacgaggtgcagaactgcatggcctgcggcaagggcttcagcgtgaccgtgagaagacaccactgcagacagtgcggcaacatcttctgcgccgagtgcagcgccaagaacgccctgacccccagcagcaagaagcccgtgagagtgtgcgacgcctgcttcaacgacctgcagggctag

SEQ ID NO: 139184 - DNA, 933 bp, Artificial Sequence
  derived and/or modified sequence
ctgagaagagtggaccacgagacccccggcagagtgggcagccagggcagcgacctggacagcagcgccacccccatcaacaccgtggacgtgaacaacgagagcagcagcgagggcttcatctgcccccagtgcatgaagagcctgggcagcgccgacgagctgttcaagcactacgaggccgtgcacgacgccggcaacgacagcggccacggcggcgagagcaacctggccctgaagagagacgacgtgaccctgctgagacaggaggtgcaggacctgcaggccagcctgaaggaggagaagtggtacagcgaggagctgaagaaggagctggagaagtaccagggcctgcagcagcaggaggccaagcccgacggcctggtgaccgacagcagcgccgagctgcagagcctggagcagcagctggaggaggcccagaccgagaacttcaacatcaagcagatgaaggacctgttcgagcagaaggccgcccagctggccaccgagatcgccgacatcaagagcaagtacgacgaggagagaagcctgagagaggccgccgagcagaaggtgaccagactgaccgaggagctgaacaaggaggccaccgtgatccaggacctgaagaccgagctgctgcagagacccggcatcgaggacgtggccgtgctgaagaaggagctggtgcaggtgcagaccctgatggacaacatgaccctggagagagagagagagagcgagaagctgaaggacgagtgcaagaagctgcagagccagtacgccagcagcgaggccaccatcagccagctgagaagcgagctggccaagggcccccaggaggtggccgtgtacgtgcaggagctgcagaagctgaagagcagcgtgaacgagctgacccagaagaaccagaagaagaagaagaagaagtag

SEQ ID NO: 139185 - DNA, 9875 bp, Artificial Sequence
  derived and/or modified sequence
atctgtcagttacgggggctgcccggcgggcgggctggaggcgctcgcaggctgcctagtcgttcgctcgctctctctcgcgtgctccctctcgccgcctgtggggaagtcggggccgcccgagcggccgtcgccaccgcctcgccccgacctccttcccggtcccctcccggcccagtccctcccgcccgcgcaccccgagtagtgagtggccccgcgcagggtctggagagtcaccgcggcggcgccgggtggtggttaaaccatgttaaggaggattttacagaggactcctgggagagttggctctcaaggttctgatttagattcatcagcaactcctataaacacagtggacgtcaataatgaaagctcttcagagggtttcatatgtccccagtgtatgaaatctcttggatctgctgatgaacttttcaaacattatgaagctgttcatgatgctggtaatgactcaggtcatggaggagagtctaatcttgctttgaagcgagatgatgtaacactgctcagacaagaggtccaagacctacaggcttcacttaaggaagaaaaatggtactcggaagaattaaagaaggaattagaaaaatatcaagggctgcagcagcaagaggccaaacctgatgggttggtgactgattcatcagcagaactacagtctttggaacagcaattagaagaagcccaaacagaaaattttaatattaagcaaatgaaagacttatttgaacagaaagcagcccaacttgctactgaaattgcagatataaagtcaaagtatgatgaagaaaggagtcttcgagaagctgctgaacaaaaagtgacacgtctgacagaagaattaaacaaagaggcaactgtaattcaagatctgaagacggaactgcttcagagacctggtatagaagatgttgccgtgctaaagaaagaactggtccaagttcaaacactaatggataacatgaccttggaacgtgagcgagaatctgaaaaactcaaagatgaatgcaaaaaattgcagtcacaatatgctagctcagaggccacaataagccagctaaggagtgaacttgccaaaggcccccaggaagttgctgtatatgtacaggaactacaaaaactgaaaagttcagttaatgaattaacacaaaaaaatcagaccttgacagaaaacttgctgaaaaaagaacaagactatactaagttagaggagaaacataatgaagaatctgtgagtaaaaagaatattcaggcaacccttcatcaaaaagacctagattgtcaacagcttcagtcaagattgtctgcatctgaaacctcactgcatagaatacatgtagaactaagtgaaaaaggagaagctactcaaaagctcaaagaagaattatctgaggtagagaccaagtaccagcatctaaaggcggagtttaagcagctacaacaacagagagaagaaaaggagcagcatgggttacaactccaaagtgaaattaatcaattacatagcaaacttctggagacagagcgccaactaggggaagctcatggtaggctgaaggaacagagacagctttcaagtgaaaagttgatggataaagaacaacaagtggctgatttacaactcaaactttctcggttagaagagcagttgaaggaaaaagttacaaattctacagaattgcagcatcaattagataaaacaaagcaacagcatcaagaacaacaggctcttcagcaaagcaccacggcaaaacttcgagaagctcagaatgatttggaacaagttctacgtcaaattggcgataaggaccaaaagatccagaaccttgaagctttattacagaagagtaaagaaaatatttcattactagaaaaagaaagagaagatctttatgcaaaaattcaggctggtgaaggagagactgctgttcttaaccagttacaagaaaaaaaccatacactacaggagcaagtaactcaactaacagagaagctgaagaatcagtcagaaagtcataaacaagcccaggagaatttgcatgaccaggtacaagagcagaaggcacatcttagagctgcacaagaccgtgtcctttccctagaaactagtgtcaatgaattaaatagtcaattaaatgaaagcaaggagaaggtctcccagcttgacatacagattaaagccaaaaccgaactattactatcagcagaagcagcaaaaactgctcaaagagctgatcttcagaatcatttggacacagctcaaaatgcattacaagataaacagcaggagttaaataagattactactcagttggatcaggtcactgcaaagttacaagacaagcaagaacattgcagtcagctggaaagtcatcttaaagaatataaagagaaatacctctctttagaacagaaaaccgaagagctagaaggtcaaattaagaaactagaagctgatagtcttgaagttaaagcaagcaaggagcaggctttgcaagatctacaacagcaaagacagctgaacacagatttagagctcagagccacagaattgagtaaacaacttgaaatggagaaggaaatagtatccagtacaagattggatctacagaaaaaatctgaagcccttgaaagtatcaagcaaaagcttaccaagcaagaggaagaaaaaaaaatcctgaaacaagattttgaaactttaagtcaagaaacaaagattcagcatgaggaattgaataacagaattcaaacaacagtaacagaactacaaaaagtgaaaatggagaaagaagctttaatgacagagctttctacagtaaaggacaaactatcaaaagtttctgattctttgaaaaactctaaaagtgaatttgaaaaggagaatcagaaaggaaaagccgctatattagacttggaaaaaacttgcaaagaattaaagcatcaacttcaagtgcagatggaaaacacacttaaggaacagaaggaactgaaaaagtcacttgaaaaagagaaggaggcttctcatcagttgaaattggaactcaattcaatgcaggaacaacttatacaggcccagaatactttaaaacaaaatgaaaaagaagagcaacaacttcaggggaacataaatgagctaaagcaatcaagtgaacagaagaaaaaacaaattgaagcactccaaggagagcttaaaattgctgttttacagaagacagagcttgagaataaactacagcagcagttaacacaggcagcccaggaacttgcagcagagaaagagaaaatatcagtattacaaaacaactatgaaaaaagtcaggaaactttcaaacagcttcaatctgatttctatgggagggaatctgaacttctagccaccaggcaagatcttaagtctgtagaagagaagctttctctagcacaggaggacttgatttcaaacagaaatcaaattggaaatcaaaataaattgattcaagaactgaagactgccaaggctacattggagcaggattcagcaaagaaagaacagcaattgcaggagcgatgtaaagcactacaagacattcagaaagaaaagtcactgaaagaaaaagaactggtaaatgagaagtctaaattggcagagatagaagaaattaaatgtagacaagaaaaagaaatcactaaactaaacgaagaactcaagtcccacaaactagaaagcataaaggagataacaaatcttaaagatgctaaacagcttctaattcagcagaaattagaacttcaaggaaaagcggactccctgaaggcagctgttgaacaggagaagagaaatcagcagatactaaaagaccaggtgaaaaaggaagaagaggagctgaagaaagaatttattgagaaagaagctaagttgcattccgaaataaaagaaaaggaagtaggaatgaagaagcatgaagaaaatgaggctaaacttaccatgcagattacagcattaaatgaaaacttaggcactgtgaagaaggagtggcaatctagtcaacggagagttagtgagcttgagaaacaaacggatgacttacggggtgaaattgcagtattagaagcaacggttcagaataatcaagatgaaaggagagcactactggaaagatgtcttaaaggagaaggtgaaatagaaaagcttcaaaccaaagtattagaattgcaaagaaagctggataatacaactgcagcagtgcaggagctgggcagagaaaaccaatcacttcagatcaaacatacacaagcgttgaatagaaagtgggccgaagacaatgaagtacaaaactgtatggcctgtgggaaaggcttttcagtaacagtgagacggcatcactgccgacagtgtggaaatatcttctgtgctgaatgttcagccaaaaatgccttaactccttcctccaagaagcctgttcgtgtctgtgatgcatgtttcaatgacttgcaaggataatgggttatcacaacttcagagtaatattacactaacattagatttttaataaatgtacttaatagaggtcttggactactatttggtttggacactggttgcaatactagaccaaataggaattagtatattttggaatgttatggatatcaagtaaaactcttctatttttgtgagacttgggcttatcatctttcattacttttttcccatttagcccctggaatagctttcatgccaagtttagaattagccaatgaaatgtaaataaactttggacagaaaatagcaatgtatttttttaatataatttcattattcacaaatgaagaatgcaattccatagcttacttctttctcctaaatttaatgtacaaaaatgtacatggatgatattatcacttgttgctgtttttgttgcacaatagcacattaattatattaaatattctctttgtgaagttatgcacagaactgtaacactttcctctgcctttttctcttatatgtgggttcatggttcagttgcattgttatgttatgaatttactacttgggtgttctaaatacagtttatcttaaaatatgtagtaatatgaattcaaaaatggtttttgttttaacaatattaattaaattttcttgggtggattttataaaaacctctgtaaaatcaatttgtttacttatagttatctggggttgtattgcaaagaatagggttaatttttctttttgtctttttctgtctctttcttaaactcccacgcattgtccatttagaatcttagaaagcttcttaccctcgctgtcagttggaggatgaataataaacattgtataatgttcttattctcggtttcttgtaagtgggaagtcttttgagatcagccttcatatcatacccttattttgtctctctagcatcttcaggaacctgagtttgctttttacatagatctgattttttcctttatttggtttaacattttcaagcatagatcagcttcatgtatttgttttataattttgcatcttaaagctagtaactaatattgctgtggtcttattggtgaaaacaaaatataaaatgataagaagacattaaatattttactttctatttcttaccctattgggaagaatttttaaaagttgtaaaattgacttaaagttaaaatggttctgaatttggtgttccatgtcaactgttcccagttttaattttaactttgcaaaaataatgttgtgaaattccctttaagtaactaacacctagaaatagagtatcaccaaaaacaaatgtatttaggaatcccagttacaataaaaactgaaacagcatggctaagcatcttaaggataattaagaaattagcttatttgtatgctgaacaatggaatcgaactttaatttagcatagtcttattaatttggaaaattgtaaaacatctcaagagagaagttattaatattggtttattaatctttctagagaagaagtgtagttatacattcattcagtgcaatcattttataacagtagttaatatttcatttataatagttcttaatatacatttgctttcaaatattctgaaatgaaattatattcatgctatacctacagtgtatgtaaactaaagagatcactacatatttgtttaattatttaaaaaaaaatttaagtaaaccctgttgtcattagctattaagaacattgattaagtccctggacttggataaacatatatccttgaacatatataatgaagaaatacagtggctctttattaaaaataatagttggataatataaactgaactatttatgcatttttatatacttataaatccttccaaatagttttaattctatccttttacatataaataacttaataagtgtgctggaaaaacacagatattcacagcaccactgttttttttttttttttgagataataaattccatgagaaatctgggtttgaatatttgtttactttgtctcctaattgaacaccactccaggccttctgtctgtctcccctttacccccaaaatactcacaaaaaaattttaagacaacaagtaaccatatataggtgtttgaatgattttctcatttttatctaatttcatttcataagtcccgagtaatttacctaccataggctactatactgataatataaatgaaaccgaacattttttgctactaactctccccaatttaatgtgttttcgaaataaaaatttaaatttttttccttttaattaaaaagtcatctttgaagtccttattggctgtacattttacatgtttgctggtactattattttgtcagtcagttaaagctggcatgtacagctcttggctttaatgaaaagcacattgacataatgttagtaaattccaaaccccggcacagaatgtgagttaaaattaagtcttgctgggttagtgtacaataaactatacctacagacttttttttaatagaaagaagacaaagctgctggtataggatttgttcctttgaagaaaaaatgagggaaacaaacacaaaaacctcaatgcagtgtataaataacattttgttcaactacctcttaatgtggaattatctactttaatagtttcctgacagtaatgttaaatagtaactgccaaatttgttattttcccatctctcttaaaaaagtctttatgattattttatatagttttgagaactttaaagccacttttttttaaccttacatttgcataaaaatgtttagcttttaagtagagagcaaattatgatcatatattttgatattcatgacctgtttgactataggagtttttttaaaaaaatgcactttggctataaaaccatggatgatttgatccataagatttaaatgtgccaccattatagtattcctagacatgagcttgatgaatggtattctgtaattataacgtgccacacattattgtgtcttaattgcccttagcctgaattttaatgatcaatttgttattgttgcagatgtgaatattgtgcataaacttactaaatttatgtaaaattgtataaaatagaattagaagtcactaagttctttctgtgtagaagtaataaatttattgtaacacaatgcagttgtgtatatgacattctgtaattccttgaactggatcatatattcataagttctgtagatacttatgcatgaacattttctcatttagtttttgggttcattatttgtattgtgtttactacttgtgatcatgtagttgtgccttactttgtgagaaaggttagctcagtaaatactgcaatttctaaactcagtgattggaaggttattaattataaatgtaactgataaagtacgtgacagcatttaaatctgtataaagaacaatggaaggatccttattgaattgttgcttttttttaatatgtttaaatattatattaaaaacatttctttctaaactagttgtattctgtgactataaattgttttgtctaacaaaagagagaacactgtattaaccattttgcattaatttatttacagaatattaggactttgcacttggatatagacagtggtgttttaatgttgttcaatttcgaatagtaattaaattcctgatctcaagagaaattattaatgccattttgccttagacattccatttaatattgtagagaattaacaaaactaaaaacaaatataaaaaatatgtaattaaccccttatttcattgtgtgtctgcatttaatacccagatgaccatttaaagatacttaaaacattatttatttatttatttatttatttttctccctcccctccccaaagatactttttggaaggcccaatgtgccattgttttttgctattttttcttcctgggagccacggttctagaatggtttttgttctgacccccgtgatcccttcattcgaatgtgcttcattctaaaccctccaaagagtttaatgtgcatatcctcaaacatctaatatattgtatattagacatgttactttgtgagctttatagaattccagtttatgtacagcatattcttgagctgttttatatattttgttaatttagtcagtctgtctctccctttaatgagattcagagggagaaaactacctttatacatgtaagtctgtggttgctggattcatgggactaaaggaatttgagaggccacctcatcctagtccactgctcacctccgaggttagtttatatctaaacatttgcaagatgattgttaatgtaaaaattttttttaaccagaaatttctttataaaatcttctcttgcataatctatattgtattctcctggacataactgctttcagtcccatccagatgccatctctaggaattcacttgaagcttgaagtctattctcccctttttctcccctccacctcatttattcttagctattaacaatagttactgtcctccagattttcctttttttcttctattaaatttctgacattattataaagaggttattagtctccattctaatagtgcttgccttgtacaaaagcctttctgctgcacttgtctttactgctttgtttgcatagtgaaatttcaccttcctcaaggaattactgggcacatgacttgcccaaacattatcctctctaccccattcttcagcttaacaaaatcagctaaggcttcagttgtcttgcagccaaatttgataaatttactactttcactttgcaaattgcaaaaggtacgattctgaaatggaagtttgtggacttccctttgatgcaataatctgaccctaagaactagttccttgaatgtagttaatagtatatatcctgccatgataataattattcaaactgcctttcatgataaaaattctgaagaaatttgaagtcctgccaaataaaattaagtgactgtactgtgctaacacacacacacacacacacacacaccaatcaaaaccagaaagtatttttatggcaaacaccatcattcttcaaaaaataaagttaagagacagataccttactatgtctatgaaaatctgtacacttcacaacaggccaagaaaagccatgcaaaagtgttaactggtgaaagccagattttttttttcttcctatcttaaagtaatggaatttagtctttgggattttctacttccacgttagagtactatatacctgagatgagtttgagaataggaattttaaaactgctacttaaatgtagtccctatttattgctttgtatattaaaagaacaatcaagctttgtatctaaagatttatcattatgtttgaggtaggact

SEQ ID NO: 139186 - DNA, 930 bp, Artificial Sequence
  derived and/or modified sequence
ctgaggcgggtggatcatgagactcctgggagagttggctctcaaggttctgatttagattcatcagcaactcctataaacacagtggacgtcaataatgaaagctcttcagagggtttcatatgtccccagtgtatgaaatctcttggatctgctgatgaacttttcaaacattatgaagctgttcatgatgctggtaatgactcaggtcatggaggagagtctaatcttgctttgaagcgagatgatgtaacactgctcagacaagaggtccaagacctacaggcttcacttaaggaagaaaaatggtactcggaagaattaaagaaggaattagaaaaatatcaagggctgcagcagcaagaggccaaacctgatgggttggtgactgattcatcagcagaactacagtctttggaacagcaattagaagaagcccaaacagaaaattttaatattaagcaaatgaaagacttatttgaacagaaagcagcccaacttgctactgaaattgcagatataaagtcaaagtatgatgaagaaaggagtcttcgagaagctgctgaacaaaaagtgacacgtctgacagaagaattaaacaaagaggcaactgtaattcaagatctgaagacggaactgcttcagagacctggtatagaagatgttgccgtgctaaagaaagaactggtccaagttcaaacactaatggataacatgaccttggaacgtgagcgagaatctgaaaaactcaaagatgaatgcaaaaaattgcagtcacaatatgctagctcagaggccacaataagccagctaaggagtgaacttgccaaaggcccccaggaagttgctgtatatgtacaggaactacaaaaactgaaaagttcagttaatgaattaacacaaaaaaatcagaaaaaaaaaaaaaaaaaa

SEQ ID NO: 139187 - DNA, 4236 bp, Artificial Sequence
  derived and/or modified sequence
atgcttaggcgcatcctgcagcgtacaccgggaagagtcgggtcgcagggtagtgacctcgatagctccgcaacaccgatcaacacagtggatgtgaataacgagtcctcttccgaaggcttcatctgccctcaatgcatgaagtctctcggcagcgctgatgagctgttcaagcactatgaggccgtgcatgacgcgggtaacgactcaggacatggcggcgaatcaaatctggcattaaagcgcgatgacgttacgctgctgagacaagaagtacaggatctacaagcatcattgaaagaggagaagtggtattccgaggaactgaaaaaagaactcgagaaatatcagggcctgcagcagcaggaagccaaacctgatggtctggtgacagattcttccgccgaattacagagcctcgagcaacagttagaagaggcccagaccgagaacttcaacattaagcagatgaaagatctcttcgagcagaaagcggcacagctggccaccgaaattgcggacatcaaatccaagtacgatgaagaaaggagtcttagagaggcggcagagcaaaaggtcactcggctgacagaggagctgaataaggaggcaaccgtcattcaggatctgaagactgaactgctccaaaggcctggcatcgaagatgtggcagtgctaaaaaaagagttagttcaggtgcagaccctgatggacaacatgacccttgagcgggaaagagaatcagaaaaactcaaggacgagtgtaagaagttgcagtcccagtatgctagttctgaggccacaatcagccaactcaggtcagagttagcaaagggcccccaggaggtggccgtttacgtgcaggagctccagaagctcaagtcatctgtcaatgagttgacccagaagaatcaaaccttgaccgagaatcttctgaaaaaagaacaggattacaccaagctggaggagaagcacaacgaggagtcagtcagtaagaaaaacatccaggctactctccaccaaaaggacctagactgccagcagcttcaatcgagactcagcgcctccgagacgagcttgcatcgcatccacgtcgagctctccgagaagggggaggccacccaaaagcttaaggaggagctaagtgaggtggagacaaaataccagcacctcaaggcagagtttaaacagctgcaacagcagcgggaagagaaagaacagcacggtttacagctgcaatcggagattaaccagctacactccaaattgttggaaactgaaagacaactgggggaggcgcatggccgcctgaaagagcagcgccagcttagctcagagaaattgatggacaaagagcagcaagtggcagacctacagctgaaattgtcccgcctggaagagcaactgaaagaaaaggtcacgaattctaccgaattacagcatcaactcgataagaccaagcagcagcatcaagaacagcaggcactccagcagtcaactaccgccaagttacgagaggcccagaacgacctggaacaagtgctcaggcagattggtgacaaggatcagaagattcagaatctggaggctttgctgcagaagagcaaagagaatattagcctactggagaaggagcgagaagatctgtatgccaaaatccaagcaggcgaaggggagacagcagtgctcaatcaactacaggaaaaaaaccatacccttcaggagcaggtcacacaacttaccgagaaattgaaaaaccagagtgagtctcacaagcaggcccaggaaaatctacatgatcaggtgcaagaacagaaggcccacctgcgggctgcacaagacagggtgctctccctggagacctcagttaacgaattgaattcacaactcaacgaaagcaaggaaaaggtctcacagctagatatccagattaaggcaaaaaccgaactgctgctgtctgccgaagccgccaagacagcccaaagagctgacttgcagaaccatctggacacagcccagaacgcccttcaggacaaacagcaggaactgaataagataacaacgcaactggatcaagtcacagccaaactgcaggacaagcaggagcactgttctcagttggaaagtcatctgaaggagtacaaggagaagtacctgagcctggaacaaaagacagaagagctagagggacagatcaagaagctggaggccgattcccttgaagttaaagccagcaaagagcaggcattgcaggacctacaacagcagcggcagctcaacacagatctggagctccgagctactgaactgtccaagcagctggagatggagaaggaaattgtcagttctacgcgtttggacctgcagaagaagtcagaggctcttgagtccatcaagcagaagctgaccaaacaggaggaagagaagaaaatcctcaagcaggacttcgaaacactgtctcaagagaccaaaattcagcatgaggaactgaacaacaggatccagaccactgtcaccgagctccagaaggtaaagatggagaaagaagctctaatgactgaattgtccactgtcaaagataagttgtctaaggtgtctgactccctcaagaatagcaaaagtgaattcgagaaggagaaccagaagggcaaggctgcgatcctagatcttgaaaaaacatgcaaggaacttaagcatcagctacaggtgcagatggagaatacgctcaaagagcaaaaggagttgaaaaaatccctggagaaggagaaagaggcctcccaccagctcaaactcgagcttaattcaatgcaggagcagctaattcaagcccagaacacactgaagcaaaatgaaaaagaggaacagcagctgcaggggaatataaatgagctgaagcaaagctcggagcagaagaaaaagcagatcgaagccctccagggcgagctgaagatcgcagtacttcagaagaccgagctggaaaacaaactgcagcagcaattaacccaagctgcccaagagcttgctgctgagaaggagaagataagcgtgttgcagaataattatgagaaatcacaagagacattcaaacagctgcagtccgacttctacggtagggagtctgagctactggcgaccaggcaggatcttaaatccgtcgaagagaaactttcccttgcccaggaagatctaatcagtaatcggaaccagattggcaaccagaacaaattgatacaggaattgaaaaccgctaaggctacccttgaacaggatagtgcgaagaaagagcaacagctgcaggagagatgcaaggccctacaagatattcaaaaagaaaagagtctaaaagagaaagagcttgtcaacgaaaaatctaagctggcagagatcgaagagataaagtgtcgacaagagaaggaaatcaccaagttaaatgaggaattgaagtcccataagctggaatctattaaggagattacaaatctgaaagatgctaaacagttgcttatccagcagaaattagaacttcaggggaaggctgactccctgaaggcagcagtcgagcaagaaaaacgcaaccagcagatactgaaagatcaggtgaaaaaggaggaggaggagctgaaaaaggagtttatagaaaaagaggctaagctgcacagtgaaataaaggaaaaggaggtcggcatgaagaaacacgaagagaacgaggctaaactgaccatgcagattacagccctcaatgagaatcttggcacggtaaaaaaggagtggcagtcatcacagcggcgcgtgtcagagctcgagaagcagactgacgaccttaggggagagattgccgtgctggaagccactgtccagaataaccaggacgaaaggcgggccctgcttgagcgctgtcttaagggtgaaggcgaaatcgagaaactacagacaaaagtcctcgagttgcagcgcaagctggacaacaccaccgccgccgtgcaagaactgggccgggagaaccagagtttgcagatcaagcacacgcaagcactcaacagaaaatgggctgaggacaacgaggtgcagaactgcatggcttgtggaaaagggtttagtgttaccgttagacgtcaccattgtcgacagtgcggcaacatcttctgcgccgagtgtagcgccaagaatgcacttactccttcatcgaagaaacccgttagggtgtgcgatgcctgttttaacgatctccagggatag

SEQ ID NO: 139188 - DNA, 933 bp, Artificial Sequence
  derived and/or modified sequence
ctgaggagagtcgaccatgaaactccaggtagggttggctctcagggatccgaccttgattccagcgctactcccattaatactgtggatgtcaacaatgagagttcaagtgagggcttcatttgtccacagtgtatgaaaagtctgggatccgccgacgaactgttcaaacactatgaagctgttcatgatgccggaaacgactccggccatggcggggaaagtaacctcgccctgaagagagatgatgttaccctgctgcgccaggaagttcaggacttgcaggcctccctaaaagaggagaaatggtattcagaggagcttaaaaaggaactagagaaatatcagggtctccagcagcaagaggcaaagcccgatggcctcgtaaccgattcatccgccgaactgcagagtcttgagcagcagctggaagaggctcagactgaaaattttaatatcaagcagatgaaggacctgtttgaacagaaagccgcgcagcttgctacagaaatcgcagacattaagagcaaatacgatgaggagcgcagcctgcgagaggctgctgagcagaaagttacacggctgaccgaagagctgaacaaagaggcaactgtgatacaggatctgaagaccgaactgctgcagcgtcccggtatcgaggatgtcgccgtcctaaaaaaggaactggttcaagtgcaaaccctgatggacaatatgacacttgaaagagagagagagagcgaaaaactgaaggatgaatgtaagaagctgcaaagtcagtatgcatctagcgaagccaccataagccaattacggagcgagctggcaaagggtcctcaggaagtggcagtgtacgtgcaggagctgcaaaaattaaagagttccgtgaatgaactgactcaaaaaaaccaaaagaagaaaaaaaagaagtag

SEQ ID NO: 139189 - DNA, 4236 bp, Artificial Sequence
  derived and/or modified sequence
atgctgcggcgcatcctgcagaggaccccaggccgggtgggcagccagggcagtgacctggacagcagcgccacccccatcaacacagtggatgtgaacaatgaaagcagcagcgagggcttcatctgcccccagtgcatgaagagcctgggcagcgcagatgagctgttcaagcactatgaggccgtgcatgatgctggaaatgacagcggccacggcggggagagcaacctggccctgaagagagatgatgtgaccctgctgcggcaggaggtgcaggacctgcaggccagcctgaaggaggagaagtggtacagcgaggagctgaagaaggagctggagaagtaccagggcctgcagcagcaggaggccaagccagatggcctggtgacagacagcagcgctgagctgcagagcctggagcagcagctggaggaggcccagacagagaacttcaacatcaagcagatgaaggacctgtttgagcagaaggccgcccagctggccacagaaattgctgacatcaagagcaaatatgatgaggagaggagcctgcgggaggccgctgagcagaaggtgacccggctgacagaggagctgaacaaggaggccaccgtcatccaggacctgaagacagagctgctgcagaggcctggcattgaagatgtggccgtgctgaagaaggagctggtgcaggtgcagaccctgatggacaacatgaccctggagcgggagcgggagagcgagaagctgaaggatgagtgcaagaagctgcagagccagtatgccagcagcgaggccaccatcagccagctgcggtctgagctggccaagggcccccaggaggtggccgtgtatgtgcaggagctgcagaagctgaagagctctgtgaatgagctgacccagaagaaccagaccctgacagagaacctgctgaagaaggagcaggactacaccaagctggaggagaagcacaatgaggagagcgtgtccaagaagaacatccaggccaccctgcaccagaaggacctggactgccagcagctgcagagccggctgagcgccagcgagaccagcctgcaccgcatccacgtggagctgtctgagaagggggaggccacccagaagctgaaggaggagctgtctgaggtggagaccaagtaccagcacctgaaggccgagttcaagcagctgcagcagcagcgggaggagaaggagcagcacggcctgcagctgcagagcgagatcaaccagctgcacagcaagctgctggagacagagcggcagctgggggaggcccacggccgcctgaaggagcagaggcagctgagcagcgagaagctgatggacaaggagcagcaggtggccgacctgcagctgaagctgagccggctggaggagcagctgaaggagaaggtgaccaacagcacagagctgcagcaccagctggacaagaccaagcagcagcaccaggagcagcaggccctgcagcagagcaccacagccaagctgcgggaggcccagaatgacctggagcaggtgctgcggcagatcggggacaaggaccagaagatccagaacctggaggccctgctgcagaagagcaaagaaaacatcagcctgctggagaaggagcgggaggacctgtatgccaagatccaggccggggagggggagacagctgtgctgaaccagctgcaggagaagaaccacaccctgcaggagcaggtgacccagctgacagagaagctgaagaaccagagcgagagccacaagcaggcccaggagaacctgcatgaccaggtgcaggagcagaaggcccacctgcgggccgcccaggacagagtgctgagcctggagacctctgtgaatgagctgaacagccagctgaatgaaagcaaggagaaggtgtcccagctggacatccagatcaaggccaagacagagctgctgctgtctgctgaggccgccaagacagcccagagagctgacctgcagaaccacctggacacagcccagaatgccctgcaggacaagcagcaggagctgaacaagatcaccacccagctggaccaggtgacagccaagctgcaggacaagcaggagcactgcagccagctggagagccacctgaaggagtacaaggagaagtacctgagcctggagcagaagacagaggagctggagggccagatcaagaagctggaggccgacagcctggaggtgaaggccagcaaggagcaggccctgcaggacctgcagcagcagaggcagctgaacacagacctggagctgcgggccacagagctgagcaagcagctggagatggagaaggagatcgtgagcagcacccggctggacctgcagaagaagtctgaggccctggagagcatcaagcagaagctgaccaagcaggaggaggagaagaagatcctgaagcaggactttgagaccctgagccaggagaccaagatccagcacgaggagctgaacaaccgcatccagaccaccgtgacagagctgcagaaggtgaagatggagaaggaggccctgatgacagagctgagcacagtgaaggacaagctgagcaaggtgtctgacagcctgaagaacagcaagtcagaatttgagaaggagaaccagaagggcaaggccgccatcctggacctggagaagacctgcaaggagctgaagcaccagctgcaggtgcagatggagaacaccctgaaggagcagaaggagctgaagaagagcctggagaaggagaaggaggccagccaccagctgaagctggagctgaacagcatgcaggagcagctgatccaggcccagaacaccctgaagcagaatgagaaggaggagcagcagctgcagggcaacatcaatgagctgaagcagagcagcgagcagaagaagaagcagatcgaggccctgcagggcgagctgaagattgctgtgctgcagaagacagagctggagaacaagctgcagcagcagctgacccaggccgcccaggagctggccgctgagaaggagaagatctctgtgctgcagaacaactatgagaagagccaggagaccttcaagcagctgcagagcgacttctacggccgggagagcgagctgctggccacccggcaggacctgaagtctgtggaggagaagctgagcctggcccaggaggacctgatcagcaacagaaaccagatcggcaaccagaacaagctgatccaggagctgaagacagccaaggccaccctggagcaggacagcgccaagaaggagcagcagctgcaggagcgctgcaaggccctgcaggacatccagaaggagaagagcctgaaggagaaggagctggtgaatgagaagagcaagctggccgagattgaggagatcaagtgccggcaggagaaggagatcaccaagctgaatgaggagctgaagagccacaagctggagagcatcaaggagatcaccaacctgaaggatgccaagcagctgctgatccagcagaagctggagctgcagggcaaggctgacagcctgaaggctgctgtggagcaggagaagaggaaccagcagatcctgaaggaccaggtgaagaaggaggaggaggagctgaagaaggagttcatcgagaaggaggccaagctgcacagcgagatcaaggagaaggaggtgggcatgaagaagcatgaggagaatgaggccaagctgaccatgcagatcacagccctgaatgaaaacctgggcaccgtgaagaaggagtggcagagcagccagaggagagtgtctgagctggagaagcagacagatgacctgcggggggagattgctgtgctggaggccaccgtgcagaacaaccaggatgagcggcgggccctgctggagcgctgcctgaagggggagggggagattgagaagctgcagaccaaggtgctggagctgcagaggaagctggacaacaccacagctgctgtgcaggagctgggccgggagaaccagagcctgcagatcaagcacacccaggccctgaacaggaagtgggccgaggacaatgaggtgcagaactgcatggcctgtgggaagggcttctctgtgacagtgcggcggcaccactgccggcagtgtggcaacatcttctgtgccgagtgcagcgccaagaatgccctgacccccagcagcaagaagcctgtgcgggtgtgtgatgcctgcttcaatgacctgcagggctag

SEQ ID NO: 139190 - DNA, 933 bp, Artificial Sequence
  derived and/or modified sequence
ctgcggcgggtggaccacgagaccccaggccgggtgggcagccagggcagtgacctggacagcagcgccacccccatcaacacagtggatgtgaacaatgaaagcagcagcgagggcttcatctgcccccagtgcatgaagagcctgggcagcgcagatgagctgttcaagcactatgaagctgtgcatgatgctggaaatgattctggccatggaggagagagcaacctggccctgaagagagatgatgtgaccctgctgcggcaggaggtgcaggacctgcaggccagcctgaaggaggagaagtggtacagcgaggagctgaagaaggagctggagaagtaccagggcctgcagcagcaggaggccaagccagatggcctggtgacagacagcagcgctgagctgcagagcctggagcagcagctggaggaggcccagacagagaacttcaacatcaagcagatgaaggacctgtttgagcagaaggccgcccagctggccacagaaattgctgacatcaagagcaaatatgatgaggagaggagcctgcgggaggccgctgagcagaaggtgacccggctgacagaggagctgaacaaggaggccaccgtcatccaggacctgaagacagagctgctgcagaggcctggcattgaagatgtggccgtgctgaagaaggagctggtgcaggtgcagaccctgatggacaacatgaccctggagcgggagcgggagagcgagaagctgaaggatgagtgcaagaagctgcagagccagtatgccagcagcgaggccaccatcagccagctgcggtctgagctggccaagggcccccaggaggtggccgtgtatgtgcaggagctgcagaagctgaagagctctgtgaatgagctgacccagaagaaccagaagaagaagaagaagaagtag

SEQ ID NO: 139191 - DNA, 4236 bp, Artificial Sequence
  derived and/or modified sequence
atgctgcggcggatcctgcagcggacccccggccgggtgggcagccaaggttcagatctggactcaagtgctacccctattaacaccgtggatgtgaataacgaaagcagcagcgaaggtttcatctgtccgcaatgcatgaagtcactgggctctgctgacgagttgtttaagcactatgaggcggtccatgacgcgggcaatgactcaggccacggaggggagtcaaatctggccttgaagcgcgacgacgtgactcttctgcgccaggaggtacaggatcttcaggctagtttgaaggaggaaaagtggtacagcgaagaactgaagaaggagctggagaaatatcagggccttcagcagcaggaggctaaacccgacggactagttaccgacagcagtgccgagctacaatcacttgaacaacaactcgaggaggcccagactgagaattttaacattaaacagatgaaagacttattcgagcaaaaggctgcccagctggcaacggagattgcagacattaaatctaagtatgatgaggaaaggtcactacgggaggccgcagaacagaaggttactcggctgaccgaggaactgaacaaagaggcaactgttattcaggacttgaaaaccgaactcctgcaacgtccaggcatcgaggacgttgcagttctcaaaaaggagctagtacaggtgcagactctcatggacaacatgactctagagcgggagcgggagtcagagaaactgaaagatgaatgtaagaagctccagagccagtacgcgagctcagaagctacaatcagtcagcttcgatcagagttagctaaagggccccaggaagtggcagtgtatgtgcaagagctgcaaaaacttaagtcttctgtgaacgagctgactcaaaaaaatcaaaccctgacggagaacctgttgaagaaagaacaggactacactaaactagaggagaaacacaacgaagaaagtgtgtccaagaaaaacatacaggctactctgcaccaaaaggatctggactgtcagcagcttcagtcccgtctgagtgcctcagaaacgtcattgcatcggatccatgtggagctctccgaaaagggcgaagccacccagaaactgaaggaagaactgtccgaggtggaaacaaagtaccagcatttgaaggcagaattcaaacagctgcagcagcagagagaggagaaagagcagcacggcctgcaactgcagagtgagatcaaccagttacactcgaagcttctcgaaacagaacggcagctgggtgaagctcacgggcggctgaaggagcagaggcagctgagttcggaaaagctgatggacaaggaacagcaggtggcagacctgcagcttaaactttcacgattagaagaacagctgaaagagaaggtcaccaattcaactgagttacagcatcaactcgacaaaactaaacaacagcaccaggagcagcaagcactccagcaatctactactgcgaagctgcgcgaagcccaaaatgacctggaacaggtcctccggcagatcggagacaaggatcagaaaatccaaaatctggaagcgctcctgcagaaatccaaggagaatatcagcttgcttgagaaggaacgagaggacctttatgcaaagattcaggccggtgaaggggagacagcggtgctgaaccaactccaagagaaaaatcacacactgcaggaacaggtgacccagctaactgaaaagcttaagaaccagtctgagtcccataagcaggcacaggagaatttgcacgaccaggtccaagagcaaaaggctcacttgcgggccgcgcaggatagagtgctttccttggaaacctccgtgaacgagctaaatagccaactgaacgagagcaaggagaaggtgtcgcagttggacattcagatcaaagccaagaccgagttgctgctgagcgccgaggccgccaagaccgctcaacgggccgacttgcaaaaccacctggacactgctcagaatgccctccaggataagcagcaggagttgaataagattactacacagcttgaccaagtaacagccaagctgcaggataagcaggagcattgctctcaattggagagtcacttgaaagagtacaaggagaaatatctgtccttggaacagaaaaccgaggaactggaaggtcagatcaaaaagctggaggctgactctttagaagtaaaggcttcaaaggaacaggctctgcaggatctgcagcaacagcgccaacttaacacagacctcgaactcagggcaaccgagttgagcaaacagctcgagatggagaaggaaatcgtatcaagtactcgactggacctgcagaagaaatctgaagcactggaatctataaaacagaaattaacaaaacaggaggaagagaaaaagattctgaaacaggatttcgaaacgctgtctcaggagaccaaaatccagcacgaagagctgaacaacagaatacagaccaccgtcacggagctccagaaagttaaaatggagaaggaggctctgatgacagagctgagtacagtcaaggacaaactcagtaaggtctcggacagtctgaaaaactccaaatccgagtttgaaaaagagaaccagaaggggaaagccgccattttggatctcgagaaaacctgtaaagagctgaagcatcaactgcaggtccaaatggagaataccctgaaagaacagaaagaactcaaaaagagcctggagaaggagaaggaagcctcgcatcagctcaagttagaactcaatagcatgcaagaacagctgatccaagcccagaacactctcaagcagaatgagaaggaggagcagcagctgcagggcaacattaatgaactgaaacaaagctccgagcagaaaaagaaacagatcgaagctttgcagggtgagctcaagattgcagtgctgcagaaaaccgaattggaaaataaattgcagcagcaattaacgcaggccgcacaagagctggctgcagagaaggagaagatcagcgttctccagaataattacgaaaagtcacaggagacctttaagcagctacagtctgacttctacggacgggagtcagaactcctggccacccgccaggacctgaagagcgtcgaagagaagctgtctcttgcccaagaagatctaattagcaaccgaaaccagatcgggaaccagaataagctcatccaggaactcaagactgcaaaggctacccttgaacaggatagcgccaagaaagagcaacaactgcaggagagatgtaaggctcttcaggacatccagaaagaaaagtccttgaaggagaaggagttggtgaacgagaagagcaaattggccgagatagaagaaattaagtgtagacaggaaaaggagatcactaaactgaacgaggaactgaaatctcacaaattagaaagcatcaaggagattaccaaccttaaggatgcaaagcagctgctgatccaacagaagctggaactgcagggcaaagctgatagtctcaaagcagccgttgagcaagaaaagcgaaaccagcagattctcaaagaccaggtcaaaaaggaggaggaggaactgaaaaaagagttcattgagaaggaagctaagctgcactcagaaattaaggagaaggaagtgggcatgaaaaagcatgaggaaaacgaagctaagctgactatgcagatcacggcacttaacgagaaccttggaaccgtcaaaaaagaatggcagtcaagtcagaggcgagtgtctgaactcgaaaagcagactgacgaccttcgaggcgaaattgcagtgctcgaggctaccgtccagaataatcaggatgagcggcgggcgctgctggagcgctgcttgaagggggaaggggagatagaaaagttgcagacgaaggtgttagaattgcaacgaaagctggacaatactacagccgctgtgcaggaactgggccgggaaaatcaaagcctgcaaatcaagcacacccaggcactgaataggaagtgggccgaagacaacgaggtgcagaattgcatggcgtgtgggaaaggcttttccgtgactgtgagaaggcaccattgccgccagtgtggcaatattttctgcgctgagtgcagcgcaaagaatgcgcttaccccttccagcaagaaacccgtcagagtgtgtgatgcctgctttaacgatctccaggggtag

SEQ ID NO: 139192 - DNA, 933 bp, Artificial Sequence
  derived and/or modified sequence
ctgcggcgggtggaccacgagacccccggccgggtgggcagccagggttcagacctggattcttccgccacacctataaatacggtcgacgtgaataatgagtcttcatcagaagggttcatttgccctcaatgcatgaaatccttgggttcagcagatgagctgtttaaacactatgaggccgtacatgatgcgggcaacgattcaggccatgggggcgagagcaacctagcacttaagagagacgatgtgaccctcctgcggcaggaggtgcaggacctccaggcatccttaaaggaggagaagtggtattctgaagagctgaagaaagaactagaaaagtatcaggggttgcaacaacaggaggcaaagccagatggcctcgtgaccgattcttctgctgagctccagagtctagagcaacagctggaggaggctcaaaccgaaaatttcaatatcaagcagatgaaggatctgtttgagcagaaggctgctcagttggcaaccgaaatcgccgatatcaagtcgaaatatgacgaagaacggtctctgagagaggccgcggaacaaaaggttacccggttgaccgaggaactgaacaaggaagccaccgtgatccaggacttgaagactgagcttctccagcggccgggtattgaggatgtcgccgtacttaagaaggagttggttcaggttcaaactctcatggataacatgaccttggaacgcgagcgggaaagtgagaaactgaaagacgagtgcaagaagctgcaaagccagtatgcttccagcgaggccactatttcacagttgcgcagtgaactggccaaaggtccccaggaagtcgccgtgtatgttcaggagctgcagaagctgaaatcctcagtgaatgaacttacccagaaaaatcagaagaagaaaaaaaaaaagtag

SEQ ID NO: 139193 - DNA, 4236 bp, Artificial Sequence
  derived and/or modified sequence
atgctcaggcgcatacttcagagaactcccggaagggtgggttcacaaggctccgaccttgacagcagcgccacccctattaacaccgtagacgttaataatgagtcatcatccgaaggcttcatatgccctcagtgcatgaagtccctcgggtcagccgacgaactgtttaagcactacgaggcagtgcacgacgcaggaaatgacagtggacatggcggagaatccaatttagcactcaagcgcgacgacgtgacgttgcttaggcaggaagtccaagatttgcaggcgtctctgaaagaggagaagtggtattcggaggaacttaagaaagaactggagaaatatcagggcctgcagcagcaagaagccaagcctgacggcttggtgactgacagctccgctgagttacagtctctggagcaacagctggaagaggctcagactgagaatttcaacatcaaacagatgaaggacttgtttgagcagaaagcagcccagcttgccacggagatcgccgacataaagtccaaatatgatgaagagcgatcattacgagaagccgcagagcagaaagtgacaaggctgacggaggagctgaataaagaggctacagtgattcaggacctcaagacagaactcttgcagagaccagggattgaagacgtcgcggtccttaaaaaagagctagtgcaggtccagacacttatggataatatgacgctagagcgcgaacgggaaagtgagaaactgaaggacgagtgtaagaaattgcagtctcagtacgcttcatccgaggccacgatctctcagctgagaagtgaactggctaaggggcctcaagaagtcgccgtgtacgtgcaggaactgcagaagctcaagtctagtgtcaatgaactcacgcaaaaaaatcagacccttacagaaaacctccttaaaaaagagcaggattacaccaaactggaggaaaagcacaatgaggagagcgtcagcaagaagaacattcaggcaacgcttcatcagaaagatctcgactgtcagcaacttcaatcacggctgtctgcctcggagaccagcctacatcgcatccacgttgagcttagcgagaaaggggaggccactcagaaactgaaggaggagctgtcagaggtggaaaccaaataccagcatcttaaggcagagtttaaacagctgcaacagcagagggaggagaaggaacagcacggactgcagcttcagtcagaaatcaatcagctgcactcgaagctactcgagacggagcgacagcttggcgaggcccacggcagactcaaggaacagcggcagctctcaagcgaaaaactgatggataaagagcaacaggtcgccgatctacagctgaagctcagtagactggaggagcaactgaaggagaaagtcaccaacagcaccgaattgcagcatcagcttgataaaaccaaacaacagcatcaggaacagcaagcgctgcagcaaagcacgaccgcgaaactgcgcgaggctcaaaatgatctcgagcaggtcttgcggcaaatcggggacaaggatcagaagattcagaatctcgaagctcttctccagaaatccaaggaaaacatatcgctgctggagaaggagcgcgaagatttgtacgctaagattcaggctggagaaggggagaccgcagtcctaaatcagctgcaggaaaaaaaccacacactgcaagagcaggttacgcaactcacagaaaaactcaagaaccagtctgagtcccacaagcaggcacaggagaacctgcacgaccaagtccaggaacagaaagcgcacttgagagctgcccaagaccgcgtcctttcactggagacaagcgtcaatgaactgaacagtcagctaaacgaatctaaagagaaagtctcccagttggatatccaaatcaaagccaaaacagaactgctgctttcagcggaggccgctaagaccgcccagagagccgacctgcagaatcacctggacactgcgcagaacgctctgcaagataagcagcaggaactaaacaagatcacgactcagctcgaccaagttacggcaaagctacaggataaacaggagcactgctctcagttggaatctcacctgaaggagtataaagaaaagtacctcagtctcgaacagaagacggaagagctggaagggcagatcaaaaaactcgaagcggactctctcgaggtgaaggcgtcgaaagaacaagcacttcaggaccttcaacagcagaggcagcttaatactgatctcgagttgagagcaactgagctctcaaaacaactggagatggaaaaagagattgtgagctccactaggctagatctacagaaaaagtccgaggctctcgagagtattaagcagaagctcaccaaacaagaagaagagaagaagatcctcaagcaagatttcgagacactgagccaggagaccaaaattcagcacgaggagctaaacaaccgcattcagacgacagtgacagaactgcagaaggtgaagatggagaaggaggccttgatgaccgagctgtctactgtgaaggataaattatctaaagtatccgattctctgaagaacagcaagtctgaattcgagaaagagaaccagaaaggcaaggccgctatcctcgacctggaaaagacatgcaaagagctgaaacatcagttacaggttcaaatggaaaataccctgaaagaacagaaagaactcaaaaaatccttggaaaaagagaaggaggcctctcaccagctgaaactggaactgaacagcatgcaggaacagctaatccaagcccagaacacgttaaaacagaacgagaaggaggaacagcaactacagggcaacattaatgagctcaaacagtcatccgaacagaagaaaaagcaaatcgaggccttgcaaggcgagctaaaaatagcagtcctgcaaaaaaccgagctcgaaaacaaacttcaacagcagctgactcaggccgctcaagagctagctgccgagaaggaaaagatttccgtcctccagaataattacgagaagtctcaggagacatttaagcaattacaatctgatttttatggaagggaatctgaactgctagccactcggcaggacttaaagtccgtcgaagaaaagctctctcttgcccaggaagatttaatctctaatagaaaccagatcggcaaccagaataagttgattcaagaattgaaaacagctaaagccacgctagaacaagattcagccaagaaggagcagcagctgcaagagcgctgtaaagctttacaggacatccagaaggaaaaaagcctgaaggagaaagagttggtgaatgaaaaaagcaaattggccgaaatagaggagatcaagtgcagacaagagaaggagattacaaagctgaatgaagaactcaagagccataagctcgaaagtattaaagagattactaacctcaaggatgccaaacaactgctcatccagcagaaactggaactccaaggcaaggctgacagtttaaaggctgctgtggagcaggagaagaggaatcaacaaatcctgaaggaccaggtgaagaaggaggaagaagaactgaagaaagagttcatcgaaaaagaagccaaactgcattcagaaataaaagagaaggaggtaggaatgaagaaacacgaagagaacgaggcaaagctcacaatgcagatcacagcccttaacgagaatttaggaactgttaaaaaggaatggcagagctcacagcgcagagtgtctgagttggagaaacaaactgacgatttgcgcggtgaaatagcggttctcgaggctaccgtccagaacaaccaggatgagaggcgcgctctgctggaacggtgcctgaaaggcgagggcgaaattgaaaagctgcagacaaaggtcctggaactccaacgcaagctggacaatacaacagccgctgtgcaggaactcggcagggaaaatcagtcgctgcagatcaagcacacacaggcccttaaccgcaagtgggccgaggacaatgaagtgcagaactgtatggcatgtggaaagggcttctctgtgaccgtacgtcggcatcattgtcggcagtgtggaaatatattctgtgccgagtgcagtgcaaagaacgcccttaccccaagtagtaagaaaccggtccgggtatgcgacgcctgttttaatgacctgcagggttag

SEQ ID NO: 139194 - DNA, 933 bp, Artificial Sequence
  derived and/or modified sequence
ctcaggcgggtggatcatgagacccccggaagggttggttcacaggggtcggacttggactctagtgccacccctatcaacactgtggacgtgaataatgaatcaagcagcgaggggttcatttgcccccagtgtatgaagagcctgggatctgcagatgagctgttcaagcactatgaagccgtccatgatgctggaaacgattccgggcacgggggtgaaagtaacctggctttaaagagagatgatgtcacactcctgagacaggaagtacaagatcttcaggcatcactcaaagaagagaagtggtacagtgaagagctcaaaaaggagctcgaaaagtatcaaggactgcaacaacaagaagccaagccggacgggctggtcacggatagctctgccgaacttcaaagccttgagcagcagctcgaggaggcccaaacagagaactttaacataaaacaaatgaaagacctcttcgagcagaaggctgcacagctcgccacagaaattgccgacataaagtctaaatacgatgaggagcgctccctgagagaagcagccgaacagaaagtgaccagactcacggaggaactcaataaagaagctaccgttatccaggacctgaaaacggaactactacagaggccgggtattgaggacgttgctgtgctcaagaaggagctggttcaggtccagacgctgatggataacatgaccctggaacgggagagggagagtgagaagctaaaagacgagtgtaaaaagctccaatcccagtacgcctccagcgaagccacaatctcccagttgagaagcgagctggccaagggtccacaagaggtcgccgtctacgttcaggagctccagaaactgaagtcgtcagtgaacgagttgacacaaaagaaccagaagaagaagaaaaaaaaatag

SEQ ID NO: 139195 - protein, 415 aa, Artificial Sequence
  derived and/or modified sequence
MSERRVVVDLPTSASSSMPLQRRRASFRGPRSSSSLESPPASRTNAMSGLVRAPGVYVGTAPSGCIGGLGARVTRRALGISSVFLQGLRSSGLATVPAPGLERDHGAVEDLGGCLVEYMAKVHALEQVSQELETQLRMHLESKATRSGNWGALRASWASSCQQVGEAVLENARLMLQTETIQAGADDFKERYENEQPFRKAAEEEINSLYKVIDEANLTKMDLESQIESLKEELGSLSRNYEEDVKLLHKQLAGCELEQMDAPIGTGLDDILETIRIQWERDVEKNRVEAGALLQAKQQAEVAHMSQTQEEKLAAALRVELHNTSCQVQSLQAETESLRALKRGLENTLHDAKHWHDMELQNLGAVVGRLEAELREIRAEAEQQQQERAHLLARKCQLQKDVASYHALLDREESG

SEQ ID NO: 139196 - DNA, 1248 bp, Artificial Sequence
  derived and/or modified sequence
atgtctgaacgacgggtggtagttgacctcccaacttctgcaagttcctccatgcccctacagcggcgccgcgcctcttttaggggcccgcggtcgagcagctctctggaaagcccccctgcctctcgtacgaacgcgatgtccggtcttgttcgcgcacctggggtttatgtcggcactgctccaagtggatgcattggaggcctcggcgccagggttacgagacgggccttaggcatcagctccgtcttcctgcaaggattgaggtcgagcggtttagcaacagtcccagcgcctggtctggaacgggaccatggggcagtcgaagacctgggaggatgcctggtcgaatacatggccaaggtacatgcactcgagcaggtttcccaggagcttgaaacccagctgaggatgcatttagaaagtaaggcaactcggagcggtaactggggcgcgctacgcgccagttgggcctcctcttgccagcaggttggagaggccgtactggaaaatgcgcgtctgatgctccagaccgaaacgatccaagccggtgcagacgactttaaggagcgctatgagaacgagcagcccttcaggaaagctgccgaggaagaaattaacagcctctacaaggtcatcgacgaggcgaacctgaccaaaatggacctcgaatcacagatagaatcgcttaaggaggagcttggaagcctgtcccggaactacgaagaagacgttaaacttcttcataagcagctcgccgggtgtgaactagagcaaatggacgccccgataggtaccgggctcgatgatattctggaaaccataagaattcaatgggagcgcgacgtggagaagaatagggtagaagccggcgctctgctccaagcaaagcaacaggctgaggtagcgcatatgtcgcaaacccaggaggaaaagctcgcagcggccctccgggtagaactgcacaacactagttgccaggttcagagtttgcaggctgagaccgagagcttacgtgccctgaaaaggggcttagaaaatacccttcacgatgctaaacactggcatgacatggagcttcagaacctgggcgcagtggtgggccgactcgaggccgaacttagagaaattcgcgccgaggccgagcagcagcagcaagagagagcgcacctgttagccaggaagtgccaactccagaaagatgtggcctcataccacgccttgctggacagagaggagtctgggtag

SEQ ID NO: 139197 - DNA, 1248 bp, Artificial Sequence
  derived and/or modified sequence
atgtctgagcggcgggtggtggtggacctgcccaccagcgccagcagctccatgcccctgcagaggagaagagccagcttccggggccccaggagcagcagcagcctggagagccccccagccagcaggaccaatgccatgagcggcctggtgcgggcccctggggtgtatgtgggcacagcccccagcggctgcatcggcggcctgggcgcccgggtgacccggcgggccctgggcatcagcagcgtcttcctgcagggcctgcggagcagcggcctggccaccgtgcctgcccctggcctggagcgggaccatggagctgtggaggacctgggcggctgcctggtggagtacatggccaaggtgcacgccctggagcaggtgtcccaggagctggagacccagctgaggatgcacctggagagcaaggccaccaggagcggcaactggggcgccctgcgggcctcctgggccagcagctgccagcaggtgggggaggccgtgctggagaatgcccggctgatgctgcagacagagaccatccaggccggggctgatgacttcaaggagagatatgaaaatgagcagcccttcaggaaggctgctgaggaggagatcaacagcctgtacaaggtgattgatgaggccaacctgaccaagatggacctggagagccagatcgagagcctgaaggaggagctgggcagcctgagcagaaattatgaagaagatgtgaagctgctgcacaagcagctggccggctgtgagctggagcagatggatgcccccatcggcaccggcctggatgacatcctggagaccatccgcatccagtgggagagagatgtggagaagaacagagtggaggccggggccctgctgcaggccaagcagcaggccgaggtggcccacatgagccagacccaggaggagaagctggccgccgccctgcgggtggagctgcacaacaccagctgccaggtgcagagcctgcaggccgagacagagagcctgcgggccctgaagaggggcctggagaacaccctgcatgatgccaagcactggcatgacatggagctgcagaacctgggcgctgtggtgggccgcctggaggccgagctgcgggagatccgggcagaggccgagcagcagcagcaggagcgggcccacctgctggccaggaagtgccagctgcagaaggatgtggccagctaccacgccctgctggaccgggaggagagcggctag

SEQ ID NO: 139198 - DNA, 1248 bp, Artificial Sequence
  derived and/or modified sequence
atgagcgagcggcgggtggtggtggacctgcccaccagcgccagctcctcaatgcctctccagaggcgaagggccagcttccgcggaccgaggtcatctagttccctcgaatctccacccgccagtaggacgaacgcaatgagcggactcgtccgggcgcctggagtttacgtggggaccgcccccagcgggtgtatcggcgggcttggggcgcgagtcacgcgccgcgccctcggaatctctagcgtatttctgcaaggtctcaggagttccggtctcgccacagtacccgcaccaggtctggagcgagaccacggagccgtagaggacttaggagggtgcctagtcgagtacatggccaaagtgcacgcgctggagcaggtgtctcaggagctggagactcagctcaggatgcatctggaatctaaagcaactcgaagcggtaactggggtgctctgagggccagttgggcctcttcttgtcagcaagtgggggaagccgtcctggaaaacgctcgactgatgttacagacggaaaccatccaggcgggcgccgacgacttcaaagaacgctatgaaaacgaacagccgttccggaaggcagcggaagaggaaatcaactcgctatataaagtgattgacgaagcgaatttaactaagatggacctcgaatcacagattgagagcctgaaggaagaactgggatcattgagcagaaactacgaggaagacgtcaaactgctgcacaagcagttagccggatgcgagctcgagcagatggacgccccaatcggaaccggcctggacgatatcctggaaactataagaatccaatgggagcgggacgtggaaaagaatcgcgttgaggccggcgcattgttgcaggctaaacagcaggccgaagttgctcacatgtctcagacccaggaggaaaaattggctgctgctctcagagtggagctacataacacctcttgccaggtgcagtccctacaagcggaaacagagagtctcagagccctgaagaggggccttgagaacaccctgcacgacgccaaacactggcatgatatggaactccaaaatctcggcgccgtggtcgggaggctcgaagctgaacttagggagattcgcgctgaggcggagcagcagcagcaggaacgggcccacctgctcgcccgcaaatgtcagctccagaaggacgttgcgtcttatcacgccctgcttgatcgggaggaatccggttag

SEQ ID NO: 139199 - DNA, 1248 bp, Artificial Sequence
  derived and/or modified sequence
atgtctgagagacgcgttgttgtcgacctgcctactagtgcatctagttccatgccgttacagcgcagacgggcaagttttcgtggcccacgctcctccagttcactcgaatccccacccgcatctcgaacaaatgctatgtccggattggttcgcgctccaggtgtgtacgtgggaactgccccttctggctgcattggcggattgggagcacgggttactcggagggccctcggaattagctcagttttcctgcagggcctcagaagctctgggctggcaacggtgcctgcacccggtctggagcgagaccatggggcagtggaagatctcggtgggtgtctggtggaatacatggccaaggtccacgcgctagagcaggtctcacaggaactggagactcagttgcgcatgcatctggagagtaaagccacaagaagcggtaactggggagccctgcgagcgtcctgggccagctcttgccagcaagtgggggaagcagtgctggagaatgcccgtctgatgttacagactgagactatccaagcaggggctgatgactttaaagagcgctacgaaaatgagcagcctttcaggaaggcagcagaggaagaaatcaatagcctgtacaaggtcatcgacgaagcgaaccttacaaagatggatctggagtctcagattgagagtctgaaagaagagcttggcagcctaagccggaactacgaagaagacgttaagttgctccacaaacagctagcgggttgcgagcttgagcagatggatgcaccaattgggaccggactggatgatatcctagaaactatacgtatccagtgggaaagggacgtggagaagaaccgggttgaggcaggtgctctactgcaggctaagcagcaagccgaagtcgcccacatgtcccagacccaggaggagaagctcgcagccgcactccgtgtggagctccacaataccagctgtcaagtacagagtctgcaggcggagacggagtccctgcgagcactaaaacgaggtctggagaacactctgcacgatgcaaaacactggcacgatatggagttgcagaaccttggggcagtggtgggtaggctcgaagcggagctgcgagagatcagagctgaagccgagcagcagcaacaggagagagcacacctcctcgctagaaagtgccagctgcagaaggacgtcgccagctaccacgccctgctcgaccgggaggagtcaggatag

SEQ ID NO: 139200 - DNA, 1558 bp, Artificial Sequence
  derived and/or modified sequence
cgtgaccaggccacagggatgctggggctgtaaaccaaaagccactggactctgtaaacccactgggcaccacagaggcagaaggggtgatgagtgagaggcgagtggtagtggacttgcccaccagtgccagctccagcatgcccctccagaggcgcagggcgtccttcagggggccacggtcatcatcctccctggagagccccccagcctccaggaccaatgccatgagtggccttgtccgagcacccggggtctatgtaggaacagcacccagtgggtgcataggtggcttgggtgcccgtgtgacccgccgggccctcggcatcagcagtgtcttccttcagggcctgcggagctcaggcctggccaccgtgccggctccaggtttggagagggaccatggtgctgttgaggacctagggggctgcctggtggaatatatggccaaagtgcacgcccttgagcaagtcagtcaggagctggaaacacaactgcggatgcacctggagagcaaagccacacgctcgggaaactggggtgccctacgggcttcctgggccagcagctgccagcaggtgggtgaggcagtcttggaaaatgcccggctcatgctgcagacagaaactatccaggccggagcagatgactttaaagagagatatgaaaatgagcagccatttcgaaaggcggcagaagaggaaattaactctctgtataaagtcattgatgaggctaatttgactaaaatggacctggagagtcaaatagaaagtctgaaagaagaacttggctctctatcaagaaactatgaagaggatgtgaagctgctgcacaaacagttggcagggtgtgagctggaacaaatggatgctcccattggcactggtctggacgacatccttgagacgatcagaattcagtgggagagagatgttgaaaagaaccgggtggaggcaggagccctgctccaagctaagcaacaggcggaggtggcccacatgtcccagacccaggaggagaagctggcagctgccctcagggtggagttacacaacacttcgtgccaagtccagagcctccaggctgagacagaatccttacgtgccctgaaacgaggcctggagaacaccttgcacgatgccaagcactggcatgacatggagctccagaacctgggcgctgtggtcggccggctggaggcggagctcagggaaatccgagcggaggcggagcagcagcaacaggagcgcgcgcatctgctggcccgcaagtgccagctgcagaaggacgtggcgtcctaccacgccctgctggacagggaggagagcggctgatggagaaacttcctctttttcatgaagaaaacacccttcctcaacagctgacccaagaagttgcttgaggagctttctcctgagctccagtccctgctggattccctggttaattcagcttgagctgaaaagcttcctggaagtggagaggatccttctgctttaatctgagtagtctgtagcttgagcaatctcccttgtcctccttcaaataaatgctt

SEQ ID NO: 139201 - DNA, 1248 bp, Artificial Sequence
  derived and/or modified sequence
atgagcgagagaagagtggtggtggacctgcccaccagcgccagcagcagcatgcccctgcagagaagaagagccagcttcagaggccccagaagcagcagcagcctggagagcccccccgccagcagaaccaacgccatgagcggcctggtgagagcccccggcgtgtacgtgggcaccgcccccagcggctgcatcggcggcctgggcgccagagtgaccagaagagccctgggcatcagcagcgtgttcctgcagggcctgagaagcagcggcctggccaccgtgcccgcccccggcctggagagagaccacggcgccgtggaggacctgggcggctgcctggtggagtacatggccaaggtgcacgccctggagcaggtgagccaggagctggagacccagctgagaatgcacctggagagcaaggccaccagaagcggcaactggggcgccctgagagccagctgggccagcagctgccagcaggtgggcgaggccgtgctggagaacgccagactgatgctgcagaccgagaccatccaggccggcgccgacgacttcaaggagagatacgagaacgagcagcccttcagaaaggccgccgaggaggagatcaacagcctgtacaaggtgatcgacgaggccaacctgaccaagatggacctggagagccagatcgagagcctgaaggaggagctgggcagcctgagcagaaactacgaggaggacgtgaagctgctgcacaagcagctggccggctgcgagctggagcagatggacgcccccatcggcaccggcctggacgacatcctggagaccatcagaatccagtgggagagagacgtggagaagaacagagtggaggccggcgccctgctgcaggccaagcagcaggccgaggtggcccacatgagccagacccaggaggagaagctggccgccgccctgagagtggagctgcacaacaccagctgccaggtgcagagcctgcaggccgagaccgagagcctgagagccctgaagagaggcctggagaacaccctgcacgacgccaagcactggcacgacatggagctgcagaacctgggcgccgtggtgggcagactggaggccgagctgagagagatcagagccgaggccgagcagcagcagcaggagagagcccacctgctggccagaaagtgccagctgcagaaggacgtggccagctaccacgccctgctggacagagaggagagcggctag

SEQ ID NO: 139202 - protein, 1586 aa, Artificial Sequence
  derived and/or modified sequence
MGDVKALLFVAAARARRLGGAAASESLAVSEAFCRVRSCQPKKCAGPQRCLNPVPAVPSPSPSVRKRQVSLNWQPLTLQEARALLKRRRPRGPGGRGLLRRRPPQRAPAGKAPVLCPLICHNGGVCVKPDRCLCPPDFAGKFCQLHSSGARPPAPAVPGLTRSVYTMPLANHRDDEHGVASMVSVHVEHPQEASVVVHQVERVSGPWEEADAEAVARAEAAARAEAAAPYTVLAQSAPREDGYSDASGFGYCFRELRGGECASPLPGLRTQEVCCRGAGLAWGVHDCQLCSERLGNSERVSAPDGPCPTGFERVNGSCEDVDECATGGRCQHGECANTRGGYTCVCPDGFLLDSSRSSCISQHVISEAKGPCFRVLRDGGCSLPILRNITKQICCCSRVGKAWGRGCQLCPPFGSEGFREICPAGPGYHYSASDLRYNTRPLGQEPPRVSLSQPRTLPATSRPSAGFLPTHRLEPRPEPRPDPRPGPELPLPSIPAWTGPEIPESGPSSGMCQRNPQVCGPGRCISRPSGYTCACDSGFRLSPQGTRCIDVDECRRVPPPCAPGRCENSPGSFRCVCGPGFRAGPRAAECLDVDECHRVPPPCDLGRCENTPGSFLCVCPAGYQAAPHGASCQDVDECTQSPGLCGRGACKNLPGSFRCVCPAGFRGSACEEDVDECAQEPPPCGPGRCDNTAGSFHCACPAGFRSRGPGAPCQDVDECARSPPPCTYGRCENTEGSFQCVCPMGFQPNTAGSECEDVDECENHLACPGQECVNSPGSFQCRTCPSGHHLHRGRCTDVDECSSGAPPCGPHGHCTNTEGSFRCSCAPGYRAPSGRPGPCADVNECLEGDFCFPHGECLNTDGSFACTCAPGYRPGPRGASCLDVDECSEEDLCQSGICTNTDGSFECICPPGHRAGPDLASCLDVDECRERGPALCGSQRCENSPGSYRCVRDCDPGYHAGPEGTCDDVDECQEYGPEICGAQRCENTPGSYRCTPACDPGYQPTPGGGCQDVDECRNRSFCGAHAVCQNLPGSFQCLCDQYEGARDGRHCVDVNECETLQGVCGAALCENVEGSFLCVCPNSPEEFDPMTGRCVPPRTSAGTFPGSQPQAPASPVLPARPPPPPLPRRPSTPRQGPVGSGRRECYFDTAAPDACDNILARNVTWQECCCTVGEGWGSGCRIQQCPGTETAEYQSLCPHGRGYLAPSGDLSLRRDVDECQLFRDQVCKSGVCVNTAPGYSCYCSNGYYYHTQRLECIDNDECADEEPACEGGRCVNTVGSYHCTCEPPLVLDGSQRRCVSNESQSLDDNLGVCWQEVGADLVCSHPRLDRQATYTECCCLYGEAWGMDCALCPAQDSDDFEALCNVLRPPAYSPPRPGGFGLPYEYGPDLGPPYQGLPYGPELYPPPALPYDPYPPPPGPFARREAPYGAPRFDMPDFEDDGGPYGESEAPAPPGPGTRWPYRSRDTRRSFPEPEEPPEGGSYAGSLAEPYEELEAEECGILDGCTNGRCVRVPEGFTCRCFDGYRLDMTRMACVDINECDEAEAASPLCVNARCLNTDGSFRCICRPGFAPTHQPHHCAPARPRA

SEQ ID NO: 139203 - protein, 212 aa, Artificial Sequence
  derived and/or modified sequence
MWTSATACRRRVTSGAARTRQAASCACAPPGTRLHRTEPAARMWMSVPEAPHPAPTAGVRTQKAASSVSAPWASNPTLLAPNVDECENHLACPGQECVNSPGSFQCRTCPSGHHLHRGRCTDVDECSSGAPPCGPHGHCTNTEGSFRCSCAPGYRAPSGRPGPCADVNECLEGDFCFPHGECLNTDGSFACTCAPGYRPGPRGASCLGSYPG

SEQ ID NO: 139204 - protein, 294 aa, Artificial Sequence
  derived and/or modified sequence
MASASGAMAKHEQILVLDPPTDLKFKGPFTDVVTTNLKLRNPSDRKVCFKVKTTAPRRYCVRPNSGIIDPGSTVTVSVMLQPFDYDPNEKSKHKFMVQTIFAPPNTSDMEAVWKEAKPDELMDSKLRCVFEMPNENDKLGITPPGNAPTVTSMSSINNTVATPASYHTKDDPRGLSVLKQEKQKNDMEPSKAVPLNASKQDGPMPKPHSVSLNDTETRKLMEECKRLQGEMMKLSEENRHLRDEGLRLRKVAHSDKPGSTSTASFRDNVTSPLPSLLVVIAAIFIGFFLGKFIL

SEQ ID NO: 139205 - DNA, 885 bp, Artificial Sequence
  derived and/or modified sequence
atggccagcgccagcggcgccatggccaagcacgagcagatcctggtgctggacccccccaccgacctgaagttcaagggccccttcaccgacgtggtgaccaccaacctgaagctgagaaaccccagcgacagaaaggtgtgcttcaaggtgaagaccaccgcccccagaagatactgcgtgagacccaacagcggcatcatcgaccccggcagcaccgtgaccgtgagcgtgatgctgcagcccttcgactacgaccccaacgagaagagcaagcacaagttcatggtgcagaccatcttcgccccccccaacaccagcgacatggaggccgtgtggaaggaggccaagcccgacgagctgatggacagcaagctgagatgcgtgttcgagatgcccaacgagaacgacaagctgggcatcaccccccccggcaacgcccccaccgtgaccagcatgagcagcatcaacaacaccgtggccacccccgccagctaccacaccaaggacgaccccagaggcctgagcgtgctgaagcaggagaagcagaagaacgacatggagcccagcaaggccgtgcccctgaacgccagcaagcaggacggccccatgcccaagccccacagcgtgagcctgaacgacaccgagaccagaaagctgatggaggagtgcaagagactgcagggcgagatgatgaagctgagcgaggagaacagacacctgagagacgagggcctgagactgagaaaggtggcccacagcgacaagcccggcagcaccagcaccgccagcttcagagacaacgtgaccagccccctgcccagcctgctggtggtgatcgccgccatcttcatcggcttcttcctgggcaagttcatcctgtag

SEQ ID NO: 139206 - DNA, 885 bp, Artificial Sequence
  derived and/or modified sequence
atggcctcagctagtggcgcaatggcaaagcatgagcaaatcctagtcttggacccgccaactgacttgaagttcaaaggaccttttactgatgtcgttactaccaacctgaagctccggaacccgtcagataggaaagtgtgctttaaggtgaaaaccacggctccaagacggtactgtgtcaggcccaactctggcatcattgaccctggcagtacagtgactgttagcgtgatgctacagcccttcgattatgaccccaatgagaaatctaagcacaaattcatggtgcagaccatcttcgcacctccaaacacgagtgacatggaagccgtgtggaaggaggctaaacccgacgaactgatggatagcaaactccggtgcgtatttgagatgcctaatgagaacgacaaactgggaatcactccacctggaaatgctcctaccgtcacaagtatgtcgagtattaacaacacagtggcgacccccgcttcttaccataccaaggatgatccccggggactgagtgttcttaagcaggagaaacaaaagaacgatatggagccttccaaggctgtccctctgaatgcctcaaagcaggacggacctatgcccaaaccacacagtgtgagcctaaatgacaccgagacacgcaagctgatggaggaatgtaaaagactgcaaggagagatgatgaaactgtccgaggagaacaggcacctcagagatgaaggccttcggctccggaaagtcgcgcactcagacaagccaggctccacgtcgaccgccagcttcagagataacgtcacctcccctcttcccagccttctggtggttatcgcagccatcttcattggcttttttctcggcaaattcattttatag

SEQ ID NO: 139207 - DNA, 885 bp, Artificial Sequence
  derived and/or modified sequence
atggccagcgccagcggggccatggccaagcatgagcagatcctggtgctggaccccccaacagacctgaagttcaagggccccttcacagatgtggtgaccaccaacctgaagctgaggaaccccagcgacaggaaggtgtgcttcaaggtgaagaccacagccccccggcgctactgtgtgcggcccaacagcggcatcatcgaccccggcagcacagtgacagtgtctgtgatgctgcagccctttgattatgaccccaatgagaagagcaagcacaagttcatggtgcagaccatctttgccccacccaacaccagtgacatggaggccgtgtggaaggaggccaagccagatgagctgatggacagcaagctgcgctgtgtgtttgagatgcccaatgaaaatgacaagctgggcatcaccccacctggaaatgcccccaccgtgacctccatgagcagcatcaacaacacagtggccaccccagccagctaccacaccaaggatgacccccggggcctgtctgtgctgaagcaggagaagcagaagaatgacatggagcccagcaaggctgtgcccctgaatgccagcaagcaggacggccccatgcccaagccccacagcgtgtccctgaatgacacagagaccaggaagctgatggaggagtgcaagaggctgcagggcgagatgatgaagctgtctgaagaaaatagacacctgagagatgagggcctgcggctgaggaaggtggcccacagcgacaagccaggcagcaccagcacagccagcttccgggacaacgtgaccagccccctgcccagcctgctggtggtgattgctgccatcttcatcggcttcttcctgggcaagttcatcctgtag

SEQ ID NO: 139208 - DNA, 885 bp, Artificial Sequence
  derived and/or modified sequence
atggccagcgccagcggcgccatggccaagcacgagcagatcctggtgctggatcccccgaccgatttgaagttcaaaggccccttcactgatgtggttactacaaatttgaagctccgtaacccttcggacaggaaggtctgttttaaggtgaaaacgacagcacctagacggtattgcgtcagaccaaactcaggtatcattgacccgggatccaccgtgaccgtctcagtgatgttgcagccttttgattacgaccctaatgagaagtccaagcacaaattcatggtgcaaacaatctttgcgcccccaaatactagtgacatggaggcagtgtggaaagaagcaaagccggatgaactgatggacagcaagttaagatgcgtattcgaaatgccaaacgaaaacgataaacttgggataactcccccggggaacgctccgaccgtgacttctatgtccagcataaataacactgttgcaacacctgcatcctaccacaccaaggatgaccctagaggcctctccgtcctgaagcaagagaagcagaagaacgatatggagccatctaaagcagtgccattgaatgcctccaagcaggacggtccaatgcccaagccgcactccgtttcattgaatgatactgaaactagaaaactcatggaagagtgcaaaaggttgcagggcgagatgatgaaattatcggaagaaaatcgacatcttcgggacgagggtttacggctccgaaaggtcgcgcactccgataagcccggttcaacgtctacagcaagcttcagagacaacgtcacttcccctctaccctccctgcttgttgttattgccgcaattttcatcggctttttcctggggaagtttattctctag

SEQ ID NO: 139209 - DNA, 885 bp, Artificial Sequence
  derived and/or modified sequence
atggcaagcgcaagcggtgcaatggccaagcacgaacaaattctggtactagatccacccaccgatttgaaattcaaaggaccttttactgacgtcgttaccactaatctgaaactgaggaacccgagtgaccgcaaggtgtgttttaaagtcaaaactacagccccacgtcgctattgcgtccgtcccaactctggtatcattgatcccggaagcaccgtgacggtttctgtgatgctgcagccatttgactacgacccaaatgagaagtccaagcacaagtttatggtgcagacaatctttgctcctcccaatacgagtgacatggaagcagtgtggaaggaggcaaagccagatgagctgatggacagcaaactgcgctgcgtgtttgagatgcctaacgaaaatgacaagctgggcattacccctccgggtaatgcacccactgttacaagtatgtcttctatcaataacaccgtggctacccctgctagctatcacaccaaagatgacccacgcggactaagcgtgttaaagcaagaaaaacaaaagaatgacatggaaccatcaaaagccgtccctttgaatgcgtcgaagcaggacggacccatgccaaaaccacatagtgtttcactaaacgatacagagacaaggaagctcatggaagagtgtaaacgactccagggcgaaatgatgaaactaagtgaagagaaccggcaccttcgtgatgagggcctccgactgcggaaagtcgcacatagcgacaaacctggaagcacctccacggcatcgtttagggacaacgtgacttcccctctgccctccttgttggtggtgattgcagccattttcattgggttttttctggggaagttcattctgtag

SEQ ID NO: 139210 - DNA, 1729 bp, Artificial Sequence
  derived and/or modified sequence
tcacgtgggtcgccgaggctcgcaagtgcgcgtggccgtggcggctggtgtggggttgagtcagttgtgggacccggagctgctgacccagcgggtggcccaccgaaccggtgacacagcggcaggcgttagggctcgggagccgcgagcctggcctcgtcctagagctcggccgagccgtcgccgccgtcgtcccccgcccccagtcagcaaaccgccgccgcgggcgcgcccccgctctgcgctgtctctccgatggcgtccgcctcaggggccatggcgaagcacgagcagatcctggtcctcgatccgcccacagacctcaaattcaaaggccccttcacagatgtagtcactacaaatcttaaattgcgaaatccatcggatagaaaagtgtgtttcaaagtgaagactacagcacctcgccggtactgtgtgaggcccaacagtggaattattgacccagggtcaactgtgactgtttcagtaatgctacagccctttgactatgatccgaatgaaaagagtaaacacaagtttatggtacagacaatttttgctccaccaaacacttcagatatggaagctgtgtggaaagaggcaaaacctgatgaattaatggattccaaattgagatgcgtatttgaaatgcccaatgaaaatgataaattgggtataactccaccagggaatgctccgactgtcacttcaatgagcagcatcaacaacacagttgcaacacctgccagttatcacacgaaggatgaccccaggggactcagtgtgttgaaacaggagaaacagaagaatgatatggaacctagcaaagctgttccactgaatgcatctaagcaagatggacctatgccaaaaccacacagtgtttcacttaatgataccgaaacaaggaaactaatggaagagtgtaaaagacttcagggagaaatgatgaagctatcagaagaaaatcggcacctgagagatgaaggtttaaggctcagaaaggtagcacattcggataaacctggatcaacctcaactgcatccttcagagataatgtcaccagtcctcttccttcacttcttgttgtaattgcagccattttcattggattctttctagggaaattcatcttgtagagtgaagcatgcagagtgctgtttctttttttttttttctcttgaccagaaaaagatttgtttacctaccatttcattggtagtatggcccacggtgaccatttttttgtgtgtacagcgtcatataggctttgcctttaatgatctcttacggttagaaaacacaataaaaacaaactgttcggctactggacaggttgtatattaccagatcatcactagcagatgtcagttgcacattgagtcctttatgaaattcataaataaagaattgttctttctttgtggttttaataagagttcaagaattgttcagagtcttgtaaatgttattttaataatccctttaaattttatctgttgctgttacctcttgaaatatgatttatttagattgctaatcccactcattcaggaaatgccaagaggtattccttggggaaatggtgcctcttacagtgtaaatttttcctcctttacctttgctaatatcatggcagaatttttcttatcccttgtgaggcagttgttgactgagtttttcatccttacaatcctgtcccatggtatttaacataaaaaaaaataa

SEQ ID NO: 139211 - protein, 671 aa, Artificial Sequence
  derived and/or modified sequence
MQFVSTRPQPQQLGIQGLGLDSGSWSWAQALPPEEVCHQEPALRGEMAEGMPPMQAQEWDMDARRPMPFQFPPFPDRAPVFPDRMMREPQLPTAEISLWTVVAAIQAVERKVDAQASQLLNLEGRTGTAEKKLADCEKTAVEFGNHMESKWAVLGTLLQEYGLLQRRLENLENLLRNRNFWVLRLPPGSKGEAPKVPVTFVDIAVYFSEDEWKNLDEWQKELYNNLVKENYKTLMSLDAEGSVPKPDAPVQAEPREEPCVWEQRHPEEREIPMDPEAGAEPLVPAQDASSQVKREDTLCVRGQRGLEERAIPTESITDSPISAQDLLSRIKQEEHQCVWDQQDLADRDIPTDPNSESLISAHDILSWIKQEEQPYPWGPRDSMDGELGLDSGPSDSLLMVKNPPPAPPQPQPQPQPPQPQLQSQPQPQSLPPIAVAENPGGPPSRGLLDDGFQVLPGERGSGEAPPGGDRSTGGGGGDGGGGGGGAEAGTGAGGGCGSCCPGGLRRSLLLHGARSKPYSCPECGKSFGVRKSLIIHHRSHTKERPYECAECEKSFNCHSGLIRHQMTHRGERPYKCSECEKTYSRKEHLQNHQRLHTGERPFQCALCGKSFIRKQNLLKHQRIHTGERPYTCGECGKSFRYKESLKDHLRVHSGGPGPGAPRQLPPPPERD

SEQ ID NO: 139212 - DNA, 3737 bp, Artificial Sequence
  derived and/or modified sequence
acccacgcgtccggccgccgaaggggactgtttgctcctacgggctgtagatggagctgtccggccccggagagggggaaggcgcctggaaaacgttcttcttctccctggccgacccgagcggggaacagcactcccaggatgcagtttgtgtcaacacggccgcagcctcagcagctgggcatccagggcctggggctggacagcgggagctggagctgggcccaggctctgcccccggagcaggtctgccaccaggagccggcgctgcgcggggaaatggccgagggaatgccgcccatgcaggctcaagaatgggacatggacgcccggcggccaatgccttttcagttcccaccctttccagatagggcacctgtcttccccgaccgcatgatgcgagagccccagttgcccacagcagagatctcactctggactgtggtggctgccattcaggctgtggagaggaaggtggatgcccaggccagccagctgctgaacctggaggggcgcacggggacagccgagaagaagctggccgactgtgaaaagacggccgtggaatttgggaaccacatggagagcaagtgggccgtgctggggaccctgctgcaggagtacgggctgctgcagaggcggctggagaacttggagaacttgctgcgcaacaggaacttctgggtcctgcggctgcccccgggcagcaagggggaggcccccaaggttccagtgacttttgtcgacattgctgtgtacttctccgaagacgagtggaagaacttggacgaatggcagaaggagctttataacaaccttgttaaggagaactacaaaaccctcatgtccctggacgcggagggctcagtccccaagccagatgctccagtccaggctgagcccagggaagaaccttgtgtgtgggagcagcgccaccccgaagagagagaaatcccaatggatcccgaagcaggagcagagcccctggtgcctgcgcaggatgcgtcctcccaggtgaagcgtgaggacaccctgtgtgtccggggtcagcggggcctggaggaaagagccatccctacggaatccattaccgactccccaatttctgcccaggacctcttgtcccggattaaacaggaggagcatcagtgcgtgtgggatcagcaggatttggcagacagagatattcccacggatcccaattcagagtctctcatctcagcacatgacattttgtcatggatcaagcaggaggagcagccatacccatggggaccacgcgactcaatggacggagagcttggattagactctggccctagtgacagcctgctgatggtgaagaacccacccccggccccgccacagccccagccccagcgccagccaccgcagccgcagctgcagtcgcagccccagccccagagcctgccccccatcgcggtggccgagaacccgggcggccccccgagccgagggctgctggacgacggtttccaggtgctgcccggggagcgtggctccggcgaggcgccgccgggtggggaccgcagcaccgggggcggcgggggcgatgggggcggtgggggcggcggcgcggaggcggggacgggggcaggcggcggctgtggcagctgctgccctggcgggctgcggcggagcctcctcctgcacggcgcccgcagcaagccctactcgtgccccgagtgcggcaagagcttcggcgtgcgcaagagcctcatcatccaccaccgcagccacaccaaggagcggccctacgagtgcgctgagtgcgagaagagcttcaactgccactcgggcctcatccgccaccagatgacgcaccgcggcgagcggccctacaagtgctcggagtgcgagaagacctacagccgtaaggagcacctgcagaaccaccagcggctgcacacgggcgagcggcctttccaatgtgcactgtgcggcaagagcttcatccgcaagcagaacctgctcaagcaccagcgcatccacacgggcgagcgcccctacacgtgcggcgagtgcggcaagagcttccgctacaaggagtcgctcaaggaccacctgcgcgtgcacagcggcggcccgggccccggcgccccacggcagctcccgccgcctcctgagcgagactagggctgggctgggggagggcagggccggacggagtggatcgggggcggcctgagcaccaaccaccttgccgggtgtcctcagccaccgtctggaaatcggcaacaggcattgcactccggttgggggtcccccagggtggggcagggatcccccagatctgtctggtctgaatggacgcccagctcatctagggtggacccagctgctggggaagagccagggggaccgcgaggagccgagcgtcctcgggcaccgccctcacacctcctcgagtgccctgggaccactgggccacagatggtcatcaggggaagccaccagggagtcccgaagcccttctgagatcaggaaatcaggtcccaaggttaggagacgccctgaaaaaaagtgaaggccgagggatgtgctaagggtaacaccttcatgatgacaacactgcctcgcgtttcaatagcgctttatacttttttaagtgttttctatccgttatccatttcacccttggcctatccctctcagataggtggggtaggattttcctggtgaccgagtaaagtgagaggcaggtgagacggttcacccaatcacacgggaaggggcgcgcgctgcccaaccgcgctctccgcctacctcgctgctcgggaagctgctggcctggccctcctggtctctcttcctttctggtctctcttcctttccttgctctcacccacggataaaaccagaagcgacaggaggccagctcctggggttcctgggaccgggaacagattggctacggaacgccccaggttgtacattcagagggctctttctccatgggagctcctggtgccgccttcggccccagcctgtccccagcccctcaatctggtgcagcagcatcttgtcactgcacaacagtggcctggtcccccacaggcagttagggccccaggtcagacctcaccatgatgatttgttccagttctcccagggcagaggggcgagggagaggcttttgctgtgagagtagccgtcacgtgtctcttcccagcagcgccgggcaagtgggtgctagagtctgagcctcaggctctcctgccctgggcctcccaattggtgctatctgttactgcccgtgctcacggacatggatacagaccctgctgtgctccacaccctgcaggcgcctcgggaagcgcccaaaggattccccttcacgttggtgcacctgctccatagctccgggcgctgcgtcccgaggggccacagtctccatttcagcgtcttgcatggcctggcaccgggtggggtggtatgcccccttgtttgtgtcaaaaatgactttccctgcccttgccgtgggtccggcgttcctcccagccgggatcacagtgggcagccggcacccggcaccactttggcgagcgtcctgcttccgccctcgccctcatctacgctgctccgctttcctcagacccctttttgccgtgcaaaggaattcttgacattaaataaaaggtatccagattgcagactgcatgttcacagagctgggggttctccagcttgcctacagtaaagcctcaatgaactgg

SEQ ID NO: 139213 - DNA, 2016 bp, Artificial Sequence
  derived and/or modified sequence
atgcagttcgtgagcaccagaccccagccccagcagctgggcatccagggcctgggcctggacagcggcagctggagctgggcccaggccctgccccccgaggaggtgtgccaccaggagcccgccctgagaggcgagatggccgagggcatgccccccatgcaggcccaggagtgggacatggacgccagaagacccatgcccttccagttcccccccttccccgacagagcccccgtgttccccgacagaatgatgagagagccccagctgcccaccgccgagatcagcctgtggaccgtggtggccgccatccaggccgtggagagaaaggtggacgcccaggccagccagctgctgaacctggagggcagaaccggcaccgccgagaagaagctggccgactgcgagaagaccgccgtggagttcggcaaccacatggagagcaagtgggccgtgctgggcaccctgctgcaggagtacggcctgctgcagagaagactggagaacctggagaacctgctgagaaacagaaacttctgggtgctgagactgccccccggcagcaagggcgaggcccccaaggtgcccgtgaccttcgtggacatcgccgtgtacttcagcgaggacgagtggaagaacctggacgagtggcagaaggagctgtacaacaacctggtgaaggagaactacaagaccctgatgagcctggacgccgagggcagcgtgcccaagcccgacgcccccgtgcaggccgagcccagagaggagccctgcgtgtgggagcagagacaccccgaggagagagagatccccatggaccccgaggccggcgccgagcccctggtgcccgcccaggacgccagcagccaggtgaagagagaggacaccctgtgcgtgagaggccagagaggcctggaggagagagccatccccaccgagagcatcaccgacagccccatcagcgcccaggacctgctgagcagaatcaagcaggaggagcaccagtgcgtgtgggaccagcaggacctggccgacagagacatccccaccgaccccaacagcgagagcctgatcagcgcccacgacatcctgagctggatcaagcaggaggagcagccctacccctggggccccagagacagcatggacggcgagctgggcctggacagcggccccagcgacagcctgctgatggtgaagaaccccccccccgcccccccccagccccagccccagccccagcccccccagccccagctgcagagccagccccagccccagagcctgccccccatcgccgtggccgagaaccccggcggcccccccagcagaggcctgctggacgacggcttccaggtgctgcccggcgagagaggcagcggcgaggccccccccggcggcgacagaagcaccggcggcggcggcggcgacggcggcggcggcggcggcggcgccgaggccggcaccggcgccggcggcggctgcggcagctgctgccccggcggcctgagaagaagcctgctgctgcacggcgccagaagcaagccctacagctgccccgagtgcggcaagagcttcggcgtgagaaagagcctgatcatccaccacagaagccacaccaaggagagaccctacgagtgcgccgagtgcgagaagagcttcaactgccacagcggcctgatcagacaccagatgacccacagaggcgagagaccctacaagtgcagcgagtgcgagaagacctacagcagaaaggagcacctgcagaaccaccagagactgcacaccggcgagagacccttccagtgcgccctgtgcggcaagagcttcatcagaaagcagaacctgctgaagcaccagagaatccacaccggcgagagaccctacacctgcggcgagtgcggcaagagcttcagatacaaggagagcctgaaggaccacctgagagtgcacagcggcggccccggccccggcgcccccagacagctgccccccccccccgagagagactag

SEQ ID NO: 139214 - DNA, 2016 bp, Artificial Sequence
  derived and/or modified sequence
atgcagtttgtgagcactcgaccacagccccaacagctgggtatccagggcctgggattagacagcgggtcttggtcatgggcccaagcgctcccacccgaagaagtgtgtcaccaggagccagcactgcggggcgagatggcagaaggtatgcctccgatgcaggcgcaggaatgggacatggacgcccgtagacctatgccctttcagttccctcccttccctgacagggcgcccgtattccctgataggatgatgcgcgagccccaacttccaaccgcggagatctctctttggacggttgtggccgcaatccaggcggttgagcggaaagtagatgctcaagcaagtcagctcctgaatcttgagggccgaaccggcactgccgagaaaaaattggcagactgcgaaaaaactgctgtggagttcgggaatcacatggaatccaagtgggcggtactgggcacgctgcttcaggagtacggcctgctccagcgcaggctggaaaatctggagaacctactgaggaaccgcaatttttgggtacttcggttacccccggggtcaaagggcgaagctccgaaggtgcctgtaacctttgtggatattgcggtatatttcagcgaggatgagtggaagaatctggacgagtggcaaaaagaactctacaacaatcttgtgaaagagaattacaaaaccctgatgtccctggatgccgaaggctctgtaccgaagcccgatgctccagtgcaggccgaacctcgtgaagagccctgtgtgtgggagcagcggcatccagaagagcgagaaattcccatggacccagaagctggagcagaaccactcgtgcctgcccaggacgcttctagtcaggtaaagcgcgaagatacgctctgtgtacggggacagagagggctggaggagcgagcgattcccacagaatctataactgatagcccaatttccgcccaggacctgctctctcgaatcaagcaggaagagcaccaatgcgtttgggaccaacaggatctcgcagacagagacattccaactgatcccaacagtgaatctctgatcagcgcacacgatatcctgtcatggatcaaacaggaggaacagccatatccttggggcccaagagatagtatggatggcgagctgggtttggatagtgggccttcggactctctcctgatggtaaagaacccccctcctgcccccccgcaaccgcagcctcagccacagcctccacagccccaactgcagagtcaaccccagccccaatcgcttccacctatagccgtggctgagaatccaggaggcccaccttctcggggcctcttggacgatggattccaggttctgcccggtgaaaggggcagcggcgaagcgccccccggtggagacaggtccacaggcgggggagggggcgacggaggcggcggcggaggaggtgccgaggccggaacaggggctggaggtggttgcggctcatgttgtccggggggcctgcgaaggtctttgctgctgcatggtgctcgtagcaaaccctactcatgtccagagtgtgggaaatcattcggggtccggaagtcactcatcattcatcaccgctcccacacaaaggaacgcccctacgagtgtgcagagtgtgagaagtcatttaattgtcactccggcctcatcagacaccagatgacacataggggagagagaccctataagtgcagcgagtgtgagaaaacctacagccggaaagaacacctgcagaatcatcagcggctgcatactggggaacgcccgttccagtgcgccttatgtggcaagtctttcattcgcaaacaaaacctcctgaagcaccaacgcattcacacaggtgagcgcccatacacctgcggtgagtgcgggaagagctttagatacaaggaatccctcaaagatcatcttagagtgcacagcggaggtcctgggcccggggcacccagacagctgcccccccccccagagcgggattag

SEQ ID NO: 139215 - DNA, 2016 bp, Artificial Sequence
  derived and/or modified sequence
atgcagtttgtgtccacccggccccagccccagcagctgggcatccagggcctgggcctggacagcggctcctggagctgggcccaggccctgcccccagaggaggtgtgccaccaggagcccgccctgcggggggagatggccgagggcatgccacccatgcaggcccaggagtgggacatggatgcccggcggcccatgcccttccagttcccccccttcccagaccgggcccctgtgtttcctgacaggatgatgagggagccccagctgcccacagctgagatcagcctgtggacagtggtggccgccatccaggccgtggagaggaaggtggatgcccaggccagccagctgctgaacctggagggccgcactggaacagctgagaagaagctggccgactgtgagaagacagctgtggagtttggaaaccacatggagagcaagtgggccgtgctgggcaccctgctgcaggagtatggcctgctgcagaggcggctggagaacctggagaacctgctgaggaacagaaacttctgggtgctgcggctgcccccaggcagcaagggggaggcccccaaggtgcctgtgacctttgtggacattgctgtgtacttctctgaagatgagtggaagaacctggatgagtggcagaaggagctgtacaacaacctggtgaaggagaactacaagaccctgatgagcctggatgctgagggctctgtgcccaagccagatgcccctgtgcaggccgagccccgggaggagccctgtgtgtgggagcagaggcaccctgaggagcgggagatccccatggaccctgaggccggggctgagcccctggtgcctgcccaggatgccagcagccaggtgaagcgggaggacaccctgtgtgtgcggggccagaggggcctggaggagcgggccatccccacagagagcatcacagacagccccatcagcgcccaggacctgctgagccgcatcaagcaggaggagcaccagtgtgtgtgggaccagcaggacctggccgaccgggacatccccacagaccccaacagcgagagcctcatcagcgcccatgacatcctgtcctggatcaagcaggaggagcagccctacccctggggcccccgggacagcatggatggagagctgggcctggacagcggccccagcgacagcctgctgatggtgaagaaccccccaccagccccaccccagccccagccccagccccagcccccccagccccagctgcagagccagccccagccccagagcctgccccccatcgctgtggctgaaaatcctgggggcccccccagccggggcctgctggatgatggcttccaggtgctgcccggggagcggggcagcggggaggcccctcctggaggagacaggagcactggaggcggcggcggagatggcggcggcggcggcggcggcgctgaggccggcaccggggccggcggcggctgcggcagctgctgccctgggggcctgcggcgcagcctgctgctgcatggagcccggagcaagccctacagctgcccagaatgtgggaagagctttggagtgaggaagagcctcatcatccaccacaggagccacaccaaggagcggccctatgaatgtgccgagtgtgagaagagcttcaactgccacagcggcctcatccgccaccagatgacccacagaggagagcggccctacaagtgcagtgaatgtgagaagacctacagcaggaaggagcacctgcagaaccaccagaggctgcacactggagagcggcccttccagtgtgccctgtgtgggaagagcttcatcaggaagcagaacctgctgaagcaccagaggatccacactggagagcggccctacacctgtggggagtgtgggaagagcttccgctacaaggagagcctgaaggaccacctgcgggtgcacagcggcggccctggccctggggccccccggcagctgcccccacctcctgagcgggactag

SEQ ID NO: 139216 - DNA, 2016 bp, Artificial Sequence
  derived and/or modified sequence
atgcagttcgtgagcacccggccccagccccagcagctgggcatccaaggcctggggctggactcaggctcatggtcgtgggcccaggccctgccaccagaagaggtctgccatcaggagcctgctctgcggggtgaaatggccgaaggcatgccccctatgcaagcccaagagtgggacatggatgctagacgcccaatgccctttcagttccctccgttcccggaccgcgcaccagtctttcccgatcggatgatgcgcgaacctcaactgcccaccgccgaaatttccctgtggactgtagtcgcggctatccaggcagttgaacgtaaagtggatgctcaggccagccaactgctaaatctggagggccgcacaggaactgctgagaaaaagcttgccgattgcgagaagaccgcggttgagttcggcaaccacatggagtcaaaatgggctgtcctggggacactactccaggagtatggcctcttgcagagaaggctggagaaccttgaaaatctcctcaggaaccggaatttctgggtgttgcgcctacccccagggtctaagggcgaggcaccaaaagtgccagtcacatttgtggatattgccgtatattttagtgaagacgagtggaagaacctcgatgagtggcagaaagaactgtacaacaatcttgtcaaagagaactataagaccctcatgtctcttgatgcggaggggtcagtgcccaagccggatgcgcctgtgcaggccgaacctcgagaagaaccgtgcgtttgggaacaaaggcatcctgaggagcgcgaaataccaatggacccagaagctggagctgagccactggttcccgcacaagacgccagctctcaggtaaagagggaggatactctgtgtgttagaggtcagcgaggtctggaggagcgcgccataccgactgaatctatcacagactcgccaatctccgcccaagacctgctgagcaggatcaaacaggaagaacaccagtgcgtctgggatcagcaggatctcgcagaccgcgatattccgacggatccaaatagtgaatcccttattagtgcccatgatatcctttcttggatcaagcaggaggaacaaccctatccatggggaccgagggatagcatggacggtgaacttggcctggacagtgggccaagtgacagtttgttgatggtgaagaacccacctcccgcacctccacagccccaaccgcagccgcagccaccgcagccacagctccagtcacagccacagcctcaaagtttaccacccatcgcagtggctgaaaaccccggaggtcccccaagcagaggtttactggatgacgggttccaggttctgcctggggagcggggatctggggaggcccctcccggaggtgatcgaagtacaggaggaggggggggagacgggggtggaggcgggggtggggctgaggcaggaacgggggccggaggcggatgtgggagctgctgccccggaggtctgcgcaggtcactcctcctccacggggctaggagcaagccgtattcatgccctgaatgtggcaaaagtttcggcgtgaggaaaagcctaattattcaccatcgatcccacacgaaggagagaccttacgaatgcgcggaatgtgaaaaatcttttaattgtcactccggactgatccggcaccagatgacccacaggggagagaggccgtacaagtgctcagaatgcgaaaaaacttattcaaggaaagaacatctccaaaaccaccagagactgcatactggtgaacgccccttccagtgcgcgctgtgcggaaagtcttttattaggaagcagaatctactgaaacatcagcgcatccacactggcgagcgcccctacacatgcggggaatgcggtaagtccttcagatataaagaatctctgaaggatcatctcagggttcactccggaggaccaggtcccggggctcctcgccaactccctccacctcctgagagagattag

SEQ ID NO: 139217 - DNA, 2016 bp, Artificial Sequence
  derived and/or modified sequence
atgcagtttgtttcaacccggccacagccccagcagctgggaatccagggcctggggctggatagcggatcttggtcatgggcccaggctctaccccctgaggaagtgtgccaccaggaaccagcgctaaggggtgagatggctgagggaatgccccctatgcaggcccaggaatgggacatggacgccaggaggccaatgccattccagtttccaccttttccggatagggccccagtgttccctgaccggatgatgcgtgaacctcaattaccaacagcggaaatctcactatggactgtggtagctgctattcaggccgtggagagaaaggtcgatgcccaggccagtcaactgctgaatctagaaggccgtaccgggactgccgagaagaagctcgctgattgcgagaaaacagccgttgagtttggcaaccatatggaatctaaatgggccgtgctgggtacactgctccaggaatatggactgctgcagcgcagattggaaaatctcgagaatctgctacggaatcggaacttctgggtgctgcggctgccgccaggaagtaaaggtgaggctccgaaagtgccggtgacctttgtggacattgctgtctacttttcagaggacgagtggaagaatcttgacgaatggcagaaggagctctataacaacctagttaaggaaaattataaaaccctgatgtccttagacgctgaaggtagtgtaccaaaacctgacgctcctgtgcaggccgagccaagggaggaaccgtgcgtatgggaacagcgacaccccgaggagcgagagattccaatggatcccgaagccggagcagaaccgttagttcccgcacaggacgcctcttcacaggtgaaacgggaagataccctctgtgtacggggacagagagggttggaagagagagcgattcctactgaaagcattactgacagtcccatctctgcccaggaccttctgtcccggattaaacaggaagagcatcagtgcgtgtgggaccagcaggacctggccgatagggacatcccaacggaccccaatagtgagtccctcattagcgcgcacgacatattaagttggattaaacaggaggaacaaccgtacccctggggaccacgcgactctatggacggagagctggggctggactcgggaccctccgattcattactaatggtaaaaaatcctcctcccgcaccacctcaaccacaacctcagccgcaacctccccagcctcaactgcaaagtcagcctcagcctcagtccctgcctccaatcgcagtcgcggaaaacccagggggtccaccctccagagggttgttagacgacggctttcaggtcctaccaggcgagcgaggcagtggcgaggctccgcctggcggagatcgctcgacaggagggggaggcggagatggaggcggaggcggtgggggagctgaggccggaacgggtgctgggggaggatgtgggtcatgttgtcccggaggtctccgtaggtctcttctcctccatggggcacggtccaagccttactcttgccccgagtgcggcaagtcttttggcgtacggaaatccctcattattcatcatcggtcccacactaaagaacgcccatacgagtgcgctgaatgtgagaagtcattcaactgtcattccgggctgattaggcatcagatgactcatagaggggagcggccatataagtgctcagagtgtgagaaaacttacagccggaaagaacacctgcagaaccatcagcggctacacacgggcgagcgccctttccagtgcgcgctctgtgggaaatcatttattcgcaagcagaacctcctaaagcaccaaagaattcatactggcgagcgcccttacacttgtggggaatgcggtaagagcttcagatataaagaaagtctgaaagatcatcttagggtgcactcaggcggaccaggccctggggcaccacggcagctgccccctccccctgaaagggactag

SEQ ID NO: 139218 - DNA, 3721 bp, Artificial Sequence
  derived and/or modified sequence
cctacgggctgtagatggagctgtccggccccggagagggggaaggcgcctggaaaacgttcttcttctccctggccgacccgagcggggaacagcactcccaggatgcagtttgtgtcaacacggccgcagcctcagcagctgggcatccagggcctggggctggacagcgggagctggagctgggcccaggctctgcccccggaggaggtctgccaccaggagccggcgctgcgcggggaaatggccgagggaatgccgcccatgcaggctcaagaatgggacatggacgcccggcggccaatgccttttcagttcccaccctttccagatagggcacctgtcttccccgaccgcatgatgcgagagccccagttgcccacagcagagatctcactctggactgtggtggctgccattcaggctgtggagaggaaggtggatgcccaggccagccagctgctgaacctggaggggcgcacggggacagccgagaagaagctggccgactgtgaaaagacggccgtggaatttgggaaccacatggagagcaagtgggccgtgctggggaccctgctgcaggagtacgggctgctgcagaggcggctggagaacttggagaacttgctgcgcaacaggaacttctgggtcctgcggctgcccccgggcagcaagggggaggcccccaaggttccagtgacttttgtcgacattgctgtgtacttctccgaagacgagtggaagaacttggacgaatggcagaaggagctttataacaaccttgttaaggagaactacaaaaccctcatgtccctggacgcggagggctcagtccccaagccagatgctccagtccaggctgagcccagggaagaaccttgtgtgtgggagcagcgccaccccgaagagagagaaatcccaatggatcccgaagcaggagcagagcccctggtgcctgcgcaggatgcgtcctcccaggtgaagcgtgaggacaccctgtgtgtccggggtcagcggggcctggaggaaagagccatccctacggaatccattaccgactccccaatttctgcccaggacctcttgtcccggattaaacaggaggagcatcagtgcgtgtgggatcagcaggatttggcagacagagatattcccacggatcccaattcagagtctctcatctcagcacatgacattttgtcatggatcaagcaggaggagcagccatacccatggggaccacgcgactcaatggacggagagcttggattagactctggccctagtgacagcctgctgatggtgaagaacccacccccggccccgccacagccccagccccagccccagccaccgcagccgcagctgcagtcgcagccccagccccagagcctgccccccatcgcggtggccgagaacccgggcggccccccgagccgagggctgctggacgacggtttccaggtgctgcccggggagcgtggctccggcgaggcgccgccgggtggggaccgcagcaccgggggcggcgggggcgatgggggcggtgggggcggcggcgcggaggcggggacgggggcaggcggcggctgtggcagctgctgccctggcgggctgcggcggagcctcctcctgcacggcgcccgcagcaagccctactcgtgccccgagtgcggcaagagcttcggcgtgcgcaagagcctcatcatccaccaccgcagccacaccaaggagcggccctacgagtgcgctgagtgcgagaagagcttcaactgccactcgggcctcatccgccaccagatgacgcaccgcggcgagcggccctacaagtgctcggagtgcgagaagacctacagccgtaaggagcacctgcagaaccaccagcggctgcacacgggcgagcggcctttccaatgtgcactgtgcggcaagagcttcatccgcaagcagaacctgctcaagcaccagcgcatccacacgggcgagcgcccctacacgtgcggcgagtgcggcaagagcttccgctacaaggagtcgctcaaggaccacctgcgcgtgcacagcggcggcccgggccccggcgccccacggcagctcccgccgcctcctgagcgagactagggctgggctgggggagggcagggccggacggagtggatcgggggcggcctgagcaccaaccaccttgccgggtgtcctcagccaccgtctggaaatcggcaacaggcattgcactccggttgggggtccccagggtggggcagggatcccccagatctgtctggtctgaatggacgcccagctcatctagggtggacccagctgctggggaagagccagggggaccgcgaggagccgagcgtcctcgggcaccgccctcacacctcctcgagtgccctgggaccactgggccacagatggtcatcaggggaagccaccagggagtcccgaagcccttctgagatcaggaaatcaggtcccaaggttaggagacgccctgaaaaaaagcgaaggccgagggatgtgctaagggtaacaccttcatgatgacaacactgcctcgcgtttcaatagcgctttatacttttttaagtgttttctatccgttatccatttcacccttggcctatccctctcagataggtggggtaggattttcctggtgaccgagtaaagtgagaggcaggtgagacggttcacccaatcacacgggaaggggcgcgcgctgcccaaccgcgctctccgcctacctccgctgctcgggaagctgctggcctggccctcctggtctctcttcctttcctggtctctcttcctttccttgctctcacccacggataaaaccagaagcgacaggaggccagctcctggggttcctgggagccgggaacagattggctacggaacgccccaggttgtacattcagagggctctttctccatgggagctcctggtgccgcctcggccccagcctgtccccagcccctcaatctggtgcagcagcatcttgtcactgcacaacagtggcctggtcccccacaggcagttagggccccaggtcagacctcaccatgatgatttgttccagttctcccagggcagaggggcgagggagaggcttttgctgtgagagtagccgtcacgtgtctcttcccagcagcgccgggcaagtgggtgctagagtctgagcctcaggctctcctgccctgggcctcccaattggtgctatctgttactgcccgtgctcacggacatggatacagaccctgctgtgctccacaccctgcaggcgcctcgggaagcgcccaaaggattccccttcacgttggtgcacctgctccatagctccgggcgctgcgtcccgaggggccacagtctccatttcagcgtcttgcatggcctggcaccgggtggggtggtatgccccaggacccttgtttgtgtcaaaaatgactttccctgcccttgccgtgggtccggcgttcctcccagccgggatcacagtgggcagccggcacccggcaccactttggcgagcgtcctgcttccgccctcgccctcatctacgctgctccgctttcctcagacccctttttgccgtgcaaagggaattcttgacattaaataaaaggtatccagattgcagactgcatgttcacagagctgggggttctccagcttgcctacagtaaagcctcaatgaactggaatccaattcaa

SEQ ID NO: 139219 - protein, 443 aa, Artificial Sequence
  derived and/or modified sequence
MDSRAQLWGLALNKRRATLPHPGGSTNLKADPEELFTKLEKIGKGSFGEVFKGIDNRTQKVVAIKIIDLEEAEDEIEDIQQEITVLSQCDSPYVTKYYGSYLKDTKLWIIMEYLGGGSALDLLEPGPLDETQIATILREILKGLDYLHSEKKIHRDIKAANVLLSEHGEVKLADFGVAGQLTDTQIKRNTFVGTPFWMAPEVIKQSAYDSKADIWSLGITAIELARGEPPHSELHPMKVLFLIPKNNPPTLEGNYSKPLKEFVEACLNKEPSFRPTAKELLKHKFILRNAKKTSYLTELIDRYKRWKAEQSHDDSSSEDSDAETDGQASGGSDSGDWIFTIREKDPKNLENGALQPSDLDRNKMKDIPKRPFSQCLSTIISPLFAELKEKSQACGGNLGSIEELRGAIYLAEEACPGISDTMVAQLVQRLQRYSLSGGGTSSH

SEQ ID NO: 139220 - DNA, 1332 bp, Artificial Sequence
  derived and/or modified sequence
atggattctagggcccaattatggggacttgctctgaataaacgcagagctaccttacctcaccccggggggtccacaaatcttaaagccgaccctgaagagctatttaccaaattagaaaagattgggaaggggtcgtttggcgaagtcttcaagggcatcgacaatcgcactcaaaaagtggtcgccattaaaattatagaccttgaggaagccgaagacgagatcgaggacattcagcaggagataacggtgttgagccagtgtgactctccctatgtcactaaatactacgggtcatacttaaaggataccaagttatggatcatcatggagtacctcggcggagggtcagccctggatctccttgagcccgggccattggacgagacccaaatagcgacaatcttgagggaaatcctgaaaggactggactatcttcactccgagaagaaaatccatagagacatcaaagccgctaacgtgctgctctcggaacatggtgaggtaaagcttgccgattttggagtcgctggccaactgacagatacacagataaagcgcaacacgttcgtaggcactccattctggatggccccagaggtcattaaacaatcagcgtacgattcgaaggccgacatctggtcattagggatcacagccatcgagctggcgcgaggagaaccaccacattccgaattgcatcccatgaaggtgctctttctgatcccgaaaaataatcctcccactctcgaagggaactactccaaaccacttaaagagtttgtggaggcctgtcttaataaggagccatcttttcgccccaccgctaaggaactgctgaaacacaaattcatcctgcgaaacgctaagaaaaccagttatcttacagaattaattgaccgatacaaacgctggaaggctgagcaaagccatgatgactcttcatccgaggactccgatgcggaaacagatggccaggcttctggcggcagtgattccggagattggatctttactatacgagaaaaggaccccaagaacctcgaaaatggcgctctgcagcctagcgacttggatagaaacaaaatgaaggatatcccgaagcgaccctttagtcagtgcttgtcgacgattatttcacctctgttcgccgagttaaaagagaagagccaggcctgcggcggaaacttaggatccattgaagagctgcgcggcgccatctacttagcagaggaagcctgtcccggtatctctgatacaatggtggcacagctggtccagcgtctgcagcggtactccctgagtggaggaggtacatctagtcactag

SEQ ID NO: 139221 - DNA, 1332 bp, Artificial Sequence
  derived and/or modified sequence
atggacagccgggcccagctgtggggcctggccctgaacaagagaagagccaccctgccccaccctgggggcagcaccaacctgaaggctgaccctgaggagctgttcaccaagctggagaagattggcaagggcagctttggagaggtgttcaagggcatcgacaacagaacccagaaggtggtggccatcaagatcatcgacctggaggaggctgaagatgaaattgaggacatccagcaggagatcaccgtgctgagccagtgtgacagcccctacgtgaccaagtactacggcagctacctgaaggacaccaagctgtggatcatcatggagtacctgggcggcggcagcgccctggacctgctggagcccggccccctggatgagacccagatcgccaccatcctgcgggagatcctgaagggcctggactacctgcacagcgagaagaagatccaccgggacatcaaggccgccaacgtgctgctgtctgaacatggagaggtgaagctggccgactttggagtggccggccagctgacagacacccagatcaagaggaacacctttgtgggcacccccttctggatggcccctgaggtgatcaagcagagcgcctatgacagcaaggctgacatctggagcctgggcatcacagccatcgagctggcccggggggagcccccccacagcgagctgcaccccatgaaggtgctcttcctgatccccaagaacaacccccccaccctggagggcaactacagcaagcccctgaaggagtttgtggaggcctgcctgaacaaggagcccagcttccggcccacagccaaggagctgctgaagcacaagttcatcctgagaaatgccaagaagaccagctacctgacagagctgattgaccgctacaagcgctggaaggccgagcagagccatgatgacagcagcagcgaggacagtgatgctgagacagatggccaggccagcggcggcagtgacagcggggactggatcttcaccatccgggagaaggaccccaagaacctggagaatggagccctgcagcccagcgacctggacaggaacaagatgaaggacatccccaagaggcccttcagccagtgcctgagcaccatcatcagccccctgtttgctgagctgaaggagaagagccaggcctgtggcggcaacctgggcagcattgaggagctgcggggggccatctacctggccgaggaggcctgccccggcatcagtgacaccatggtggcccagctggtgcagaggctgcagcgctacagcctgagcggcggcggcaccagcagccactag

SEQ ID NO: 139222 - DNA, 1332 bp, Artificial Sequence
  derived and/or modified sequence
atggacagccgggcccagctgtggggcctggccctgaacaagcggcgcgccacgctcccccaccctggcggaagcacaaacctgaaagcagaccctgaagagttgtttaccaagctggaaaagatcggaaagggttctttcggggaagtttttaagggaatagataaccggacacaaaaggtggtcgcgattaagattattgacctggaggaggccgaagacgagatcgaagatatacaacaggaaattactgtcctgagccagtgcgattctccctacgtaacaaaatattacggaagctacctgaaagatactaagctttggatcataatggaatacctgggcgggggctctgcacttgatctgctggagcctgggcctctggatgaaacacagattgccaccatccttagagagatcctcaaaggactcgactatctgcacagtgaaaagaagatccatcgggatattaaagctgctaacgtgctgttgagcgaacatggggaagtgaagctggctgattttggagtggcgggccaactcactgacacccagatcaaaaggaacaccttcgtgggcacaccgttttggatggcaccagaggtgataaaacagagtgcttacgatagcaaagcagatatatggtcactaggaataactgccatcgagctggcccgtggagagcctccccactccgaactgcatcctatgaaggtgctgtttctgattccaaaaaacaatccgccgactcttgagggcaactactcaaaacccctgaaggagtttgtggaggcttgcctgaataaagagccgtcttttcggccaacagcaaaagagctgttgaagcacaagtttatcctgcgcaatgccaaaaagacctcttatctcacggagctgatcgacaggtataaaagatggaaagcagaacaatcacatgacgatagttccagtgaggacagtgatgcagagaccgatggccaggcctctggtggaagcgactcaggcgattggatatttacaatccgcgagaaggatcctaaaaatctggaaaacggagcacttcagccatctgatttagacagaaataagatgaaagatattccaaagcggcctttttctcaatgcctcagcactattatctcaccactctttgccgagcttaaggaaaagagtcaagcttgcggtggcaatttagggtcaattgaagagctcaggggcgctatctacctggcagaagaagcttgtcctggaatcagcgacaccatggtggcgcagcttgtgcagaggctgcagcggtactcactgtcggggggaggcacctcttcccactag

SEQ ID NO: 139223 - DNA, 1332 bp, Artificial Sequence
  derived and/or modified sequence
atggacagcagagctcagctctggggcctcgcgcttaataagagacgcgctactctgccacacccagggggttcaaccaatctaaaggcggatccagaggaattgtttacgaagcttgaaaagatcgggaaaggatcgttcggcgaagtattcaaaggcattgataacagaacccagaaagtcgtagctataaagattatagacctggaggaggctgaagacgagatcgaagacatccagcaagaaattactgtgttaagccagtgtgatagcccgtatgtaacgaagtactacggctcttatctgaaagacacaaaactgtggataataatggagtacttgggaggcggtagtgccttagacctgctggagcccggtccactggacgaaacacagatagctactattctgagagagatactcaaaggtctggactacctccatagtgaaaagaaaatccaccgggatatcaaggctgcaaacgtgctgctgagcgaacacggagaggtgaagcttgctgatttcggcgttgcagggcagctcacagatacccagatcaagcggaacacctttgtcggcaccccattctggatggcccctgaagtgattaagcagtctgcatacgattctaaggccgacatttggagcctggggattacagctatcgaactggcacggggagaaccaccccactctgagttgcacccgatgaaggtgctcttcctgatcccaaagaacaatccacccaccctcgagggaaactacagcaagcctctcaaagaattcgttgaggcttgcctcaacaaggaaccttccttcagaccgacagccaaagagctgttgaagcacaagttcattctgcggaatgctaaaaaaacctcttacctgactgagcttatagaccgttataagcggtggaaagccgagcagtcacacgacgactctagtagcgaagactccgacgccgaaactgacggtcaggcctctggcggatccgacagtggtgactggattttcactatacgcgaaaaggatccaaagaacctggagaacggggctctgcagcctagtgacttggaccggaacaagatgaaggatatccctaagcgaccgttctcacaatgcttatccactattataagtccgctctttgccgagttgaaagagaagtctcaagcgtgcggcggtaatttgggttccatcgaggagctgcgaggggcaatctacctggcagaagaggcttgcccagggataagtgacacaatggtcgctcagctggtgcagcggcttcagcgatactctctgagcggcggtggtactagcagccactag

SEQ ID NO: 139224 - DNA, 2492 bp, Artificial Sequence
  derived and/or modified sequence
tttgggttagggagagtgctttcgtttgttttaaatgggagaaactggagcatgttgccaagggcagagagccagcagagaggggtgaatggaagaaggagcgagaagggggttactgacgaagccttatcctggaggagagaaggatggactccagagcccagctttggggactggccttgaataaaaggagggccactctacctcatcctggagggagcacgaacctaaaggcagacccagaagagctttttacaaaactagagaaaattgggaagggctcctttggagaggtgttcaaaggcattgacaatcggactcagaaagtggttgccataaagatcattgatctggaagaagctgaagatgagatagaggacattcaacaagaaatcacagtgctgagtcagtgtgacagtccatatgtaaccaaatattatggatcctatctgaaggatacaaaattatggataataatggaatatcttggtggaggctccgcactagatctattagaacctggcccattagatgaaacccagatcgctactatattaagagaaatactgaaaggactcgattatctccattcggagaagaaaatccacagagacattaaagcggccaacgtcctgctgtctgagcatggcgaggtgaagctggcggactttggcgtggctggccagctgacagacacccagatcaaaaggaacaccttcgtgggcaccccattctggatggcacccgaggtcatcaaacagtcggcctatgactcgaaggcagacatctggtccctgggcataacagctattgaacttgcaagaggggaaccacctcattccgagctgcaccccatgaaagttttattcctcattccaaagaacaacccaccgacgttggaaggaaactacagtaaacccctcaaggagtttgtggaggcctgtttgaataaggagccgagctttagacccactgctaaggagttattgaagcacaagtttatactacgcaatgcaaagaaaacttcctacttgaccgagctcatcgacaggtacaagagatggaaggccgagcagagccatgacgactcgagctccgaggattccgacgcggaaacagatggccaagcctcggggggcagtgattctggggactggatcttcacaatccgagaaaaagatcccaagaatctcgagaatggagctcttcagccatcggacttggacagaaataagatgaaagacatcccgaagaggcctttctctcagtgtttatctacaattatttctcctctgtttgcagagttgaaggagaagagccaggcgtgcggagggaacttggggtccattgaagagctgcgaggggccatctacctagcggaggaggcgtgccctggcatctccgacaccatggtggcccagctcgtgcagcggctccagagatactctctaagtggtggaggaacttcatcccactgaaattcctttggcatttggggttttgtttttccttttttccttcttcatcctcctccttttttaaaagtcaacgagagccttcgctgactccaccgaagaggtgcgccactgggagccaccccagcgccaggcgcccgtccagggacacacacagtcttcactgtgctgcagccagatgaagtctctcagatgggtggggagggtcagctccttccagcgatcattttattttattttattacttttgtttttaattttaaccatagtgcacatattccaggaaagtgtctttaaaaacaaaaacaaaccctgaaatgtatatttgggattatgataaggcaactaaagacatgaaacctcaggtatcctgctttaagttgataactccctctgggagctggagaatcgctctggtggatgggtgtacagatttgtatataatgtcatttttacggaaaccctttcggcgtgcataaggaatcactgtgtacaaactggccaagtgcttctgtagataacgtcagtggagtaaatattcgacaggccataacttgagtctattgccttgcctttattacatgtacattttgaattctgtgaccagtgatttgggttttattttgtatttgcagggtttgtcattaataattaatgcccctctcttacagaacactcctatttgtacctcaacaaatgcaaattttccccgtttgccctacgccccttttggtacacctagaggttgatttcctttttcatcgatggtactatttcttagtgttttaaattggaacatatcttgcctcatgaagctttaaattataattttcagtttctccccatgaagcgctctcgtctgacatttgtttggaatcgtgccactgctggtctgcgccagatgtaccgtcctttccaatacgattttctgttgcaccttgtagtggattctgcatatcatctttcccacctaaaaatgtctgaatgcttacacaaataaattttataacacgctta

SEQ ID NO: 139225 - DNA, 1332 bp, Artificial Sequence
  derived and/or modified sequence
atggacagcagagcccagctgtggggcctggccctgaacaagagaagagccaccctgccccaccccggcggcagcaccaacctgaaggccgaccccgaggagctgttcaccaagctggagaagatcggcaagggcagcttcggcgaggtgttcaagggcatcgacaacagaacccagaaggtggtggccatcaagatcatcgacctggaggaggccgaggacgagatcgaggacatccagcaggagatcaccgtgctgagccagtgcgacagcccctacgtgaccaagtactacggcagctacctgaaggacaccaagctgtggatcatcatggagtacctgggcggcggcagcgccctggacctgctggagcccggccccctggacgagacccagatcgccaccatcctgagagagatcctgaagggcctggactacctgcacagcgagaagaagatccacagagacatcaaggccgccaacgtgctgctgagcgagcacggcgaggtgaagctggccgacttcggcgtggccggccagctgaccgacacccagatcaagagaaacaccttcgtgggcacccccttctggatggcccccgaggtgatcaagcagagcgcctacgacagcaaggccgacatctggagcctgggcatcaccgccatcgagctggccagaggcgagcccccccacagcgagctgcaccccatgaaggtgctgttcctgatccccaagaacaacccccccaccctggagggcaactacagcaagcccctgaaggagttcgtggaggcctgcctgaacaaggagcccagcttcagacccaccgccaaggagctgctgaagcacaagttcatcctgagaaacgccaagaagaccagctacctgaccgagctgatcgacagatacaagagatggaaggccgagcagagccacgacgacagcagcagcgaggacagcgacgccgagaccgacggccaggccagcggcggcagcgacagcggcgactggatcttcaccatcagagagaaggaccccaagaacctggagaacggcgccctgcagcccagcgacctggacagaaacaagatgaaggacatccccaagagacccttcagccagtgcctgagcaccatcatcagccccctgttcgccgagctgaaggagaagagccaggcctgcggcggcaacctgggcagcatcgaggagctgagaggcgccatctacctggccgaggaggcctgccccggcatcagcgacaccatggtggcccagctggtgcagagactgcagagatacagcctgagcggcggcggcaccagcagccactag

SEQ ID NO: 139226 - protein, 341 aa, Artificial Sequence
  derived and/or modified sequence
MLLRPRRPPPLAPPAPPSPASPDPEPRTPGDAPGTPPRRPASPSALGELGLPVSPGSAQRTPWSARETELLLGTLLQPAVWRALLLDRRQALPTYRRVSAALAQQQVRRTPAQCRRRYKFLKDKFREAHGQPPGPFDEQIRKLMGLLGDNGRKRPRRRSPGSGRPQRARRPVPNAHAPAPSEPDATPLPTARDRDADPTWTLRFSPSPPKSADASPAPGSPPAPAPTALATCIPEDRAPVRGPGSPPPPPAREDPDSPPGRPEDCAPPPAAPPSLNTALLQTLGHLGDIANILGPLRDQLLTLNQHVEQLRGAFDQTVSLAVGFILGSAAAERGVLRDPCQ

SEQ ID NO: 139227 - DNA, 1157 bp, Artificial Sequence
  derived and/or modified sequence
cgccccagccccgggatgctgctccggccccgcaggccgcccccgctcgcgccccccgcgccgccctcgcccgccagccccgaccccgagccgcggacacccggagacgccccggggaccccgccccggaggcccgcctcgcccagcgcgctgggggaactcgggttgccggtgtccccgggctcggcgcagcgcacgccctggagcgcccgggagacggagctgctgctggggacgctgctgcaaccggccgtgtggcgcgcgctgctcctggaccgccgccaggccctgcccacctaccgccgcgtgtcggccgcgctggcccagcagcaggtgcgccgcacccccgcgcagtgccgccgccgctacaagttccttaaagacaagtttcgcgaggcgcacggccagccgcccgggcccttcgacgagcagatccggaagctcatggggctgctgggcgacaacgggcgcaaacggcctcgccgccgctccccggggtccgggcgcccccagcgcgcccgccgcccggtccccaacgcgcacgcgccggctcccagcgaaccagacgccaccccgctgcccaccgcccgcgaccgcgacgcggaccccacctggacgctccgcttcagcccgtccccaccgaagtctgcggacgcctcccccgcccccggctccccgccagctcccgccccgaccgccctcgccacctgcatccccgaggaccgcgcgcccgtccgcggccccgggtccccgccgccacccccggcccgcgaagaccccgactcgccgcccggccgccccgaggactgcgcgccccctccggccgcgcccccgtcgctgaacaccgccctgctgcagaccctggggcacctgggcgacatcgcgaacatcctgggcccgctgcgcgaccagctgctgaccttgaaccagcacgtggagcagctgcgcggcgccttcgaccagacagtgtccctggccgtgggcttcattctgggcagcgcggccgccgagcgaggggtcctcagggacccgtgccagtgagtcccggctgcggccagtctcccctctccaggccgaggcccctccgccctgacccctcctgctgccttcccacccccgttcttgggtatgttcaataaaaggattgttttcctaga

SEQ ID NO: 139228 - DNA, 1026 bp, Artificial Sequence
  derived and/or modified sequence
atgctgctgagacccagaagacccccccccctggccccccccgccccccccagccccgccagccccgaccccgagcccagaacccccggcgacgcccccggcaccccccccagaagacccgccagccccagcgccctgggcgagctgggcctgcccgtgagccccggcagcgcccagagaaccccctggagcgccagagagaccgagctgctgctgggcaccctgctgcagcccgccgtgtggagagccctgctgctggacagaagacaggccctgcccacctacagaagagtgagcgccgccctggcccagcagcaggtgagaagaacccccgcccagtgcagaagaagatacaagttcctgaaggacaagttcagagaggcccacggccagccccccggccccttcgacgagcagatcagaaagctgatgggcctgctgggcgacaacggcagaaagagacccagaagaagaagccccggcagcggcagaccccagagagccagaagacccgtgcccaacgcccacgcccccgcccccagcgagcccgacgccacccccctgcccaccgccagagacagagacgccgaccccacctggaccctgagattcagccccagcccccccaagagcgccgacgccagccccgcccccggcagcccccccgcccccgcccccaccgccctggccacctgcatccccgaggacagagcccccgtgagaggccccggcagccccccccccccccccgccagagaggaccccgacagcccccccggcagacccgaggactgcgcccccccccccgccgccccccccagcctgaacaccgccctgctgcagaccctgggccacctgggcgacatcgccaacatcctgggccccctgagagaccagctgctgaccctgaaccagcacgtggagcagctgagaggcgccttcgaccagaccgtgagcctggccgtgggcttcatcctgggcagcgccgccgccgagagaggcgtgctgagagacccctgccagtag

SEQ ID NO: 139229 - DNA, 1026 bp, Artificial Sequence
  derived and/or modified sequence
atgctgctgcgccctcgcagaccccctcccctggcccccccggcacccccatcgccagccagccctgatcctgaacctcgcacccccggggatgcgcctggaactccccctcgacgacccgcatccccaagcgctctgggcgagctcggcctgcctgtttcgcccgggtcagcccaaagaaccccctggagtgcaagagagacagaactcttgctgggaaccctcctccaacctgccgtatggcgggccctgctactggaccggcggcaagcactcccaacctacagaagggtcagtgctgcactggcacagcagcaggtgaggcggaccccggcacaatgtagaaggaggtacaagttccttaaagataagttccgggaggcacacggacaacctccgggcccgtttgatgaacagataagaaagctgatggggctcttaggggataacggtaggaaacggcccagaaggagaagtccagggtccggtcgaccccagagggcgcggagaccggtgcctaacgctcatgcccctgcaccttctgagcctgatgcgaccccgctgccaacagccagggatagagatgctgaccccacctggaccctgagattttctccgagtccccctaagtctgcagatgcttcacccgcccccgggtccccccctgctcctgccccgacggcattggccacttgcatcccggaggacagggcaccggtgagaggcccaggttccccacccccgcctcctgcaagggaagaccccgattccccgccgggaaggcctgaagattgtgcccctccaccagcggccccccccagtctgaacactgcattactccagaccctggggcacctgggagatatagctaacatacttggacccctgagagaccagctcctgacgttaaatcagcatgtagagcaattacggggggccttcgatcagaccgtcagcctggccgtgggattcatacttgggtctgccgcagccgaacggggggtcttacgagacccttgccaatag

SEQ ID NO: 139230 - DNA, 1026 bp, Artificial Sequence
  derived and/or modified sequence
atgctgctgcggccccggcggcccccacccctggcccccccagccccacccagccctgccagcccagaccctgagcccaggaccccaggagatgcccctggcaccccaccccggcggcctgccagccccagcgccctgggggagctgggcctgcctgtgtccccaggcagcgcccagaggaccccctggagcgcccgggagacagagctgctgctgggcaccctgctgcagcctgctgtgtggagggccctgctgctggaccggcggcaggccctgcccacctaccgccgggtgtctgctgccctggcccagcagcaggtgcggaggaccccagcccagtgcagaagacgctacaagttcctgaaggacaagttccgggaggcccacggccagcccccaggcccctttgatgagcagatcaggaagctgatgggcctgctgggggacaatggaaggaagaggcccaggagaagaagccctggcagcggccggccccagagggcccggcggcctgtgcccaatgcccacgccccagcccccagcgagccagatgccacccccctgcccacagcccgggacagagatgctgaccccacctggaccctgcgcttcagccccagcccccccaagtctgcagatgccagccctgcccctggcagccccccagccccagcccccacagccctggccacctgcatcccagaagatcgggcccctgtgcggggccctggcagccccccacctcctccagccagagaagatcctgacagccccccaggccggcctgaggactgtgcccctcctcctgctgccccacccagcctgaacacagccctgctgcagaccctgggccacctgggggacatcgccaacatcctgggccccctgcgggaccagctgctgaccctgaaccagcacgtggagcagctgcggggggcctttgaccagacagtgtccctggccgtgggcttcatcctgggcagcgctgctgctgagcggggcgtgctgcgggacccctgccagtag

SEQ ID NO: 139231 - DNA, 1026 bp, Artificial Sequence
  derived and/or modified sequence
atgctgctgcggccccggcggcccccccccctggccccccccgccccacccagcccagctagccccgaccccgagcctagaacccctggagacgctccaggcacccctccaagacgcccagcttcaccgtccgctttgggagagctggggctgcccgtatctcccggcagcgctcaacgtacgccctggtccgctcgggaaactgagcttctgctgggaactctactccagcctgcagtatggagggcattactgctggacaggcgccaggcccttcccacttacaggagggttagtgctgctctggcccagcagcaggttcgccgcacccctgctcagtgtcgcagacgatacaagtttcttaaagacaagttcagggaggcacatggccagccccccgggcccttcgatgagcagatacgcaaactcatgggactgctgggtgacaatgggaggaaaaggccacgtaggagatccccgggctcaggcagaccacagagggcccgccggccagtcccaaacgctcacgcccctgccccttcggagccagatgccacaccactgcccacggcacgtgacagggatgccgacccaacctggacactcaggtttagtccgtccccccccaagagcgccgacgcatctcctgcccctgggagtccaccggctccggctcctacagccttggctacctgcatccctgaagacagagctccggtccgtgggccaggatcccccccaccgccccctgctcgcgaagacccagactcccctccagggcggcccgaggactgtgcaccccccccagctgcccctccaagcctgaacactgcactgttgcagacgctcgggcacttaggcgacatcgccaatattttagggccactcagagaccaactcctaacattaaaccagcacgtggagcagctccggggagcctttgaccagacagtcagcctagctgtgggctttatcctgggcagcgctgccgccgaacgaggtgttcttcgcgacccctgtcagtag

SEQ ID NO: 139232 - DNA, 1026 bp, Artificial Sequence
  derived and/or modified sequence
atgcttttaaggcctagacgaccaccccctttggctccacccgcacctcctagtccggcatcgcccgacccagaaccacgcacacccggagacgcccctggaaccccacctagacgccctgcgtctccatcagcgctcggggagctcggactgcccgtgtcccctggaagcgcccaacgcaccccctggagtgcaagagagaccgagctcctcttggggaccctccttcagcctgccgtgtggcgcgctctgctgttggaccgtcggcaagccttaccaacttatagaagagttagcgctgccctagcccagcagcaggtgcgacggactcctgcccagtgtcgcagacgatacaaattcctcaaagataaatttagagaggcccatggtcagcctcccggaccatttgatgagcagatcaggaaactcatgggactgctgggtgataacggaagaaagcgtcctcgaagacgcagtcctgggtctgggaggccacaacgggcaagacgcccagtgccaaatgctcatgcacccgctccctcggagcctgacgcgacaccgctccctacagctagagacagagacgccgacccaacttggacactgcggtttagcccctcacctccaaaatctgcagatgcatctcccgctcccggatccccccctgcccctgccccaaccgctctggccacttgtatccccgaggatagagctcccgttaggggcccaggtagccctccaccgccaccagccagggaagatcccgattctccacccggacgcccagaggactgtgctccaccccctgccgcacccccatccctcaacaccgcattgcttcagacccttggccatctgggggacatcgcgaatatcctgggtccactccgggatcagctcttgacactgaaccaacatgtcgagcaactgcggggtgctttcgaccaaaccgtgagcctcgcagtcggatttattcttggctctgcggcagctgagagaggagttcttagggacccgtgccagtag

SEQ ID NO: 139233 - protein, 522 aa, Artificial Sequence
  derived and/or modified sequence
MEPGGARLRLQRTEGLGGERERQPCGDGNTETHRAPDLVQWTRHMEAVKAQLLEQAQGQLRELLDRAMREAIQSYPSQDKPLPPPPPGSLSRTQEPSLGKQKVFIIRKSLLDELMEVQHFRTIYHMFIAGLCVFIISTLAIDFIDEGRLLLEFDLLIFSFGQLPLALVTWVPMFLSTLLAPYQALRLWARGTWTQATGLGCALLAAHAVVLCALPVHVAVEHQLPPASRCVLVFEQVRFLMKSYSFLREAVPGTLRARRGEGIQAPSFSSYLYFLFCPTLIYRETYPRTPYVRWNYVAKNFAQALGCVLYACFILGRLCVPVFANMSREPFSTRALVLSILHATLPGIFMLLLIFFAFLHCWLNAFAEMLRFGDRMFYRDWWNSTSFSNYYRTWNVVVHDWLYSYVYQDGLRLLGARARGVAMLGVFLVSAVAHEYIFCFVLGFFYPVMLILFLVIGGMLNFMMHDQRTGPAWNVLMWTMLFLGQGIQVSLYCQEWYARRHCPLPQATFWGLVTPRSWSCHT

SEQ ID NO: 139234 - DNA, 1569 bp, Artificial Sequence
  derived and/or modified sequence
atggagcccggcggcgccagactgagactgcagagaaccgagggcctgggcggcgagagagagagacagccctgcggcgacggcaacaccgagacccacagagcccccgacctggtgcagtggaccagacacatggaggccgtgaaggcccagctgctggagcaggcccagggccagctgagagagctgctggacagagccatgagagaggccatccagagctaccccagccaggacaagcccctgcccccccccccccccggcagcctgagcagaacccaggagcccagcctgggcaagcagaaggtgttcatcatcagaaagagcctgctggacgagctgatggaggtgcagcacttcagaaccatctaccacatgttcatcgccggcctgtgcgtgttcatcatcagcaccctggccatcgacttcatcgacgagggcagactgctgctggagttcgacctgctgatcttcagcttcggccagctgcccctggccctggtgacctgggtgcccatgttcctgagcaccctgctggccccctaccaggccctgagactgtgggccagaggcacctggacccaggccaccggcctgggctgcgccctgctggccgcccacgccgtggtgctgtgcgccctgcccgtgcacgtggccgtggagcaccagctgccccccgccagcagatgcgtgctggtgttcgagcaggtgagattcctgatgaagagctacagcttcctgagagaggccgtgcccggcaccctgagagccagaagaggcgagggcatccaggcccccagcttcagcagctacctgtacttcctgttctgccccaccctgatctacagagagacctaccccagaaccccctacgtgagatggaactacgtggccaagaacttcgcccaggccctgggctgcgtgctgtacgcctgcttcatcctgggcagactgtgcgtgcccgtgttcgccaacatgagcagagagcccttcagcaccagagccctggtgctgagcatcctgcacgccaccctgcccggcatcttcatgctgctgctgatcttcttcgccttcctgcactgctggctgaacgccttcgccgagatgctgagattcggcgacagaatgttctacagagactggtggaacagcaccagcttcagcaactactacagaacctggaacgtggtggtgcacgactggctgtacagctacgtgtaccaggacggcctgagactgctgggcgccagagccagaggcgtggccatgctgggcgtgttcctggtgagcgccgtggcccacgagtacatcttctgcttcgtgctgggcttcttctaccccgtgatgctgatcctgttcctggtgatcggcggcatgctgaacttcatgatgcacgaccagagaaccggccccgcctggaacgtgctgatgtggaccatgctgttcctgggccagggcatccaggtgagcctgtactgccaggagtggtacgccagaagacactgccccctgccccaggccaccttctggggcctggtgacccccagaagctggagctgccacacctag

SEQ ID NO: 139235 - DNA, 1569 bp, Artificial Sequence
  derived and/or modified sequence
atggaaccaggaggggctagactccgattacagcgtaccgagggcctaggaggggaacgagaaagacagccctgcggggatggcaatacagagacgcaccgcgcacctgatctcgtccagtggacaagacatatggaggcagtcaaggcacagctcctcgagcaggcgcaagggcagttgcgcgaactcctcgatcgcgctatgagggaggctatccagtcttatccatctcaggacaaaccactgccccccccgccccccgggagtttgtcacgaacccaagagccatctcttggcaagcagaaggtgttcataattaggaagagcctactggacgaactcatggaagtccagcatttccggacaatttaccacatgtttattgccgggctttgtgtgttcattatcagtactttggctatcgatttcattgacgaaggcaggctgctcttggaattcgatctcctcatcttttcatttggccagttaccactggccctggtgacatgggtgccaatgttcctttccacactgctggctccctatcaagctttacgactctgggcgagagggacatggactcaggccactggcctgggttgtgccctgttagccgcacatgcagttgtgctttgcgcattgcctgtacacgtcgccgtagaacaccagctgcccccggcttcccgttgtgtcctggtctttgagcaggtcagatttctgatgaaatcatactccttcttgcgggaagccgtcccaggtacgctgcgggcaagaaggggagagggaattcaagcccccagcttctcctcttatttatactttctattttgccccacactaatttatcgagaaacctatcctagaacgccttacgtccgttggaattatgtggccaagaactttgcacaggctttaggttgtgtgttgtacgcgtgcttcatcctgggacggctgtgcgtccccgttttcgcaaacatgtctcgggaaccctttagtacccgggctctcgtgttaagcatcttgcatgcaacgctgcctggtattttcatgctcttgctcatttttttcgcctttctgcattgttggctgaacgcttttgctgagatgcttcggttcggggatcgcatgttttaccgtgactggtggaattccacttcgttcagcaattactacagaacttggaacgtggtggtccatgactggctctattcgtatgtgtatcaggacggcctgcgcctcctgggcgctagagccagaggagtcgctatgctaggagttttcttggtgagcgccgtagctcatgagtacatattttgtttcgtgctgggatttttctaccctgtaatgctcattctcttcctggtcattggtggcatgctgaatttcatgatgcatgatcagcgaaccggcccagcttggaatgtgctgatgtggacgatgctgtttttggggcagggaattcaggtcagtttatactgccaggagtggtatgcacgacgccactgccctctgccccaagcaactttttggggcttagtaacacctcgttcatggagttgccatacgtag

SEQ ID NO: 139236 - DNA, 1569 bp, Artificial Sequence
  derived and/or modified sequence
atggagcctggaggagcccggctgcggctgcagaggacagagggcctgggcggggagcgggagcggcagccctgtggagatggcaacacagagacccaccgggccccagacctggtgcagtggaccaggcacatggaggccgtgaaggcccagctgctggagcaggcccagggccagctgcgggagctgctggaccgggccatgagggaggccatccagagctaccccagccaggacaagcccctgcccccacctcctcctggcagcctgagcaggacccaggagcccagcctgggcaagcagaaggtgttcatcatcaggaagagcctgctggatgagctgatggaggtgcagcacttccgcaccatctaccacatgttcatcgccggcctgtgtgtgttcatcatcagcaccctggccatcgacttcattgatgagggccgcctgctgctggagtttgacctgctgatcttctcctttggccagctgcccctggccctggtgacctgggtgcccatgttcctgagcaccctgctggccccctaccaggccctgcggctgtgggcccggggcacctggacccaggccaccggcctgggctgtgccctgctggccgcccatgctgtggtgctgtgtgccctgcctgtgcacgtggccgtggagcaccagctgcccccagccagccgctgtgtgctggtgtttgagcaggtgcgcttcctgatgaagagctacagcttcctgcgggaggccgtgcccggcaccctgcgggcccggcggggggagggcatccaggcccccagcttcagcagctacctgtacttcctgttctgccccaccctcatctaccgggagacctaccccaggaccccctacgtgcgctggaactacgtggccaagaactttgcccaggccctgggctgtgtgctgtatgcctgcttcatcctgggccgcctgtgtgtgcctgtgtttgccaacatgagccgggagcccttcagcacccgggccctggtgctgagcatcctgcacgccaccctgcccggcatcttcatgctgctgctgatcttctttgccttcctgcactgctggctgaatgcctttgctgagatgctgcgctttggagacaggatgttctacagagactggtggaacagcaccagcttcagcaactactaccgcacctggaatgtggtggtgcatgactggctgtacagctatgtgtaccaggacggcctgcggctgctgggcgcccgggcccggggcgtggccatgctgggcgtcttcctggtgtctgctgtggcccacgagtacatcttctgctttgtgctgggcttcttctaccctgtgatgctgatcctcttcctggtgattggaggcatgctgaacttcatgatgcatgaccagaggactggacctgcctggaatgtgctgatgtggaccatgctgttcctgggccagggcatccaggtgtccctgtactgccaggagtggtacgcccggcggcactgccccctgccccaggccaccttctggggcctggtgacccccaggtcctggagctgccacacctag

SEQ ID NO: 139237 - DNA, 1569 bp, Artificial Sequence
  derived and/or modified sequence
atggagcccggcggcgcccggctgcggctgcagcggaccgagggcctgggcggtgaaagagaacgtcagccatgtggcgacggtaataccgagacacaccgggcgcccgatcttgtgcagtggacacgacatatggaggccgtgaaggctcaactcttggagcaggcacaaggccaactgcgagaactcctggaccgggcgatgagggaagccattcaatcctaccccagtcaagataagccacttccccctccacctcccggctcgttgagtaggactcaagaacccagcctcggcaagcaaaaagtttttattatccggaaatcgcttctggatgagttaatggaagtccagcactttcgaactatataccatatgttcatcgctggtctatgtgtgttcattattagtactctcgctatcgattttatcgatgagggccgcctgctgctggagttcgacctgctgatattctcttttggacaattacccctcgccttggtgacttgggtgcctatgttcctatctacactgctcgcaccataccaggccctgagattgtgggcccggggcacctggactcaggccacaggcctcggatgcgcactcttagctgctcatgccgtggtcctttgcgcactgcctgtgcacgtcgctgttgaacaccagctgccgcccgcctctcgttgcgttcttgttttcgagcaagtgcgctttttaatgaagtcttactcgttccttagggaggcagtgcccggcacattgcgggcccgtcggggagaggggatccaggcacccagtttcagctcctatctgtactttcttttctgccctacactcatctatagagaaacctaccccaggaccccttacgtccgttggaactacgtggcaaagaactttgcccaagccttgggatgcgtgctttacgcctgcttcatcttaggccgcttgtgcgtaccagtcttcgctaatatgtcaagagagccgtttagcacaagagccctggtgctgtcaatccttcatgccactctgccgggaatctttatgctgttgctgatcttcttcgcatttctccattgttggttgaacgcctttgctgagatgctcaggtttggagaccgcatgttctatcgagactggtggaattccacatctttcagcaactactaccggacttggaatgtcgtcgtccacgactggttatactcctatgtttatcaggacggccttagactgttgggtgcccgcgctagaggtgtagccatgctcggtgtcttccttgtgtcagcagtggcccatgaatatatcttttgttttgtgttgggctttttttaccctgtgatgctgattctctttcttgtgatcggcggtatgctcaattttatgatgcacgatcagaggaccggacccgcttggaacgttctgatgtggaccatgctttttctagggcagggcattcaggtttctctgtactgccaagagtggtatgccaggaggcactgcccattgccccaagccactttctgggggttggttaccccgcggagttggtcatgtcatacttag

SEQ ID NO: 139238 - DNA, 1569 bp, Artificial Sequence
  derived and/or modified sequence
atggaaccgggtggggcacgtctcaggctccagaggaccgaaggcttaggaggcgaaagggaacgacaaccctgtggggatggaaacaccgaaacacaccgagctccggacctagtacagtggactagacacatggaagcggtgaaagcacagctactggaacaggcacaggggcaactaagggaactgctggaccgagcaatgagagaggccattcagagctaccccagtcaggataaaccgctcccacctccacccccagggagtctgtcacgcacacaggaaccttctctgggaaagcaaaaagtttttatcattcggaaaagcctcctcgatgaactgatggaagtacagcactttagaactatttaccacatgtttattgcaggactgtgtgtgttcattatttcaactctggccatcgacttcatcgacgaaggtagattactgctggagtttgacctgctgatctttagctttggacagctcccacttgctttggtgacctgggtgcccatgttcctcagtactctcttagcaccttaccaggccctgagattgtgggcacgcggtacatggacccaagctactggactgggatgcgctctgttggctgcacacgcagtagttctctgtgccctaccagtgcacgttgcggttgagcaccaacttcctcctgccagcaggtgtgttctagttttcgagcaagtacggttccttatgaaatcctattcttttctcagagaggctgttcctggaactctgcgggcaagacggggtgaaggcattcaggctcctagcttttctagttacctttacttccttttttgcccaacccttatataccgggagacatacccacgaacaccatacgttcgctggaattacgttgccaagaatttcgcgcaagcactgggctgtgtcctttacgcttgtttcatcttaggcaggctgtgcgtcccggtctttgctaacatgagccgagaacccttcagcactagggcactggttctctctatactccatgcgactctgccaggtatttttatgctgttgttaattttcttcgcattcctgcactgttggttgaacgcctttgccgagatgctgcgctttggagacaggatgttctaccgtgattggtggaatagcacttctttcagcaattactatcgcacctggaatgtagtggtgcacgattggttgtactcttacgtttatcaagatggcctgagacttttgggcgctcgggcacgaggcgttgctatgctaggcgtgtttctagtgtcagctgtggcccacgagtacattttctgctttgttctggggttcttctatcccgtaatgctcattttatttctggtaatcgggggtatgctgaattttatgatgcacgatcagcgcacgggccctgcttggaatgtgctgatgtggaccatgcttttcttgggtcaaggcattcaggtgtcgctctattgccaggagtggtacgcacgcagacattgcccactgcctcaggccacattttggggacttgttaccccacgttcttggtcgtgccatacttag

SEQ ID NO: 139239 - DNA, 2044 bp, Artificial Sequence
  derived and/or modified sequence
actgcgaaggaaggaggcaacacgggcaagggctgcctgctgcccgctggagaccgcaccatggagccaggcggggcccgtctgcgtctgcagaggacagaagggctgggaggggagcgggagcgccaaccctgtggagatggaaacactgagacgcacagagccccggacttggtacaatggacccgacacatggaggctgtgaaggcacaattgctggagcaagcgcagggacaactgagggagctgctggatcgggccatgcgggaggctatacaatcctacccatcacaagacaaacctctgcccccacctcccccaggttccttgagcaggacccaggagccatccctggggaaacagaaagttttcatcatccgcaagtccctgcttgatgagctgatggaggtgcagcatttccgcaccatctaccacatgttcatcgctggcctgtgtgtcttcatcatcagcaccctggccatcgacttcattgatgagggcaggctgctgctggagtttgacctactgatcttcagcttcggacagctgccattggcgctggtgacctgggtgcccatgtttctgtccaccctgttggcgccgtaccaggccctacggctgtgggccaggggcacctggacgcaggcgacgggcctgggctgtgcgctgctagccgcccacgccgtggtgctctgcgcgctgccggtccacgtggccgtggagcatcagctcccgccggcctcccgttgtgtcctggtcttcgagcaggttaggttcctgatgaaaagctactccttcctgagagaggctgtgcctgggacccttcgtgccagacgaggtgaggggatccaggcccccagtttctccagctacctctacttcctcttctgcccaacactcatctacagggagacttaccctaggacgccctatgtcaggtggaattatgtggccaagaactttgcccaggccctgggatgtgtgctctatgcctgcttcatcctgggccgcctctgtgttcctgtctttgccaacatgagccgagagcccttcagcacccgtgccctggtgctctctatcctgcatgccacgttgccaggcatcttcatgctgctgctcatcttctttgccttcctccattgctggctcaacgcctttgccgagatgctacgatttggagacaggatgttctaccgggactggtggaactcaacgtccttctccaactactaccgcacttggaacgtggtggtccatgactggctgtacagctacgtgtatcaggatgggctgcggctccttggtgcccgggcccgaggggtagccatgctgggtgtgttcctggtctccgcagtggcccatgagtatatcttctgcttcgtcctggggttcttctatcccgtcatgctgatactcttccttgtcattggaggaatgttgaacttcatgatgcatgaccagcgcaccggcccggcatggaacgtgctgatgtggaccatgctgtttctaggccagggaatccaggtcagcctgtactgccaggagtggtacgcacggcggcactgccccttaccccaggcaactttctgggggctggtgacacctcgatcttggtcctgccatacctagaggtcgggacagacgacgctacctgcccagacaccaccaagttctctgcctgcaaaacctgggaccaggactcctgtctgcattcccaaatttggctctgagtcgaggcaacctgcacacaagaccccaccaaggaatgtgcaaggactgagatctgcagacttgtgggtaactgatcacagacctcagcatgggggtgaccagggtgactcttcaatccctatccccatgggctgggtacaggatatcctcctaccccatgactgtcttagggagacttggggtaccttatggatttgatgaatgtgggggaactcagaggaactggggccaccaaggttggaaaagggtttggttcttgactttgtattccttccaatacagcaataaactttgtctccctttttattcattc

SEQ ID NO: 139240 - protein, 917 aa, Artificial Sequence
  derived and/or modified sequence
MAFIRKKQQEQQLQLYSKERFSLLLLNLEEYYFEQHRANHILHKGSHHERKIRGSLKICSKSVIFEPDSISQPIIKIPLRDCIKIGKHGENGANRHFTKAKSGGISLIFSQVYFIKEHNVVAPYKIERGKMEYVFELDVPGKVEDVVETLLQLHRASCLDKLGDQTAMITAILQSRLARTSFDKNRFQNISEKLHMECKAEMVTPLVTNPGHVCITDTNLYFQPLNGYPKPVVQITLQDVRRIYKRRHGLMPLGLEVFCTEDDLCSDIYLKFYEPQDRDDLYFYIATYLEHHVAEHTAESYMLQWQRGHLSNYQYLLHLNNLADRSCNDLSQYPVFPWIIHDYSSSELDLSNPGTFRDLSKPVGALNKERLERLLTRYQEMPEPKFMYGSHYSSPGYVLFYLVRIAPEYMLCLQNGRFDNADRMFNSIAETWKNCLDGATDFKELIPEFYGDDVSFLVNSLKLDLGKRQGGQMVDDVELPPWASSPEDFLQKSKDALESNYVSEHLHEWIDLIFGYKQKGSDAVGAHNVFHPLTYEGGVDLNSIQDPDEKVAMLTQILEFGQTPKQLFVTPHPRRITPKFKSLSQTSSYNASMADSPGEESFEDLTEESKTLAWNNITKLQLHEHYKIHKEAVTGITVSRNGSSVFTTSQDSTLKMFSKESKMLQRSISFSNMALSSCLLLPGDATVITSSWDNNVYFYSIAFGRRQDTLMGHDDAVSKICWHDNRLYSASWDSTVKVWSGVPAEMPGTKRHHFDLLAELEHDVSVDTISLNAASTLLVSGTKEGTVNIWDLTTATLMHQIPCHSGIVCDTAFSPDSRHVLSTGTDGCLNVIDVQTGMLISSMTSDEPQRCFVWDGNSVLSGSQSGELLVWDLLGAKISERIQGHTGAVTCIWMNEQCSSIITGGEDRQIIFWKLQY

SEQ ID NO: 139241 - DNA, 2754 bp, Artificial Sequence
  derived and/or modified sequence
atggcctttatccgtaaaaagcagcaagaacagcagcttcagctctatagtaaggagaggttcagtctgctcctccttaatcttgaagaatattactttgaacagcatcgcgcaaatcatatccttcacaaggggtcccaccatgaaagaaaaataagagggtccctgaagatttgttccaagtccgtcatctttgagcccgacagtatatcacagcccatcatcaagattccacttcgtgactgtatcaagatagggaaacatggtgaaaatggcgcaaatcggcatttcacaaaagctaagtccggcgggatctccctgattttctcacaagtgtacttcatcaaagagcataacgtggtggctccctacaagatagaacgggggaagatggaatatgtttttgaattggatgtgcctggcaaggtcgaggacgtcgtggaaacgcttctccaactgcatagggctagctgtctggataagctgggtgaccagaccgccatgattaccgcgatcctccaatcacgcctagccaggacctcattcgacaaaaatcggtttcagaacatctccgagaaactgcatatggagtgcaaggccgagatggtgaccccactcgttacaaaccccggccacgtgtgcatcaccgacactaacttgtacttccagccgttgaatggttaccccaaacccgttgtgcagatcaccttgcaagatgtaagacgtatctacaaacggcgccatggtcttatgcccctgggactggaggtcttttgtacggaagatgacctctgttccgacatctatctaaagttctatgagccgcaggacagggacgacttgtacttctatatcgccacgtaccttgaacatcacgtcgctgaacatacagctgaatcatacatgttacagtggcaacgggggcacctttctaactatcagtacttgctgcaccttaataatctcgccgatcgttcctgcaatgacttgagccagtacccagtcttcccttggatcattcacgattattcctcctccgagctagacctgagcaacccaggtactttcagagacctgtccaagccagtcggcgctctgaacaaggaacgcctagaaagattgctcacaagataccaggaaatgcctgagccaaagtttatgtacggatcgcattactccagcccgggatacgtgctgttttatcttgtgagaatcgcgcccgagtatatgctttgtttacaaaacgggagatttgacaatgctgataggatgtttaacagcattgctgagacctggaagaattgcctcgacggggccacggacttcaaagaactaatccctgaattctatggcgacgacgtttcttttctggtaaattcactgaaacttgacctggggaaaaggcagggggggcaaatggtggacgacgtggagctccccccctgggcgagctcaccagaagactttctccagaagagcaaagatgccttggaatctaattacgtgagcgagcatctgcacgaatggatcgatctgatctttggctataaacagaaggggtccgacgcagtcggagctcacaacgtgttccaccctctgacttacgagggtggggtagaccttaactctattcaagatcccgatgaaaaggttgctatgctgacccagattttggaattcggacagaccccaaaacagctgttcgtgaccccacatcccaggcggatcacacccaaattcaagagtctttctcagacttcctcctacaacgcgtctatggcggactcccctggagaggaatcctttgaggacctcactgaagagtcgaagacactggcgtggaacaacattacaaagttgcagctgcacgaacattataagattcataaagaagccgtaaccggcattaccgtgtctagaaacgggtcctctgtattcacgacctctcaggactctactctgaagatgttcagcaaggaaagcaagatgctgcagcgaagcatttcgtttagtaacatggccctgtcatcatgcctactgctccctggggacgctacagtgattacctcgtcatgggacaacaatgtatatttctactccatcgcctttggccgccggcaggacacccttatgggccacgacgatgccgtgtccaagatctgctggcatgataaccgactctactcagccagttgggactctacagtgaaagtctggtccggcgtgcctgccgagatgccaggtaccaagcgtcatcattttgatctcctggccgagcttgagcatgacgtgagcgtggacactatttcgctcaacgctgcaagcacattgctggttagtgggaccaaagaaggtaccgtgaatatctgggatttgacaactgcgaccttgatgcaccagattccgtgccactcagggattgtgtgtgacactgccttcagccccgattcccgccacgtactctctactgggactgacgggtgcttgaatgttatcgacgttcagacgggcatgttgatcagtagcatgactagcgatgaaccacagcgttgctttgtgtgggatggtaattctgtcttgagtgggagccagtccggcgagttacttgtttgggacctgctgggcgcaaaaattagcgagcgcattcaaggacacactggcgccgtgacatgcatctggatgaacgagcagtgttcgtcaatcataacaggcggtgaggaccgtcagatcatattctggaaactgcagtactag

SEQ ID NO: 139242 - DNA, 2754 bp, Artificial Sequence
  derived and/or modified sequence
atggccttcatcaggaagaagcagcaggagcagcagctgcagctgtacagcaaggagcgcttcagcctgctgctgctgaacctggaggagtactactttgagcagcaccgggccaaccacatcctgcacaagggcagccaccacgagaggaagatccggggcagcctgaagatctgcagcaagagcgtcatctttgagccagacagcatcagccagcccatcatcaagatccccctgcgggactgcatcaagattggcaagcacggggagaatggagccaacagacacttcaccaaggccaagagcggcggcatcagcctcatcttcagccaggtgtacttcatcaaggagcacaacgtggtggccccctacaagattgaaagaggcaagatggagtatgtgtttgagctggatgtgcctgggaaggtggaggatgtggtggagaccctgctgcagctgcaccgggccagctgcctggacaagctgggggaccagacagccatgatcacagccatcctgcagagccggctggcccggaccagctttgacaagaaccgcttccagaacatcagcgagaagctgcacatggagtgcaaggccgagatggtgacccccctggtgaccaaccctggccacgtgtgcatcacagacaccaacctgtacttccagcccctgaatggctaccccaagcctgtggtgcagatcaccctgcaggatgtgcggcgcatctacaagagaagacatggcctgatgcccctgggcctggaggtgttctgcacagaagatgacctgtgcagcgacatctacctgaagttctatgagccccaggacagagatgacctgtacttctacatcgccacctacctggagcaccacgtggccgagcacacagctgagagctacatgctgcagtggcagaggggccacctgagcaactaccagtacctgctgcacctgaacaacctggccgacaggagctgcaatgacctgagccagtaccctgtgttcccctggatcatccatgactacagcagcagcgagctggacctgagcaaccctggcaccttccgggacctgagcaagcctgtgggcgccctgaacaaggagcggctggagcggctgctgacccgctaccaggagatgcctgagcccaagttcatgtatggcagccactacagcagccctggctacgtgctcttctacctggtgagaattgcccctgagtacatgctgtgcctgcagaatggccgctttgacaatgctgacaggatgttcaacagcattgctgagacctggaagaactgcctggatggagccacagacttcaaggagctgatccctgagttctatggagatgatgtgtccttcctggtgaacagcctgaagctggacctgggcaagaggcagggcggccagatggtggatgatgtggagctgcccccctgggccagcagccctgaggacttcctgcagaagagcaaggatgccctggagagcaactacgtgtctgagcacctgcacgagtggattgacctgatcttcggctacaagcagaagggcagtgatgctgtgggcgcccacaacgtgttccaccccctgacctatgaaggaggagtggacctgaacagcatccaggaccctgatgagaaggtggccatgctgacccagatcctggagtttggccagacccccaagcagctgtttgtgaccccccacccccggcgcatcacccccaagttcaagagcctgagccagaccagcagctacaatgcctccatggctgacagccctggagaggagagctttgaggacctgacagaggagagcaagaccctggcctggaacaacatcaccaagctgcagctgcacgagcactacaagatccacaaggaggccgtgacaggcatcaccgtgtccagaaatggcagcagcgtcttcaccaccagccaggacagcaccctgaagatgttcagcaaggagagcaagatgctgcagaggagcatctccttcagcaacatggccctgagcagctgcctgctgctgcctggagatgccaccgtcatcaccagctcctgggacaacaacgtgtacttctacagcatcgcctttggaagacggcaggacaccctgatgggccatgatgatgctgtgtccaagatctgctggcatgacaacagactctacagcgcctcctgggacagcacagtgaaggtgtggagcggcgtgcctgctgagatgcctggcaccaagaggcaccactttgacctgctggccgagctggagcatgatgtgtctgtggacaccatcagcctgaatgctgccagcaccctgctggtgtctggcaccaaggagggcaccgtgaacatctgggacctgaccacagccaccctgatgcaccagatcccctgccacagcggcatcgtgtgtgacacagccttctccccagacagcagacatgtgctgagcactggaacagatggctgcctgaatgtgattgatgtgcagacaggcatgctgatcagctccatgaccagtgatgagccccagcgctgctttgtgtgggatggcaacagcgtgctgagcggcagccagagcggggagctgctggtgtgggacctgctgggcgccaagatcagcgagcgcatccagggccacactggagctgtgacctgcatctggatgaatgagcagtgcagcagcatcatcactggaggagaggaccggcagatcatcttctggaagctgcagtactag

SEQ ID NO: 139243 - DNA, 2754 bp, Artificial Sequence
  derived and/or modified sequence
atggccttcatccggaagaagcagcaggagcagcagctgcagctgtactccaaagaaagattctctctgctgctgttaaatctcgaagagtactattttgaacaacacagagccaaccacatcctgcataaggggtcccatcacgaacggaaaatcaggggatctctgaaaatctgcagcaaatccgtgatattcgaaccggattccatttcccagcccatcatcaagattccgctgcgtgactgtattaagattggcaaacatggagaaaacggagcaaatcggcacttcactaaggctaagtctggcgggatttcactaatctttagccaggtgtactttattaaggaacataacgtggttgccccatacaagatcgagagagggaaaatggaatacgttttcgaactggatgtgccgggcaaggtggaggacgtggtagaaactctcctgcagctccatcgggctagttgtctggacaagcttggtgatcaaacggccatgataaccgcaattttgcagtctagactggctagaaccagctttgataagaaccggttccaaaatataagtgaaaaactgcacatggaatgtaaagctgaaatggttaccccactggtaacgaaccccggacacgtctgtataaccgacaccaatctgtacttccaaccgctcaatgggtacccaaagccagttgtgcagatcactctgcaggacgtgcgcaggatttataagcggagacacgggctgatgcccctgggattggaagtgttttgtacagaagatgatctatgctctgacatctaccttaaattctatgaaccccaagatagagacgacctctacttctacattgctacatacctcgagcatcacgtagctgagcacacagcggaaagctatatgctgcagtggcagagagggcacctgagcaactaccagtatttgctgcacctcaacaacctggcagatagaagctgtaatgatctctcacaatatcctgtgttcccttggatcattcatgattacagctcaagtgagttagatcttagcaatccaggcacattccgcgatctttcaaagcccgtaggggcactgaacaaggagagattggaaaggctgctcaccagataccaggaaatgccggagcccaaatttatgtatgggtcgcattacagttcacccggctacgtgttgttctacttggtgcggattgcccccgagtatatgctgtgcctccaaaatggcaggttcgacaatgccgaccgcatgtttaacagcatcgccgaaacctggaagaattgtttggatggagcgacagatttcaaagaactaatacccgagttctacggcgacgatgtgtcatttctcgtcaacagtttaaagctggacctcggaaagagacaaggcggccagatggtggacgatgtggaactgcctccctgggcatcgtcccccgaagattttctgcagaagtccaaggatgctctcgagtctaactacgtctctgaacacttgcacgagtggattgacttgatctttggttacaagcagaagggctctgacgctgttggcgcacataatgtgttccacccgctcacatatgagggcggagtggacttaaattctatccaagatcccgacgagaaggttgcgatgctcacacagatcttagaatttggccagaccccgaaacagctctttgtgaccccgcaccctagacgaattacccccaagttcaagtcactttcacaaacctcctcgtataacgcctctatggccgactctcccggggaggaaagcttcgaagatctgaccgaggaaagtaagacacttgcctggaacaatatcacaaagctgcagctccacgagcactataagattcacaaggaggcagtcacgggcatcaccgtgagcagaaatggatcgagtgtctttactacatcccaggattctacgttgaaaatgttttccaaggagtccaagatgctgcaaaggagcatcagttttagcaatatggcactcagtagctgcctgctactgcccggtgacgctacagtcattacatcaagctgggacaataatgtatacttctacagtattgcctttggacggcgccaggacactctgatgggtcacgatgacgccgtgtcaaaaatttgttggcacgacaataggctatactctgccagttgggactctaccgttaaggtttggtcgggtgtcccagcggagatgccggggaccaagcggcaccactttgacctgctcgctgaactcgagcacgacgtgtcagttgacaccatcagcttaaacgccgcctccaccctgctggtcagcggcacaaaggaagggactgtgaatatctgggacttgacaacggccacactgatgcaccagattccctgtcatagtggaatcgtgtgtgacacggcattttcacctgactctcgtcacgtcttgtctaccgggacagacgggtgcctgaacgtcattgacgtccagaccggcatgctgataagttctatgacctcagacgagccgcaacggtgcttcgtctgggatgggaacagtgtgctctcaggctcccagagcggagagctcctggtgtgggatctgctcggcgcaaaaatcagcgaacggatccagggtcacacaggagccgtgacctgcatttggatgaatgagcaatgtagctcaataatcacagggggggaagatcggcagataatcttctggaagctgcagtactag

SEQ ID NO: 139244 - DNA, 3569 bp, Artificial Sequence
  derived and/or modified sequence
ccggagtccccacgcgaggatgctgcggtgagcgcggccgggacgccgcgtcgggctctcggccgcccagcggcgccgcaggggaagccaggccggcagccgcgcgctccccagccggccaccaatcccgccctccccggctcctccggacctcctcggcaggcggcggcggggcctgcctgtgcgctctgcgcccgcccgcgcctaccctccatggcgtttatccggaagaagcagcaggagcagcagctgcagctctactccaaggagagattttccttgctgctgcttaacttggaggagtactactttgaacagcatagagccaatcacattttgcacaagggcagtcaccatgaaaggaaaatcagaggctccttaaaaatatgttcaaaatcggtgatttttgaaccagattcaatatcccagcccatcatcaagattcctttgagagactgtataaaaataggaaagcatggagaaaatggagccaatagacacttcacaaaggcaaaatctgggggtatttcactcattttcagtcaggtatatttcattaaagaacataatgttgttgcaccatataaaatagaaaggggcaaaatggaatatgtttttgaattggatgttcccgggaaagtggaagatgttgtggagacgttgcttcagcttcacagagcatcctgccttgacaaattgggtgaccaaaccgccatgataacagctattttgcagtctcgtttagctagaacatcatttgacaaaaacaggttccaaaacatttctgaaaagctgcacatggaatgcaaagcagaaatggtgacgcctctggtgactaatcctggacacgtgtgcatcacggacacaaacctgtattttcagcccctcaacggctacccgaaacctgtggtccagataacactccaagatgtccgccgcatctacaaaaggaggcacggcctcatgcctctgggcttggaagtattttgcacagaagatgatctgtgttccgacatctacctaaagttctatgaacctcaagatagagatgatctctatttttacattgccacatacctagagcaccatgtggcggagcacactgctgagagctacatgctgcagtggcagcgtggacacctttccaactatcagtacctccttcacctcaacaacctggccgaccgcagctgcaacgacctctcccagtaccctgtgtttccatggataatacatgattattccagctcagaactagatttgtcaaatccaggaaccttccgggatctcagtaagccagtaggggccctaaataaggaacggctggagagactactgacacgctaccaggaaatgcctgaaccaaagttcatgtatgggagtcactactcttccccgggttatgtacttttttatcttgttaggattgcaccagagtatatgctgtgcctgcagaatggaagatttgataatgcagatagaatgttcaacagtattgcagaaacttggaaaaactgtctggatggtgcaacggattttaaagagttaattccagaattctatggtgatgatgtgagctttctagtcaatagcctgaagttggatttgggaaagagacaaggaggacagatggttgacgacgtggagcttcccccttgggcttccagtcccgaggactttctccagaagagcaaagatgcattggaaagcaattatgtgtctgaacaccttcacgagtggattgatctaatatttggctacaaacaaaaagggagtgatgcagttggggcccataatgtatttcatcccctgacctatgaaggaggtgtagacttgaacagcatccaggatcctgatgagaaggtagccatgcttacgcaaatcttggaatttgggcagacaccaaaacaactatttgtgacaccacatcctcgaaggatcaccccaaagtttaaaagtttgtcccagacctccagttataatgcttctatggcagattccccaggtgaagagtcttttgaagacctgaccgaagaaagcaaaacactggcctggaataacatcaccaaactgcagttacacgagcactataaaatccacaaagaagcagttactggaatcacggtctctcgcaatggatcttcagtattcacaacatcccaagattccaccttgaagatgttttctaaagaatcaaaaatgctacaaagaagtatatcattttcaaatatggctttatcgtcttgtttacttttaccaggagatgccactgtcataacttcttcatgggataataatgtctatttttattccatagcatttggaagacgccaggacacgttaatgggacatgatgatgctgttagtaagatctgttggcatgacaacaggctatattctgcatcgtgggactctacagtgaaggtgtggtctggtgttcctgcagagatgccaggcaccaaaagacaccactttgacttgctggccgagctggaacatgatgtcagtgtagatacaatcagtttaaatgctgcaagcacactgttagtttccggcaccaaagaaggcacagtgaatatttgggacctcacaacggccaccttaatgcaccagattccatgccattcagggattgtatgtgacactgcttttagcccagatagtcgccatgtcctcagcacaggaacagatggctgtcttaatgtcattgatgtgcagacaggaatgctcatctcctccatgacatcagatgagccccagaggtgctttgtctgggatggaaattccgttttatctggcagtcagtctggtgaactgctcgtttgggacctccttggagcaaaaatcagtgagagaatacagggccacacaggtgctgtgacatgtatatggatgaatgaacagtgtagcagtatcatcacaggaggggaagacagacaaattatattctggaaattgcagtattaagtgccttttcctctcctgaatattaaattgaactctatttaatgcatttttaaaccaaacttttaaacggactggtgaatgtgcaatgttagtaattagaagttttaccacatggaaaatttgtggttttaaactttctaaatcatggtgacttcattgaaagccattagttgctattctcttagggcagataaaatgcggctgtgttaggaaaaacatgttacactgtaaggcagatgatcgtccccgtatgatgattgtcagaagacaggactaagtagcagagaatagctaagagataaattgggctggggaaacttgtcagaaagcactgaacaattaagaaattttccaagaaaatgtgcagtattctctgctacttctgaatctgttttgtcttcctaatctatcacaattgccacccatcgggttttgggtgtgtgttttcatagcgtggttactttctataatgctgtacccagattctaagaacctggagaaggattagcagttcttagtaagtttactgtgtataggaacggtttgtatttcattacagctattcatcttttctacattaaaaatatttttctctaaagaaa

SEQ ID NO: 139245 - DNA, 2754 bp, Artificial Sequence
  derived and/or modified sequence
atggcttttatcaggaaaaagcagcaggaacagcaattgcaactgtattcgaaggagcggttttcccttctactattgaacttggaggaatattatttcgagcagcaccgggctaatcatatcctgcacaaggggtcccaccacgaacggaaaatccgaggttccctcaaaatttgtagcaaatccgtgattttcgagcccgacagcatctcccagcctatcattaagatcccacttagagattgtatcaagattgggaaacacggcgagaatggggcaaatcgccactttaccaaggctaaatctggcggtatctcactgatctttagccaggtctactttattaaagagcacaacgtggtagctccttacaaaattgagagaggcaagatggaatacgtgttcgagttggacgtgcctggaaaggtagaagacgtggtcgagactcttctacagttgcaccgtgccagttgtctcgataagctgggggatcagacagctatgattacagccatactccagtccaggctagccagaacttcattcgacaaaaatcgattccagaatatatcggaaaaattgcatatggagtgtaaagcggagatggtcacacctctagtgaccaatcccggtcacgtatgcattaccgacactaatctgtacttccagccccttaatggctaccccaagcctgtggtccaaatcaccttacaagatgttcgcaggatttacaaaaggcggcacggcctcatgccgttagggctcgaagtcttctgcactgaagacgatctgtgctcggacatctatcttaaattctacgaacctcaggaccgcgatgatttgtacttttacatcgcgacctaccttgagcaccacgtcgcagagcacactgctgagtcctatatgttgcaatggcaacggggacacctgtcaaactatcagtacctgctgcaccttaataacctggctgaccgctcctgtaacgatctgtcccagtaccctgtgtttccctggatcatccatgactactcatcttctgaactcgacctttccaacccaggtacgtttcgtgacctgtccaaacccgttggcgcactcaacaaagaaaggttagagcgcctactgacccgttaccaggagatgcctgaaccaaagttcatgtacgggtcacactacagctctccaggatacgttcttttctacctggttcgaatcgcaccagagtacatgctttgtctgcagaacggacgattcgacaatgccgatcggatgttcaactccatagccgaaacgtggaagaactgcctggatggcgcaacggacttcaaggagctgattcccgagttctacggcgacgacgtcagctttctcgtgaactctctaaagttggatttgggaaaacgtcaagggggacagatggtggatgatgtggagttgcccccatgggcaagcagcccagaggattttctgcagaagtccaaggacgcactggaaagtaattacgtctctgagcacttgcacgagtggatcgacctcatctttggatacaaacagaaaggctcagatgccgtgggtgctcacaatgtgttccatcctttgacatatgagggcggtgtggatctcaactccattcaggatcctgacgaaaaggtggccatgttgactcagatactcgagttcggtcagactccgaagcagttgttcgtgactcctcaccccagacgaatcactcccaagttcaagtctctatctcagaccagcagttataacgcctcaatggcagactcccccggtgaagagagttttgaggacttgaccgaggagtctaagaccctagcttggaacaacatcacaaagttgcagttacacgagcactacaagatccacaaagaagcagtgacagggatcaccgtgtccaggaatggctccagcgttttcactactagccaggactccacccttaagatgttcagcaaagagtctaaaatgctgcaacgctctatttccttttctaacatggccttgagttcctgtctcttgttgcccggagacgcaaccgtaattacaagcagctgggacaataatgtgtatttttacagcatcgccttcggtcggaggcaagatacgctcatgggccacgatgatgctgtctctaagatatgttggcacgataataggctctacagtgcaagttgggactccaccgttaaggtatggagcggagtccccgctgagatgcccggaaccaagaggcatcactttgaccttttagccgagctggagcacgatgtaagcgtcgatactatctccctcaacgccgcatccaccctactggtgagcggaaccaaggaggggactgtaaacatctgggacctgaccacggcaactctgatgcaccagatcccatgccacagcggtattgtttgtgacactgcattctccccagattccaggcacgttctttctaccggtacggacggctgcctgaacgtcattgatgtacagactggcatgctgatttcctctatgactagtgatgaaccacagcgctgtttcgtatgggacgggaactccgtcttatctggaagtcagtcaggcgagttactggtgtgggatctgctcggcgctaagatttctgaacggattcagggtcacacgggcgcagtaacttgtatttggatgaacgaacagtgctcctccattatcacaggaggtgaagatcgccagattatcttttggaaactgcagtactag

SEQ ID NO: 139246 - DNA, 2754 bp, Artificial Sequence
  derived and/or modified sequence
atggctttcatccgcaagaagcagcaagaacaacaactgcaattgtattctaaagaacgtttttctctgctcctgctgaacttggaagagtactatttcgagcagcaccgggcgaatcacatcctccataaggggtcccatcacgaaaggaagattcgaggtagtctgaagatatgcagtaagtccgtcattttcgaacctgactccattagtcagcctattattaagatcccgctgcgcgactgtatcaaaatcgggaaacacggcgagaatggagcaaataggcatttcaccaaagccaagtcaggcgggatcagcttaatcttttcacaggtatactttataaaagaacataacgtggtggccccttataaaatcgaacggggaaagatggaatacgttttcgagctagacgtaccaggaaaagtggaggacgttgtcgagactcttttgcagctccaccgagcaagctgtctggataagcttggagatcagactgccatgatcacagccatcttgcagagccgactcgcaaggacatcattcgacaagaatcgtttccagaacatctccgaaaaactgcacatggagtgcaaagctgagatggtcacaccacttgtaacaaatcccgggcacgtctgtatcactgacacgaatctgtacttccaacccttgaatggctacccgaagcctgtggtccagattacccttcaggatgtgcggcgaatctacaaaagaagacatggcctaatgcccctaggtctggaggtgttctgcaccgaggacgacctatgttctgatatatatttgaaattttatgagcctcaggatcgcgatgacctctacttctatattgccacttacttggaacaccatgtggcagagcacacggctgagagctacatgctacagtggcagaggggacatctgagtaattatcagtacctcctccatctgaacaacctagctgacagatcatgtaacgatctgtctcaatacccggtgttcccctggattatccacgactatagctcttctgagctggatttatcaaatccaggtacatttagggatttatccaagccggtcggggcactgaacaaggaacggttagagcggcttttgactcggtaccaggagatgcctgagcccaagtttatgtacggttcccactattcgtcccccggatacgtacttttctacttagttagaatagcccctgagtacatgctgtgccttcagaacggaagattcgacaatgctgaccggatgtttaattctatcgccgagacctggaaaaattgcctggatggcgcgaccgatttcaaggaattaatacccgagttctacggtgacgacgtatctttcctggtgaactcactgaagctggacttaggtaaacgtcagggtggacagatggtcgatgatgttgaattgcctccttgggcctcctcccctgaggatttcctgcagaagtccaaggacgctttagagagcaactacgtgtctgaacatctccacgaatggatagacctcatattcggttacaagcagaaggggtcagacgccgtgggcgcccacaatgtcttccaccctttgacctatgaaggcggtgtggacttaaacagcatccaggaccctgatgagaaagttgccatgcttactcagatcctagaattcggccagacccccaagcaattgttcgtcactccacaccctaggagaattacacctaaatttaagagtctaagccagaccagcagctataatgcgtcaatggccgatagcccgggcgaggaatctttcgaagatctgactgaagagtctaaaactctggcgtggaacaatatcactaagcttcagctccacgaacactacaaaatacacaaagaagcggtgactggtatcaccgtcagccggaatggatccagcgtgttcactacaagtcaggactccactcttaagatgttttccaaagaatctaagatgctgcagcgatctatttccttctccaacatggctctgtcatcttgtctgctgttacctggcgacgccaccgtcattacctcaagctgggacaacaacgtgtacttttatagcatagctttcggtaggcggcaggataccctgatgggtcacgatgatgcagtttcaaagatttgttggcacgacaacagattgtattccgcctcctgggatagtactgtcaaggtgtggagcggagtaccggcagagatgcccggaaccaagcgacaccattttgacctgctcgctgaacttgaacatgatgtgtcagtggacacaatctctctgaacgcagcttccactcttctcgttagcgggaccaaagaagggacagttaatatttgggatctcacaacagccacgttaatgcaccagattccttgccactcaggcattgtgtgcgacacagccttttcccctgactcacgccacgtgctttctaccggcactgacggctgtctaaatgtgattgacgtgcagactggtatgctgattagtagtatgacaagtgatgagccacagagatgcttcgtgtgggacggcaatagcgtcctgtctgggtctcagagcggggaactgctggtctgggatcttctcggagccaagataagtgaaagaatccaaggccataccggggcagttacctgtatttggatgaatgaacagtgttcttccatcattacagggggagaggacagacagatcatattctggaagctccagtactag

SEQ ID NO: 139247 - DNA, 2754 bp, Artificial Sequence
  derived and/or modified sequence
atggctttcatacgaaaaaagcagcaagagcagcagttgcaactgtactctaaggaacgtttttcactactgctgttgaacctagaggaatactacttcgagcagcacagggcaaaccacatcctgcacaaaggatcacaccatgagaggaaaatccgtggatcactcaagatctgtagcaagtcagtgatttttgaacccgatagcatttctcaacctatcattaaaatcccattacgcgactgcattaagatcggtaaacacggtgagaatggcgcaaacagacacttcaccaaggcaaagtcgggggggattagcttaattttttcacaagtatatttcattaaagaacataacgtcgtggctccatacaagattgaacgagggaagatggaatatgtgttcgagttggacgtgcctgggaaggttgaagacgtggtggaaaccctacttcagctgcatcgcgcgtcttgcttagataaactcggggaccagacagctatgattacagccattttacagtctagacttgctagaacttccttcgataaaaatagattccagaacatttcagaaaaactgcacatggaatgcaaagcggaaatggtgacacctctcgtcacaaaccccggacatgtatgcataacagatacaaatctctatttccagcctcttaatgggtaccctaaaccagtagtccagatcacgctgcaggacgtacgtagaatctacaagaggaggcatggcctgatgccccttggcctggaagtgttttgtaccgaagacgacctgtgtagcgacatatacctcaaattctatgaaccacaggacagagacgacctgtacttttatatagctacttatctggagcatcacgttgcagaacataccgcagagagctacatgctccaatggcaacgagggcatctttctaattatcagtacttgttgcatctcaacaatctcgcagaccggtcctgtaacgatctctcacagtatcccgtgtttccttggatcatccatgactactcttcatccgagttagacttgagcaatcctggcaccttccgggacctttctaagccggtcggtgctctcaataaggaacgactcgaacgcttgttgacccgctaccaggaaatgccagagccaaaatttatgtacggatcacattacagtagcccagggtacgtgctgttttacctcgtgcgcatcgcacctgagtacatgctctgtcttcagaacgggaggttcgataacgcagaccgcatgttcaacagcattgccgagacttggaagaattgccttgatggcgcaaccgacttcaaagaactgatacctgaattctatggtgacgatgtatcttttctggttaactccttaaaactcgatctgggaaaacggcagggtggccagatggttgatgacgttgagctccccccatgggcttcctcgccagaagactttctgcaaaaaagtaaggatgcattggaatcaaactatgtatccgagcacctgcatgagtggattgacctaatcttcggatataagcagaagggatcagatgccgtcggcgctcacaatgtcttccatcctctcacctatgaaggcggcgtagatctgaactcaattcaggatcctgacgagaaagtggcaatgctcacccaaatattagaatttggacagacacctaagcagctctttgtgacaccacacccccgtcgtatcactccaaagtttaagtctttatctcagactagttcatataacgcaagtatggccgacagccccggagaagagtcattcgaggatctaactgaagaatctaaaacactggcatggaataatataactaaactgcagctccacgagcattataagatacacaaagaagctgtgacaggtatcacggtatccaggaatgggtcaagtgtgtttaccacctcccaggactccaccttaaaaatgttttctaaagaaagcaagatgctgcaacgctctatctctttttctaacatggcacttagttcatgcctcttgctcccaggagatgcaactgtcattacctcttcatgggataacaacgtctatttctattctatcgcctttggaagacgacaggacaccttgatgggacacgatgacgccgtctctaagatatgttggcatgataatcgcctgtacagcgccagttgggactccactgtgaaggtgtggtctggagtgcctgccgagatgccaggcacaaagcggcatcacttcgatctgctcgctgagctggaacatgatgtgtctgttgacactatttcgctcaacgctgcttcaacacttttggtttccggcaccaaggaagggacagtcaacatttgggatttgacaactgctacactgatgcatcaaattccttgccactcaggcattgtgtgcgacacagccttttcccctgactcacgccacgtgctttctaccggcactgacggctgtctaaatgtgattgacgtgcagactggtatgctgattagtagtatgacaagtgatgagccacagagatgcttcgtgtgggacggcaatagcgtcctgtctgggtctcagagcggggaactgctggtctgggatcttctcggagccaagataagtgaaagaatccaaggccataccggggcagttacctgtatttggatgaatgaacagtgttcttccattattacgggaggagaagatcggcaaattatcttttggaaattgcagtactag

SEQ ID NO: 139248 - DNA, 2754 bp, Artificial Sequence
  derived and/or modified sequence
atggccttcatcagaaagaagcagcaggagcagcagctgcagctgtacagcaaggagagattcagcctgctgctgctgaacctggaggagtactacttcgagcagcacagagccaaccacatcctgcacaagggcagccaccacgagagaaagatcagaggcagcctgaagatctgcagcaagagcgtgatcttcgagcccgacagcatcagccagcccatcatcaagatccccctgagagactgcatcaagatcggcaagcacggcgagaacggcgccaacagacacttcaccaaggccaagagcggcggcatcagcctgatcttcagccaggtgtacttcatcaaggagcacaacgtggtggccccctacaagatcgagagaggcaagatggagtacgtgttcgagctggacgtgcccggcaaggtggaggacgtggtggagaccctgctgcagctgcacagagccagctgcctggacaagctgggcgaccagaccgccatgatcaccgccatcctgcagagcagactggccagaaccagcttcgacaagaacagattccagaacatcagcgagaagctgcacatggagtgcaaggccgagatggtgacccccctggtgaccaaccccggccacgtgtgcatcaccgacaccaacctgtacttccagcccctgaacggctaccccaagcccgtggtgcagatcaccctgcaggacgtgagaagaatctacaagagaagacacggcctgatgcccctgggcctggaggtgttctgcaccgaggacgacctgtgcagcgacatctacctgaagttctacgagccccaggacagagacgacctgtacttctacatcgccacctacctggagcaccacgtggccgagcacaccgccgagagctacatgctgcagtggcagagaggccacctgagcaactaccagtacctgctgcacctgaacaacctggccgacagaagctgcaacgacctgagccagtaccccgtgttcccctggatcatccacgactacagcagcagcgagctggacctgagcaaccccggcaccttcagagacctgagcaagcccgtgggcgccctgaacaaggagagactggagagactgctgaccagataccaggagatgcccgagcccaagttcatgtacggcagccactacagcagccccggctacgtgctgttctacctggtgagaatcgcccccgagtacatgctgtgcctgcagaacggcagattcgacaacgccgacagaatgttcaacagcatcgccgagacctggaagaactgcctggacggcgccaccgacttcaaggagctgatccccgagttctacggcgacgacgtgagcttcctggtgaacagcctgaagctggacctgggcaagagacagggcggccagatggtggacgacgtggagctgcccccctgggccagcagccccgaggacttcctgcagaagagcaaggacgccctggagagcaactacgtgagcgagcacctgcacgagtggatcgacctgatcttcggctacaagcagaagggcagcgacgccgtgggcgcccacaacgtgttccaccccctgacctacgagggcggcgtggacctgaacagcatccaggaccccgacgagaaggtggccatgctgacccagatcctggagttcggccagacccccaagcagctgttcgtgaccccccaccccagaagaatcacccccaagttcaagagcctgagccagaccagcagctacaacgccagcatggccgacagccccggcgaggagagcttcgaggacctgaccgaggagagcaagaccctggcctggaacaacatcaccaagctgcagctgcacgagcactacaagatccacaaggaggccgtgaccggcatcaccgtgagcagaaacggcagcagcgtgttcaccaccagccaggacagcaccctgaagatgttcagcaaggagagcaagatgctgcagagaagcatcagcttcagcaacatggccctgagcagctgcctgctgctgcccggcgacgccaccgtgatcaccagcagctgggacaacaacgtgtacttctacagcatcgccttcggcagaagacaggacaccctgatgggccacgacgacgccgtgagcaagatctgctggcacgacaacagactgtacagcgccagctgggacagcaccgtgaaggtgtggagcggcgtgcccgccgagatgcccggcaccaagagacaccacttcgacctgctggccgagctggagcacgacgtgagcgtggacaccatcagcctgaacgccgccagcaccctgctggtgagcggcaccaaggagggcaccgtgaacatctgggacctgaccaccgccaccctgatgcaccagatcccctgccacagcggcatcgtgtgcgacaccgccttcagccccgacagcagacacgtgctgagcaccggcaccgacggctgcctgaacgtgatcgacgtgcagaccggcatgctgatcagcagcatgaccagcgacgagccccagagatgcttcgtgtgggacggcaacagcgtgctgagcggcagccagagcggcgagctgctggtgtgggacctgctgggcgccaagatcagcgagagaatccagggccacaccggcgccgtgacctgcatctggatgaacgagcagtgcagcagcatcatcaccggcggcgaggacagacagatcatcttctggaagctgcagtactag

SEQ ID NO: 139249 - protein, 380 aa, Artificial Sequence
  derived and/or modified sequence
MTEEVIVIAKWDYTAQQDQELDIKKNERLWLLDDSKTWWRVRNAANRTGYVPSNYVERKNSLKKGSLVKNLKDTLGLGKTRRKTSARDASPTPSTDAEYPANGSGADRIYDLNIPAFVKFAYVAEREDELSLVKGSRVTVMEKCSDGWWRGSYNGQIGWFPSNYVLEEVDEAAAESPSFLSLRKGASLSNGQGSRVLHVVQTLYPFSSVTEEELNFEKGETMEVIEKPENDPEWWKCKNARGQVGLVPKNYVVVLSDGPALHPAHAPQISYTGPSSSGRFAGREWYYGNVTRHQAECALNERGVEGDFLIRDSESSPSDFSVSLKASGKNKHFKVQLVDNVYCIGQRRFHTMDELVEHYKKAPIFTSEHGEKLYLVRALQ

SEQ ID NO: 139250 - protein, 144 aa, Artificial Sequence
  derived and/or modified sequence
MTEEVIVIAKWDYTAQQDQELDIKKNERLWLLDDSKTWWRVRNAANRTGYVPSNYVERKNSLKKGSLVKNLKDTLGLGKTRRKTSARDASPTPSTDAEYPANGSGADRIYDLNIPAFVKFAYVAEREDELSLVKGSRVTVMEKC

SEQ ID NO: 139251 - protein, 110 aa, Artificial Sequence
  derived and/or modified sequence
MTEEVIVIAKWDYTAQQDQELDIKKNERLWLLDDSKTWWRVRNAANRTGYVPSNYVERKNSLKKGSLVKNLKDTLGLGKTRRKTSARDASPTPSTDAEYPANGSGADRIY

SEQ ID NO: 139252 - DNA, 435 bp, Artificial Sequence
  derived and/or modified sequence
atgacagaggaagtaatcgtcattgccaagtgggattacaccgcccaacaggatcaggaactggatattaagaaaaacgagcgactgtggcttctcgacgactccaagacgtggtggagagtgcgaaacgcggccaatcgcacgggctacgtgccttccaactacgtggaacggaagaactccctaaagaagggatctctggttaaaaatttaaaggatactctggggctcggcaagacacgccggaaaacttcagcacgggatgcgagccccacaccctccaccgacgccgagtacccggccaatgggtctggagcagatcgtatctatgatctgaatatccccgctttcgtgaagttcgcctacgtggctgagcgggaagacgagttaagtttagtgaaggggtctcgggtcaccgtgatggagaaatgctag

SEQ ID NO: 139253 - DNA, 1143 bp, Artificial Sequence
  derived and/or modified sequence
atgactgaggaggtcatcgtgatcgcgaagtgggactacaccgcccagcaggatcaggaactcgatatcaaaaagaacgaaagattgtggctgctcgacgactctaagacctggtggagagtccggaacgccgcgaacagaactggatacgtgccatccaactacgtggagcgaaagaatagccttaaaaaaggatccctggttaaaaatctaaaggatactctgggattgggcaaaacccgtcgtaagacaagcgcacgggatgcgtcgccaactccaagtaccgacgcggagtatccagccaatggttcgggggcagataggatatacgacctcaatatcccggctttcgtgaaattcgcctatgtcgccgaaagagaggacgaactgagcctggtcaagggttcccgagtgaccgtgatggagaagtgcagcgacggctggtggcgtggctcctataatggtcagatcggctggttccctagcaactatgtcctcgaggaggtcgacgaagcggccgccgagagtccaagcttcttatctcttcggaagggggccagcctgtccaatgggcaggggtctcgcgtcctccacgttgtgcagaccctgtatcccttctcttctgtcaccgaggaagaactgaattttgaaaagggcgaaacaatggaagtgatagagaagccagagaacgaccctgagtggtggaagtgcaaaaacgcccgtggccaggtaggtctcgtccctaaaaactacgttgtggtgttgtctgatgggcccgccttgcacccggctcatgccccacagattagctatactgggccttcttcttctgggcggttcgctggacgggagtggtactatggtaacgtgactagacatcaggccgaatgcgctctgaatgagcgaggcgtggaaggtgatttcctgattcgggacagcgaatctagccctagtgacttttctgtgagtctcaaggcctccggcaaaaataagcactttaaagttcagctcgtggataatgtgtactgtatcggacaacgccgctttcataccatggacgaacttgtcgagcattacaagaaagcaccgatcttcaccagcgagcatggcgagaagctatacctagttagagctttgcagtag

SEQ ID NO: 139254 - DNA, 333 bp, Artificial Sequence
  derived and/or modified sequence
atgactgaggaggtaatagtaatcgctaaatgggactacaccgcgcagcaggatcaggaactggatatcaagaagaacgaacggttgtggttgctcgatgattctaaaacatggtggagagttcgcaatgcggctaatcggaccggatatgttccatcaaactacgtggaacgcaagaattctttgaagaagggttcccttgtcaaaaatctgaaggatacactggggctcggaaaaacccgaagaaagacatctgcgcgcgatgctagccctacaccgtccaccgacgcggagtatccagctaatggatctggtgccgaccgcatctattag

SEQ ID NO: 139255 - DNA, 1143 bp, Artificial Sequence
  derived and/or modified sequence
atgacagaggaggtgattgttatcgcaaagtgggactacactgcccagcaggatcaagaactggatataaaaaaaaatgagcgtctgtggcttctggatgacagcaagacctggtggagagtgagaaacgctgcgaaccgaacaggatatgtcccttctaattacgttgagaggaaaaactcgcttaagaagggcagcttggtcaaaaacctcaaggataccctaggtttaggaaagaccagaagaaaaacttcagctcgggacgcgtcgcccactccgagcaccgatgccgagtatcccgccaacggttctggagcagaccggatctacgacttgaatatcccagccttcgtgaagttcgcatacgtggccgaacgagaggatgagctaagtctagtgaaggggagccgggtcactgtcatggagaagtgttccgacgggtggtggaggggatcttacaacgggcaaattgggtggttcccctccaattatgttctcgaagaggtagatgaggccgccgctgagagccccagtttcctgagcctgcggaaaggtgcctctctgtctaatgggcagggctctcgggtcctgcatgtggtccagacactctaccccttcagttctgtcacagaggaggagctgaatttcgaaaagggagaaacaatggaagtcatcgaaaaacctgaaaatgatcctgagtggtggaaatgcaagaacgctagagggcaggttgggctggttcctaagaattacgttgtagtactaagcgatggcccggcattacaccccgcccatgctccccagatctcttacacaggtcctagcagctccggcaggttcgctggaagggaatggtattacggcaacgtgactcgccaccaggcagaatgtgctttgaacgagaggggtgtggaaggcgatttcttaatccgcgactcagagtcaagcccgtctgatttcagcgttagtcttaaggcgtcaggcaaaaataaacatttcaaagtccagttggtggataacgtctattgtattggccaaagaaggtttcacacaatggatgagctcgtggagcactataagaaagccccaatttttacctcggagcatggggagaaactttacctggttagagcgcttcaatag

SEQ ID NO: 139256 - DNA, 435 bp, Artificial Sequence
  derived and/or modified sequence
atgacagaggaggtgattgtcatcgccaagtgggactacacagcccagcaggaccaggagctggacatcaagaagaatgaaaggctgtggctgctggatgacagcaagacctggtggagggtgagaaatgctgccaacagaacaggctacgtgcccagcaactacgtggagaggaagaacagcctgaagaagggcagcctggtgaagaacctgaaggacaccctgggcctgggcaagaccaggaggaagaccagcgccagagatgccagccccacccccagcacagatgctgagtacccagccaacggcagcggggctgaccgcatctatgacctgaacatcccagcctttgtgaagtttgcctacgtggccgagagagaagatgagctgagcctggtgaagggcagccgggtgacagtgatggagaagtgctag

SEQ ID NO: 139257 - DNA, 1143 bp, Artificial Sequence
  derived and/or modified sequence
atgacagaggaggtgattgtcatcgccaagtgggactacacagcccagcaggaccaggagctggacatcaagaagaatgaaaggctgtggctgctggatgacagcaagacctggtggagggtgagaaatgctgccaacagaacaggctacgtgcccagcaactacgtggagaggaagaacagcctgaagaagggcagcctggtgaagaacctgaaggacaccctgggcctgggcaagaccaggaggaagaccagcgccagagatgccagccccacccccagcacagatgctgagtacccagccaacggcagcggggctgaccgcatctatgacctgaacatcccagcctttgtgaagtttgcctacgtggccgagagagaagatgagctgagcctggtgaagggcagccgggtgacagtgatggagaagtgcagtgatggctggtggaggggcagctacaacggccagatcggctggttccccagcaactacgtgctggaggaggtggatgaggccgctgctgagagccccagcttcctgagcctgaggaagggggccagcctgagcaatggccagggcagccgggtgctgcacgtggtgcagaccctgtaccccttcagctctgtgacagaggaggagctgaactttgagaagggggagaccatggaggtgattgagaagccagaaaatgaccctgagtggtggaagtgcaagaatgcccggggccaggtgggcctggtgcccaagaactacgtggtggtgctgagtgatggccctgccctgcacccagcccacgccccccagatctcctacacaggccccagcagcagcggccgctttgctggccgggagtggtactatggaaatgtgaccaggcaccaggccgagtgtgccctgaatgaaagaggagtggagggggacttcctgatccgggacagcgagagcagccccagcgacttctctgtgtccctgaaggccagcggcaagaacaagcacttcaaggtgcagctggtggacaacgtgtactgcatcggccagaggcgcttccacaccatggatgagctggtggagcactacaagaaggcccccatcttcaccagcgagcacggggagaagctgtacctggtgcgggccctgcagtag

SEQ ID NO: 139258 - DNA, 333 bp, Artificial Sequence
  derived and/or modified sequence
atgacagaggaggtgattgtcatcgccaagtgggactacacagcccagcaggaccaggagctggacatcaagaagaatgaaaggctgtggctgctggatgacagcaagacctggtggagggtgagaaatgctgccaacagaacaggctacgtgcccagcaactacgtggagaggaagaacagcctgaagaagggcagcctggtgaagaacctgaaggacaccctgggcctgggcaagaccaggaggaagaccagcgccagagatgccagccccacccccagcacagatgctgagtacccagccaacggcagcggggctgaccgcatctactag

SEQ ID NO: 139259 - DNA, 2683 bp, Artificial Sequence
  derived and/or modified sequence
gccgcggggatcgtcaggccggagccgcgcggccgagcgggcggcgggcggaggggagggcttggcggccgggaggctcgcggcgcccgggccggcagggtccgcccgggccggcagcgtccgcccggcggcgggaggagggagcggcgcagacaaagagcggcgcctgggcgggcgcagcgcggccaccgccccgggacccgcgccgctgccctccggctccgcgggcggcccacggcgagatttcatgtgttctttgtatacaagcgacgtcccagattataattctctgctgagatttgagttggatttgaggatttggagaatccctgcagctttgtaacttcagaggtgtaattagctgaaaacatcatcgttttgaagagttctgcgttttgccagtcacctctcaactgtgtgccaaagaaggactccatgaaagatgacagaagaagttattgtgatagccaagtgggactacaccgcccagcaggaccaggagctggacatcaagaagaacgagcggctgtggttgctggacgactccaagacgtggtggcgggtgaggaacgcggccaacaggacgggctatgtaccgtccaactacgtggagcggaagaacagcctgaagaagggctccctcgtgaagaacctgaaggacacactaggcctcggcaagacgcgcaggaagaccagcgcgcgggatgcgtcccccacgcccagcacggacgccgagtaccccgccaatggcagcggcgccgaccgcatctacgacctcaacatcccggccttcgtcaagttcgcctatgtggccgagcgggaggatgagttgtccctggtgaaggggtcgcgcgtcaccgtcatggagaagtgcagcgacggttggtggcggggcagctacaacgggcagatcggctggttcccctccaactacgtcttggaggaggtggacgaggcggctgcggagtccccaagcttcctgagcctgcgcaagggcgcctcgctgagcaatggccagggctcccgcgtgctgcatgtggtccagacgctgtaccccttcagctcagtcaccgaggaggagctcaacttcgagaagggggagaccatggaggtgattgagaagccggagaacgaccccgagtggtggaaatgcaaaaatgcccggggccaggtgggcctcgtccccaaaaactacgtggtggtcctcagtgacgggcctgccctgcaccctgcgcacgccccacagataagctacaccgggccctcgtccagcgggcgcttcgcgggcagagagtggtactacgggaacgtgacgcggcaccaggccgagtgcgccctcaacgagcggggcgtggagggcgacttcctcattagggacagcgagtcctcgcccagcgacttctccgtgtcccttaaagcgtcagggaagaacaaacacttcaaggtgcagctcgtggacaatgtctactgcattgggcagcggcgcttccacaccatggacgagctggtggaacactacaaaaaggcgcccatcttcaccagcgagcacggggagaagctctacctcgtcagggccctgcagtgacggcgccccggccccacactcgcctcccgggccccacggtggagctgcccgcccggccttgtggcagaggctcctcccgcggggacggccccgacggcttctctgcgagtctctctttatgttcaggtcgcttggtcggttcgtctcccatttgccatccaggcctcacacccacactcgagcccacccggccggccagctttagaggaggggaggagcagggcgagttcacattattccttttccatcggaagtggcgctcgtgcattcaactcgttcccgctcatggaacccctctttaaaaagacgcagggcacctgtgagcgcaggagcgagcctaaggccacccagcggcagcgcccgtgtcctgggcactcagcgtgctgggcagagcaggtgcgatggccccagtcctagcagccctcgcccatgtcctgtgcccttacatggctcccggactgtgcagggagccgatacgtttgctgatagcaatactggaaccaccgggtgcgatggcagtgaggagactgcccagtgcctttggggctgtgcttgcaataaagaatttcctggaaaggcagtctgcaaaagagggaaccggtgactcagaaagacagatgttttggtaatttaccccaaatgtgccatccacatagtgctttttcctcttgcccttcggcttgtttgaatctcacaattatgtatttaattctcaaagaaatatgtatctgtagccgtttgttgacactaatacagatgattaaggaaaacagctgatctttggggaagggagctaccaacactttatacacacacacacgtgcacacacacacacacacacactatatatatatatattatttacagggaaatttttcagggtttacaaaagagtatgtgattggtagtaagagacacacagaatgtttatgaagaaattgcattttctttttcctttacatttgaacttctttatagtttaaatataacgtcttgagatggcacattcctacgattgaagaaggggtcttgagatcccctaaacttgcatacccagttttttggatattgtaataaaaaaaagtattatgacaagg

SEQ ID NO: 139260 - DNA, 790 bp, Artificial Sequence
  derived and/or modified sequence
ggagcttttgtgcccggcttcaggctctgcgccctgccccagatttacaggactctaacagccacctgaatgaaccaaagtttctcacaatcgctcggctctctcggtttttttcagggcgatttaatcaccgagtgcttttggaaaaatttgatatatttcatgtgttctttgtatacaagcgacgtcccagattataattctctgctgagatttgagttggatttgaggatttggagaatccctgcagctttgtaacttcagaggtgtaattagctgaaaacatcatcgttttgaagagttctgcgttttgccagtcacctctcaactgtgtgccaaagaaggactccatgaaagatgacagaagaagttattgtgatagccaagtgggactacaccgcccagcaggaccaggagctggacatcaagaagaacgagcggctgtggttgctggacgactccaagacgtggtggcgggtgaggaacgcggccaacaggacgggctatgtaccgtccaactacgtggagcggaagaacagcctgaagaagggctccctcgtgaagaacctgaaggacacactaggcctcggcaagacgcgcaggaagaccagcgcgcgggatgcgtcccccacgcccagcacggacgccgagtaccccgccaatggcagcggcgccgaccgcatctacgacctcaacatcccggccttcgtcaagttcgcctatgtggccgagcgggaggatgagttgtccctggtgaaggggtcgcgcgtcaccgtcatggagaagtgca

SEQ ID NO: 139261 - DNA, 2371 bp, Artificial Sequence
  derived and/or modified sequence
tggagtgaagtggtcgtttattggctggccctctgatatgaggtggtggtgaattggtgggcgtcagtgcagtaagtgagcgagccggacgtcgattgactggtcttcagaagcagaaggactccatgaaagatgacagaagaagttattgtgatagccaagtgggactacaccgcccagcaggaccaggagctggacatcaagaagaacgagcggctgtggttgctggacgactccaagacgtggtggcgggtgaggaacgcggccaacaggacgggctatgtaccgtccaactacgtggagcggaagaacagcctgaagaagggctccctcgtgaagaacctgaaggacacactaggcctcggcaagacgcgcaggaagaccagcgcgcgggatgcgtcccccacgcccagcacggacgccgagtaccccgccaatggcagcggcgccgaccgcatctacgacctcaacatcccggccttcgtcaagttcgcctatgtggccgagcgggaggatgagttgtccctggtgaaggggtcgcgcgtcaccgtcatggagaagtgcagcgacggttggtggcggggcagctacaacgggcagatcggctggttcccctccaactacgtcttggaggaggtggacgaggcggctgcggagtccccaagcttcctgagcctgcgcaagggcgcctcgctgagcaatggccagggctcccgcgtgctgcatgtggtccagacgctgtaccccttcagctcagtcaccgaggaggagctcaacttcgagaagggggagaccatggaggtgattgagaagccggagaacgaccccgagtggtggaaatgcaaaaatgcccggggccaggtgggcctcgtccccaaaaactacgtggtggtcctcagtgacgggcctgccctgcaccctgcgcacgccccacagataagctacaccgggccctcgtccagcgggcgcttcgcgggcagagagtggtactacgggaacgtgacgcggcaccaggccgagtgcgccctcaacgagcggggcgtggagggcgacttcctcattagggacagcgagtcctcgcccagcgacttctccgtgtcccttaaagcgtcagggaagaacaaacacttcaaggtgcagctcgtggacaatgtctactgcattgggcagcggcgcttccacaccatggacgagctggtggaacactacaaaaaggcgcccatcttcaccagcgagcacggggagaagctctacctcgtcagggccctgcagtgacggcgccccggccccacactcgcctcccgggccccacggtggagctgcccgcccggccttgtggcagaggctcctcccgcggggacggccccgacggcttctctgcgagtctctctttatgttcaggtcgcttggtcggttcgtctcccatttgccatccaggcctcacacccacactcgagcccacccggccggccagctttagaggaggggaggagcagggcgagttcacattattccttttccatcggaagtggcgctcgtgcattcaactcgttcccgctcatggaacccctctttaaaaagacgcagggcacctgtgagcgcaggagcgagcctaaggccacccagcggcagcgcccgtgtcctgggcactcagcgtgctgggcagagcaggtgcgatggccccagtcctagcagccctcgcccatgtcctgtgcccttacatggctcccggactgtgcagggagccgatacgtttgctgatagcaatactggaaccaccgggtgcgatggcagtgaggagactgcccagtgcctttggggctgtgcttgcaataaagaatttcctggaaaggcagtctgcaaaagagggaaccggtgactcagaaagacagatgttttggtaatttaccccaaatgtgccatccacatagtgctttttcctcttgcccttcggcttgtttgaatctcacaattatgtatttaattctcaaagaaatatgtatctgtagccgtttgttgacactaatacagatgattaaggaaaacagctgatctttggggaagggagctaccaacactttatacacacacacacgtgcacacacacacacacacacactatatatatatatattatttacagggaaatttttcagggtttacaaaagagtatgtgattggtagtaagagacacacagaatgtttatgaagaaattgcattttctttttcctttacatttgaacttctttatagtttaaatataacgtcttgagatggcacattcctacgattgaagaaggggtcttgagatcccctaaacttgcatacccagttttttggatattgtaataaaaaaaagtattatgacaa

SEQ ID NO: 139262 - DNA, 494 bp, Artificial Sequence
  derived and/or modified sequence
tggtgtgacttagtttttgattgctggatttcactggagtgaagtggtcgtttattggctggccctctgatatgaggtggtggtgaattggtgggcgtcagtgcagtaagtgagcgagccggacgtcgattgactggtcttcagaagcaggactccatgaaagatgacagaagaagttattgtgatagccaagtgggactacaccgcccagcaggaccaggagctggacatcaagaagaacgagcggctgtggttgctggacgactccaagacgtggtggcgggtgaggaacgcggccaacaggacgggctatgtaccgtccaactacgtggagcggaagaacagcctgaagaagggctccctcgtgaagaacctgaaggacacactaggcctcggcaagacgcgcaggaagaccagcgcgcgggatgcgtcccccacgcccagcacggacgccgagtaccccgccaatggcagcggcgccgaccgcatctacg

SEQ ID NO: 139263 - DNA, 435 bp, Artificial Sequence
  derived and/or modified sequence
atgaccgaggaggtgatcgtgatcgccaagtgggactacaccgcccagcaggaccaggaactggacattaagaaaaacgagaggctttggctcctggacgattctaaaacttggtggagggtacgcaacgcggcgaatcgtacggggtacgttccttcaaactatgttgagcggaaaaacagcctgaagaaggggtctcttgtaaagaacttaaaagatacactcgggctgggaaagacacgaagaaagaccagcgcgagagatgcaagtcctaccccttccacagacgcggaataccctgcgaacggaagtggggccgatcgaatatacgaccttaacattcctgccttcgtgaagtttgcatacgtcgcagaacgcgaggatgaacttagtctcgtgaagggcagccgcgttaccgtcatggagaaatgttag

SEQ ID NO: 139264 - DNA, 1143 bp, Artificial Sequence
  derived and/or modified sequence
atgaccgaggaggtgatcgtgatcgccaagtgggactacaccgcccagcaggatcaggagctggacatcaaaaagaacgaaagattgtggcttctggacgacagtaaaacgtggtggagggtgcgaaacgctgccaacagaactggttatgtccccagcaattatgttgaaagaaaaaattcactgaaaaaaggttcattggtgaagaacctgaaggatacactgggcctcggaaaaaccagaagaaaaacaagcgcgagagacgccagcccaacacccagtacagatgcagagtaccctgccaacggctcgggagcggatagaatttacgacttaaatattcccgcattcgttaaattcgcctacgtggctgagagagaagatgaactgtctctggtgaagggatccagggtcacagtgatggagaagtgctcggacgggtggtggagaggttcctacaatgggcagattgggtggtttcctagtaactatgtgctggaggaagttgacgaagccgccgcagagagtccttcctttctttccctcagaaaaggagctagcctttccaatgggcagggctccagggtgctgcacgtagttcagacactgtacccattcagcagcgtcaccgaagaagagttaaacttcgaaaaaggagaaaccatggaagtgatcgagaaacccgagaatgaccccgagtggtggaaatgcaaaaacgccagaggccaagttggcctcgtcccaaagaattacgtggtggttctttcggacggtccagcactccaccccgctcacgcaccacagatcagctacacaggacctagctcaagcggcagattcgccgggagagagtggtattatggaaatgtgacaaggcaccaagccgaatgtgccctgaacgagaggggagtcgaaggagacttcctgattcgtgattctgaatcctcaccttccgacttctccgtttccctcaaagcctccgggaaaaataagcactttaaggtgcagctcgtggacaacgtgtactgtatcggccagaggcggttccatactatggacgaactggtggaacattacaaaaaagcacctattttcacctccgaacacggcgagaagctgtacctggtgagggctctccagtag

SEQ ID NO: 139265 - DNA, 333 bp, Artificial Sequence
  derived and/or modified sequence
atgaccgaggaggtgatcgtgatcgccaagtgggactacaccgcccagcaagatcaggagttagatattaagaagaacgagcgtctctggctgctggacgactccaagacatggtggcgagtgagaaatgccgctaacaggacgggttacgttccttctaactacgttgagcgcaaaaatagcctcaagaaaggttccttagtcaagaatttaaaggacaccctgggattgggcaaaaccagacggaagacatccgcaagagacgcaagcccaacaccctctactgacgcagagtatccagccaatggatccggcgcggaccggatatattag

SEQ ID NO: 139266 - DNA, 1143 bp, Artificial Sequence
  derived and/or modified sequence
atgaccgaggaggtgatcgtgatcgccaagtgggactacaccgcccagcaggaccaagaactagatattaaaaagaacgaacgactctggctcttggatgactctaaaacatggtggagagtccggaacgccgccaaccggaccggctacgtaccctccaactacgttgaaaggaaaaatagtttgaagaagggttctttagtcaaaaacctgaaggacactctcggacttggcaaaactcgacgaaaaactagtgcaagagacgcgtcgcccacacccagtacggatgccgagtaccctgcaaacggcagtggcgcagatcgaatttacgatcttaatatccctgccttcgtaaagttcgcttacgtggcagagcgggaggatgaattatcattggtgaagggctcaagagttaccgtcatggagaagtgcagcgatggatggtggcgtggctcctacaatggccagattggttggtttccaagtaactacgtgctcgaagaagtagacgaggcagccgcggaaagccccagttttctgagcctcagaaagggagcctcactgtccaacggacaaggcagtagagtgctccacgtcgtccaaaccctgtaccccttttcttcagtgacagaggaagagctgaattttgagaagggagagactatggaagtgatagaaaaaccagaaaacgaccctgagtggtggaagtgtaagaacgccaggggtcaagttggcctcgtgccaaagaactatgttgtcgtgctgtccgacggacctgctcttcaccccgcccatgcacctcaaattagctatactggccccagcagttcaggccggttcgcgggacgtgaatggtattatggaaatgtcaccagacatcaggccgaatgtgcgctcaacgaaaggggggttgaaggtgacttcctgatcagggatagtgaatcctcccctagcgacttttctgtcagcctgaaggcttcaggaaaaaacaagcattttaaggtgcagctagttgataatgtgtactgtatcggccagagacgcttccacaccatggacgagcttgtggagcattataagaaggcccccatctttacctctgaacacggcgagaagctgtatttggtgagggcgctccagtag

SEQ ID NO: 139267 - DNA, 435 bp, Artificial Sequence
  derived and/or modified sequence
atgaccgaagaggttattgtgattgctaaatgggactacactgcccagcaagaccaagaattggacattaagaagaatgagaggctgtggttgctggacgattccaagacctggtggcgggtgagaaacgccgcaaaccggaccggttacgtccccagcaactatgtggaaagaaagaactccctcaagaagggcagtttggtgaaaaacttgaaagatacattaggactgggcaagacacggaggaaaacctccgccagagatgctagccctacgccatcaacagatgccgagtaccctgctaacggtagcggcgcagatcggatctacgatctgaatatacctgcttttgttaaattcgcgtatgtcgccgaacgggaggacgagctgtccctggtgaagggatcacgggtaaccgtcatggaaaaatgctag

SEQ ID NO: 139268 - DNA, 1143 bp, Artificial Sequence
  derived and/or modified sequence
atgacggaggaggtgattgtcatcgctaaatgggactatactgcacagcaggaccaagaactcgacataaagaagaacgaacgattgtggctactcgacgattccaagacctggtggagagtgcggaacgctgctaacaggacggggtacgtcccaagcaattatgtcgaacgaaagaattcactgaaaaagggatctctggttaaaaatctgaaagacaccctcgggctaggcaaaacccgcaggaagacttctgccagggacgccagtcccacccctagtactgacgccgaatatcctgctaatgggagcggcgcagatcgtatatacgacctgaacatccctgcctttgtgaaatttgcatacgtggctgaacgtgaggacgagcttagcctcgtgaaaggttctagggtgacggtgatggagaaatgttctgacggatggtggcgcggatcctataacggtcagattggctggttcccatccaattacgtcctggaggaggtcgacgaggccgctgctgagtctccctctttccttagcctgaggaagggggctagcctctccaatgggcagggtagcagggtgctgcatgtcgtgcagacactctatcccttttccagcgtgacagaagaagaattgaacttcgaaaaaggagagactatggaggtcatcgagaaacccgagaatgatccagagtggtggaaatgtaaaaacgcaagggggcaggttgggctggtgcccaagaactatgttgtagtactgtccgatggtccagctctgcacccagcccacgcgccacagattagctacaccggaccgagcagctccgggagattcgccggaagagaatggtattatggcaacgtgaccaggcatcaagcagaatgcgcactgaacgaaagaggcgtggaaggcgatttcttaatcagagatagtgaatctagcccgtccgatttttccgtgagccttaaggcctcaggcaagaacaaacattttaaggtgcaactggtcgacaatgtgtactgcattggacagcgcaggtttcatacgatggatgagttagtggagcactacaaaaaggcaccaatattcacatccgaacacggggagaagctttatttggtgagggctctacaatag

SEQ ID NO: 139269 - DNA, 333 bp, Artificial Sequence
  derived and/or modified sequence
atgactgaggaggtcatcgtgatagctaagtgggattacactgcacagcaagatcaggaactggacatcaagaaaaacgagagactatggctgttagatgattctaagacgtggtggcgtgtgagaaatgcagctaaccggaccgggtatgtgccttccaactatgtggagcgaaaaaactcacttaaaaagggctctctcgtaaaaaatcttaaggatactctgggtctcggaaagacacgcagaaaaaccagtgccagagacgcttcgccaactccctccactgatgccgagtacccagcaaacggaagtggggcagacaggatctattag

SEQ ID NO: 139270 - DNA, 1143 bp, Artificial Sequence
  derived and/or modified sequence
atgacagaagaggttattgtgatcgccaagtgggattacactgctcagcaggaccaggagctggatatcaaaaaaaatgagcgcctgtggctgctggatgattccaagacctggtggcgcgtgcggaacgccgcaaatcgcaccgggtatgttccctccaactatgtcgagcgaaagaactctttaaagaaaggcagccttgtgaaaaatctcaaagacacattggggttgggtaagacgaggaggaagacgagcgccagggacgcctcccccaccccatcgactgatgcggagtaccctgctaatggatcaggcgcagatcgcatttacgaccttaacataccagcgttcgtcaaatttgcctacgtggctgaaagggaggacgagctgtccctggtaaaggggtctcgggtcaccgtcatggaaaaatgcagcgacgggtggtggagagggagctacaatgggcaaatcggctggtttccaagcaactacgttcttgaggaggtggatgaagccgcagccgaatccccgagtttcctgtccttaaggaaaggtgcctccctatctaatggacagggatcccgagtgcttcacgttgtgcagactctgtatcccttctcttcagtgactgaggaagagttaaactttgagaaaggggagaccatggaagtgatcgagaagccggaaaacgaccccgaatggtggaaatgcaagaacgcgagaggccaggttggactagtaccaaaaaactacgtggtggtgttgtctgatggccctgctttgcatcccgcacacgcaccgcagatcagttacacgggcccatcctcctccggacggtttgccggtcgggaatggtactatggcaatgtgaccaggcaccaggcagagtgcgctttaaacgagcggggagtggagggtgactttctgatcagagatagtgaatctagcccctccgatttttccgtgtccctcaaagcgtccggaaagaacaaacacttcaaggtgcagctcgtggacaacgtttactgcatcggacagagaaggttccatacaatggatgaattagtggagcactacaaaaaagcacccatcttcactagcgagcacggcgagaagctgtatttagtcagggctctccagtag

SEQ ID NO: 139271 - DNA, 435 bp, Artificial Sequence
  derived and/or modified sequence
atgaccgaggaggtgatcgtgatcgccaagtgggactacaccgcccagcaggaccaggagctggacatcaagaagaacgagagactgtggctgctggacgacagcaagacctggtggagagtgagaaacgccgccaacagaaccggctacgtgcccagcaactacgtggagagaaagaacagcctgaagaagggcagcctggtgaagaacctgaaggacaccctgggcctgggcaagaccagaagaaagaccagcgccagagacgccagccccacccccagcaccgacgccgagtaccccgccaacggcagcggcgccgacagaatctacgacctgaacatccccgccttcgtgaagttcgcctacgtggccgagagagaggacgagctgagcctggtgaagggcagcagagtgaccgtgatggagaagtgctag

SEQ ID NO: 139272 - DNA, 1143 bp, Artificial Sequence
  derived and/or modified sequence
atgaccgaggaggtgatcgtgatcgccaagtgggactacaccgcccagcaggaccaggagctggacatcaagaagaacgagagactgtggctgctggacgacagcaagacctggtggagagtgagaaacgccgccaacagaaccggctacgtgcccagcaactacgtggagagaaagaacagcctgaagaagggcagcctggtgaagaacctgaaggacaccctgggcctgggcaagaccagaagaaagaccagcgccagagacgccagccccacccccagcaccgacgccgagtaccccgccaacggcagcggcgccgacagaatctacgacctgaacatccccgccttcgtgaagttcgcctacgtggccgagagagaggacgagctgagcctggtgaagggcagcagagtgaccgtgatggagaagtgcagcgacggctggtggagaggcagctacaacggccagatcggctggttccccagcaactacgtgctggaggaggtggacgaggccgccgccgagagccccagcttcctgagcctgagaaagggcgccagcctgagcaacggccagggcagcagagtgctgcacgtggtgcagaccctgtaccccttcagcagcgtgaccgaggaggagctgaacttcgagaagggcgagaccatggaggtgatcgagaagcccgagaacgaccccgagtggtggaagtgcaagaacgccagaggccaggtgggcctggtgcccaagaactacgtggtggtgctgagcgacggccccgccctgcaccccgcccacgccccccagatcagctacaccggccccagcagcagcggcagattcgccggcagagagtggtactacggcaacgtgaccagacaccaggccgagtgcgccctgaacgagagaggcgtggagggcgacttcctgatcagagacagcgagagcagccccagcgacttcagcgtgagcctgaaggccagcggcaagaacaagcacttcaaggtgcagctggtggacaacgtgtactgcatcggccagagaagattccacaccatggacgagctggtggagcactacaagaaggcccccatcttcaccagcgagcacggcgagaagctgtacctggtgagagccctgcagtag

SEQ ID NO: 139273 - DNA, 333 bp, Artificial Sequence
  derived and/or modified sequence
atgaccgaggaggtgatcgtgatcgccaagtgggactacaccgcccagcaggaccaggagctggacatcaagaagaacgagagactgtggctgctggacgacagcaagacctggtggagagtgagaaacgccgccaacagaaccggctacgtgcccagcaactacgtggagagaaagaacagcctgaagaagggcagcctggtgaagaacctgaaggacaccctgggcctgggcaagaccagaagaaagaccagcgccagagacgccagccccacccccagcaccgacgccgagtaccccgccaacggcagcggcgccgacagaatctactag

SEQ ID NO: 139274 - protein, 588 aa, Artificial Sequence
  derived and/or modified sequence
MGGTARGPGRKDAGPPGAGLPPQQRRLGDGVYDTFMMIDETKCPPCSNVLCNPSEPPPPRRLNMTTEQFTGDHTQHFLDGGEMKVEQLFQEFGNRKSNTIQSDGISDSEKCSPTVSQGKSSDCLNTVKSNSSSKAPKVVPLTPEQALKQYKHHLTAYEKLEIINYPEIYFVGPNAKKRHGVIGGPNNGGYDDADGAYIHVPRDHLAYRYEVLKIIGKGSFGQVARVYDHKLRQYVALKMVRNEKRFHRQAAEEIRILEHLKKQDKTGSMNVIHMLESFTFRNHVCMAFELLSIDLYELIKKNKFQGFSVQLVRKFAQSILQSLDALHKNKIIHCDLKPENILLKHHGRSSTKVIDFGSSCFEYQKLYTYIQSRFYRAPEIILGSRYSTPIDIWSFGCILAELLTGQPLFPGEDEGDQLACMMELLGMPPPKLLEQSKRAKYFINSKGIPRYCSVTTQADGRVVLVGGRSRRGKKRGPPGSKDWGTALKGCDDYLFIEFLKRCLHWDPSARLTPAQALRHPWISKSVPRPLTTIDKVSGKRVVNPASAFQGLGSKLPPVVGIANKLKANLMSETNGSIPLCSVLPKLIS

SEQ ID NO: 139275 - DNA, 1767 bp, Artificial Sequence
  derived and/or modified sequence
atgggaggcaccgctcggggtcctggccggaaggatgcgggccccccaggagcgggtctgcctcctcagcagcggaggctcggagacggtgtgtatgataccttcatgatgattgatgagacaaagtgccctccttgttctaatgttctctgtaacccttccgaacctcctccccctaggagacttaatatgacaacagaacagtttactggagaccatacccagcactttcttgacggtggagaaatgaaagtggagcagctcttccaggaattcggcaataggaaatccaataccatccagtctgatggtattagtgactctgaaaagtgttctcccactgtcagccaaggcaaatcttcggattgccttaatactgtcaaatcaaattcctcctccaaagcccctaaggtcgtccccctaaccccagaacaggctcttaaacagtacaaacatcacttaactgcatatgagaagcttgaaatcataaattaccccgagatctacttcgtgggcccaaacgcaaagaagcggcatggtgttattgggggcccaaataatggagggtatgacgacgcagacggtgcctacatccatgtgccgcgggaccatttagcgtaccgatatgaagtcctcaagattataggcaagggtagtttcggccaggtggcccgcgtgtatgatcacaagttgagacaatacgttgccctcaagatggtgcgcaacgaaaagcgatttcacagacaggctgccgaagaaatcagaatactcgagcatctgaaaaaacaggacaagacaggcagtatgaatgtgatacatatgcttgagtccttcacctttcggaaccatgtatgcatggcctttgagctactatccattgatttgtacgaactcatcaagaagaataagtttcaggggtttagtgtgcagctcgtgcggaaattcgcccaatccattctgcagtctctggacgccctgcacaagaacaagataatccattgtgacctcaagccggaaaatatcttactgaagcatcatggtcgcagcagcactaaagtgatcgattttggctcaagttgcttcgaatatcagaagctgtatacctatattcaatccaggttctaccgggcaccagagataatccttggatcaagatactctaccccaatagatatctggagcttcgggtgcatccttgcggagctgctaacaggccagccactgttccctggggaggatgaaggtgatcaacttgcatgcatgatggagctgctcggaatgcctccacccaaattgctcgagcagagcaaacgggccaagtatttcatcaattccaagggaattccaaggtattgcagtgttaccacccaggcagacggcagagtggtgctagtgggtggtaggagtagacgtgggaaaaagcgcggacctccaggatccaaggactggggaaccgctctaaagggctgcgacgactacctgtttatagagttcctgaaacgatgcctgcactgggatccttcggcaaggctaacacccgcgcaggcactgaggcacccttggatcagtaagagtgttccacggccactgacgacaatcgataaggtgtccgggaagcgagtggtaaatccagcatctgccttccaaggcctgggcagcaaactgccccccgttgtggggatcgctaacaagctgaaggccaatctgatgtccgaaacaaatggtagtatccctctctgtagtgtgctgcccaaacttattagctag

SEQ ID NO: 139276 - DNA, 1767 bp, Artificial Sequence
  derived and/or modified sequence
atgggcggcacagcccggggccctggcaggaaggatgctggccccccaggggccggcctgcccccccagcagaggcggctgggagatggagtgtatgacaccttcatgatgattgatgagaccaagtgccccccctgcagcaatgtgctgtgcaaccccagcgagcccccaccaccccggcggctgaacatgaccacagagcagttcaccggggaccacacccagcacttcctggatggaggagagatgaaggtggagcagctgttccaggagtttggaaacaggaagagcaacaccatccagagtgatggcatcagtgacagcgagaagtgcagccccaccgtgtcccagggcaagagcagtgactgcctgaacacagtgaagagcaacagcagcagcaaggcccccaaggtggtgcccctgaccccagagcaggccctgaagcagtacaagcaccacctgacagcctatgagaagctggagatcatcaactacccagagatctactttgtgggccccaatgccaagaagagacatggagtcatcggcggccccaacaatggaggctatgatgatgctgatggagcctacatccacgtgccccgggaccacctggcctaccgctatgaggtgctgaagatcatcggcaagggcagctttggccaggtggcccgggtgtatgaccacaagctgcggcagtatgtggccctgaagatggtgagaaatgagaagcgcttccaccggcaggccgctgaggagatccgcatcctggagcacctgaagaagcaggacaagacaggctccatgaatgtcatccacatgctggagagcttcaccttcagaaatcatgtgtgcatggcctttgagctgctgagcattgacctgtatgagctgatcaagaagaacaagttccagggcttctctgtgcagctggtgaggaagtttgcccagagcatcctgcagagcctggatgccctgcacaagaacaagatcatccactgtgacctgaagccagagaacatcctgctgaagcaccacggccgcagcagcaccaaggtgattgactttggcagcagctgctttgagtaccagaagctgtacacctacatccagagccgcttctaccgggcccctgagatcatcctgggcagccgctacagcacccccatcgacatctggagctttggctgcatcctggccgagctgctgaccggccagcccctcttccctggagaagatgaaggagaccagctggcctgcatgatggagctgctgggcatgcccccacccaagctgctggagcagagcaagagggccaagtacttcatcaacagcaagggcatcccccgctactgcagcgtgaccacccaggctgatggccgggtggtgctggtgggcggccgcagccggcggggcaagaagaggggccccccaggcagcaaggactggggcacagccctgaagggctgtgatgactacctgttcatcgagttcctgaagcgctgcctgcactgggaccccagcgcccggctgaccccagcccaggccctgcggcacccctggatcagcaagtctgtgccccggcccctgaccaccatcgacaaggtgtctgggaagagggtggtgaacccagccagcgccttccagggcctgggcagcaagctgccccctgtggtgggcatcgccaacaagctgaaggccaacctgatgtctgagaccaacggcagcatccccctgtgcagcgtgctgcccaagctgatctcctag

SEQ ID NO: 139277 - DNA, 1767 bp, Artificial Sequence
  derived and/or modified sequence
atgggcggcaccgcccggggccccggccggaaggacgccggcccccccggtgctggattaccgcctcaacagcgtcgcctcggcgatggggtctacgacacatttatgatgatcgacgaaaccaaatgtcccccctgttcaaacgtcctgtgtaatcccagcgagccccctccaccacgaagactcaatatgacaaccgaacagtttacaggggaccacacacagcattttctagacgggggggaaatgaaagttgaacagttgtttcaggagtttggaaaccggaagagcaataccatccagtccgacggcatttcggactctgagaagtgcagtcccaccgtctcacagggcaagagctcagactgtctgaatactgtgaagagcaattcatcttccaaggcacctaaagtggtcccactgacccccgaacaggctctcaagcagtacaagcaccatctcacagcttatgaaaagctcgagattatcaattatccagaaatttacttcgtcggtcctaatgcaaaaaagcgccatggtgtgattggcggccccaataacggcggatatgatgacgctgacggagcttatattcacgtgccaagagaccacctggcgtaccggtacgaagttctgaagatcataggtaaggggagcttcggtcaggtggcgagagtgtatgaccacaaattgcgccaatatgttgcccttaagatggtgaggaatgaaaagagattccatagacaagccgctgaggaaattaggattctcgagcacttaaagaagcaggacaaaacgggttctatgaacgtcattcatatgctagagtcattcacctttcgaaatcacgtctgcatggccttcgaactcctgtctattgacctctatgagctgatcaagaagaacaaatttcaggggttttccgttcagttagtccgtaagttcgcacagtcaattctgcaaagtttggacgcattacataaaaataaaatcattcattgcgacctgaagcccgaaaacattctcctgaagcaccacgggcggtcctcgacaaaagtcattgacttcggttccagctgctttgagtaccagaagctttatacctatatccaatccagattctacagggctccagagatcatcctggggtcaaggtacagcactcccattgacatctggtcttttggctgcatactggccgagctcctgacaggtcaacccttgtttcctggcgaggacgagggcgaccagttggcttgtatgatggagctcctgggcatgcctccaccaaagcttttagaacaaagtaaacgggccaaatatttcattaactctaaaggaattccgcgttattgtagtgtcaccacacaagctgatggaagggtcgtgctagtgggaggacggtcacgtaggggaaagaagcgggggcccccggggtccaaagattggggtaccgcccttaaagggtgcgatgactacttgttcatagagttcctgaaaagatgtctgcactgggatccatcagcacggcttactccagctcaagctctacgccacccctggatctctaagagcgtcccacgtcctctgaccactatcgataaggtgtcaggtaagcgggttgtcaatcccgcttcagctttccagggcctgggttctaaactccctccggtggtagggatagccaataaattgaaggctaatttaatgagcgagacaaacggtagcattcctctttgttctgtccttcctaagctcatctcttag

SEQ ID NO: 139278 - DNA, 1767 bp, Artificial Sequence
  derived and/or modified sequence
atgggcggaaccgccagggggcctggccgtaaagatgcagggcctcctggcgctgggctcccgccacagcagcgtcgcttgggcgacggggtctacgataccttcatgatgatagatgaaactaaatgtcccccatgctcaaatgtgctatgtaatccaagcgaaccaccccctcctcgtcggttaaacatgaccacggaacaatttaccggcgaccatacacagcatttccttgacgggggtgaaatgaaagtagaacagctgttccaggagttcgggaaccgcaagagcaatactatccagtcagatggtatttccgactctgaaaaatgttcccccaccgtgagtcaaggtaagtcttcagactgcctcaataccgtcaaatcaaacagctctagcaaagcgccaaaggtggtccccctgactccagagcaagccctgaaacaatacaagcatcacctgactgcctacgaaaagttagaaattatcaactaccctgaaatttatttcgtcggacctaacgctaaaaagagacatggcgtgatcggtggcccaaataatggcggttacgacgatgccgatggagcatacatccacgtccctagagatcatttggcttacaggtacgaagtactgaaaattatcggtaaggggtccttcggacaagtggctagagtgtatgaccacaagctgaggcagtatgttgccctgaaaatggtccggaacgaaaagcgtttccatcgtcaagcggcagaagagatccgcattctggaacatttaaaaaaacaagacaagactggctccatgaacgtgattcatatgttagagagcttcacattcaggaatcacgtctgcatggctttcgaactactctctatagatctttacgaattaatcaagaagaacaaatttcagggcttctcagtgcaactcgtccggaaatttgctcagtccatactacagagcctggacgctttgcacaagaacaagattattcactgcgatctgaagccagagaatatcctattgaagcatcatggtaggagctcgacaaaggtcatcgacttcgggtcaagctgcttcgagtatcaaaagttatatacttatatccagtcccgcttctatcgggcacccgaaatcatcctcggatcacgctacagcactccaattgatatctggtcatttggttgcatcctggccgagctgctgacaggtcagccgctgtttcccggagaagacgaaggagaccagcttgcttgtatgatggagttgctgggcatgccaccgcctaaacttctggagcaaagcaaaagagccaaatactttatcaacagtaagggaatcccaaggtactgcagcgtgactacccaagcagatgggagggtcgtgctggtcggaggtaggtcacggagagggaagaaacggggtccacccggatcgaaagattggggtacagcactcaaaggctgcgacgactacctctttatagagtttcttaaacgctgcctccactgggacccgtccgcaaggctgacacccgcacaagcccttcgtcacccgtggatctcgaagagcgttccacggcctctgactaccatcgacaaagtctctgggaagcgggtggtgaaccctgccagcgcgttccagggcctggggtcaaaactgcctcccgtggtcggaattgcgaacaagcttaaggccaacttgatgagcgaaaccaatgggtcaatcccattgtgtagcgtgctgcccaagcttatctcctag

SEQ ID NO: 139279 - DNA, 1767 bp, Artificial Sequence
  derived and/or modified sequence
atgggcggcaccgccagaggccccggcagaaaggacgccggcccccccggcgccggcctgcccccccagcagagaagactgggcgacggcgtgtacgacaccttcatgatgatcgacgagaccaagtgccccccctgcagcaacgtgctgtgcaaccccagcgagccccccccccccagaagactgaacatgaccaccgagcagttcaccggcgaccacacccagcacttcctggacggcggcgagatgaaggtggagcagctgttccaggagttcggcaacagaaagagcaacaccatccagagcgacggcatcagcgacagcgagaagtgcagccccaccgtgagccagggcaagagcagcgactgcctgaacaccgtgaagagcaacagcagcagcaaggcccccaaggtggtgcccctgacccccgagcaggccctgaagcagtacaagcaccacctgaccgcctacgagaagctggagatcatcaactaccccgagatctacttcgtgggccccaacgccaagaagagacacggcgtgatcggcggccccaacaacggcggctacgacgacgccgacggcgcctacatccacgtgcccagagaccacctggcctacagatacgaggtgctgaagatcatcggcaagggcagcttcggccaggtggccagagtgtacgaccacaagctgagacagtacgtggccctgaagatggtgagaaacgagaagagattccacagacaggccgccgaggagatcagaatcctggagcacctgaagaagcaggacaagaccggcagcatgaacgtgatccacatgctggagagcttcaccttcagaaaccacgtgtgcatggccttcgagctgctgagcatcgacctgtacgagctgatcaagaagaacaagttccagggcttcagcgtgcagctggtgagaaagttcgcccagagcatcctgcagagcctggacgccctgcacaagaacaagatcatccactgcgacctgaagcccgagaacatcctgctgaagcaccacggcagaagcagcaccaaggtgatcgacttcggcagcagctgcttcgagtaccagaagctgtacacctacatccagagcagattctacagagcccccgagatcatcctgggcagcagatacagcacccccatcgacatctggagcttcggctgcatcctggccgagctgctgaccggccagcccctgttccccggcgaggacgagggcgaccagctggcctgcatgatggagctgctgggcatgcccccccccaagctgctggagcagagcaagagagccaagtacttcatcaacagcaagggcatccccagatactgcagcgtgaccacccaggccgacggcagagtggtgctggtgggcggcagaagcagaagaggcaagaagagaggcccccccggcagcaaggactggggcaccgccctgaagggctgcgacgactacctgttcatcgagttcctgaagagatgcctgcactgggaccccagcgccagactgacccccgcccaggccctgagacacccctggatcagcaagagcgtgcccagacccctgaccaccatcgacaaggtgagcggcaagagagtggtgaaccccgccagcgccttccagggcctgggcagcaagctgccccccgtggtgggcatcgccaacaagctgaaggccaacctgatgagcgagaccaacggcagcatccccctgtgcagcgtgctgcccaagctgatcagctag

SEQ ID NO: 139280 - DNA, 2163 bp, Artificial Sequence
  derived and/or modified sequence
acttcccagccggggccagtcgggagcgaaagtgcgctgagctgcagtgtctggtcgagagtacccgtgggagcgtcgcgccgcggaggcagccgtcccggcgtaggtggcgtggccgaccggacccccaactggcgcctctccccgcgcggggtcccgagctaggagatgggaggcacagctcgtgggcctgggcggaaggatgcggggccgcctggggccgggctcccgccccagcagcggaggttgggggatggtgtctatgacaccttcatgatgatagatgaaaccaaatgtcccccctgttcaaatgtactctgcaatccttctgaaccacctccacccagaagactaaatatgaccactgagcagtttacaggagatcatactcagcactttttggatggaggtgagatgaaggtagaacagctgtttcaagaatttggcaacagaaaatccaatactattcagtcagatggcatcagtgactctgaaaaatgctctcctactgtttctcagggtaaaagttcagattgcttgaatacagtaaaatccaacagttcatccaaggcacccaaagtggtgcctctgactccagaacaagccctgaagcaatataaacaccacctcactgcctatgagaaactggaaataattaattatccagaaatttactttgtaggtccaaatgccaagaaaagacatggagttattggtggtcccaataatggagggtatgatgatgcagatggggcctatattcatgtacctcgagaccatctagcttatcgatatgaggtgctgaaaattattggcaaggggagttttgggcaggtggccagggtctatgatcacaaacttcgacagtacgtggccctaaaaatggtgcgcaatgagaagcgctttcatcgtcaagcagctgaggagatccggattttggagcatcttaagaaacaggataaaactggtagtatgaacgttatccacatgctggaaagtttcacattccggaaccatgtttgcatggcctttgaattgctgagcatagacctttatgagctgattaaaaaaaataagtttcagggttttagcgtccagttggtacgcaagtttgcccagtccatcttgcaatctttggatgccctccacaaaaataagattattcactgcgatctgaagccagaaaacattctcctgaaacaccacgggcgcagttcaaccaaggtcattgactttgggtccagctgtttcgagtaccagaagctctacacatatatccagtctcggttctacagagctccagaaatcatcttaggaagccgctacagcacaccaattgacatatggagttttggctgcatccttgcagaacttttaacaggacagcctctcttccctggagaggatgaaggagaccagttggcctgcatgatggagcttctagggatgccaccaccaaaacttctggagcaatccaaacgtgccaagtactttattaattccaagggcataccccgctactgctctgtgactacccaggcagatgggagggttgtgcttgtggggggtcgctcacgtaggggtaaaaagcggggtcccccaggcagcaaagactgggggacagcactgaaagggtgtgatgactacttgtttatagagttcttgaaaaggtgtcttcactgggacccctctgcccgcttgaccccagctcaagcattaagacacccttggattagcaagtctgtccccagacctctcaccaccatagacaaggtgtcagggaaacgggtagttaatcctgcaagtgctttccagggattgggttctaagctgcctccagttgttggaatagccaataagcttaaagctaacttaatgtcagaaaccaatggtagtatacccctatgcagtgtattgccaaaactgattagctagtggacagagatatgcccagagatgcatatgtgtatatttttatgatcttacaaacctgcaaatggaaaaaatgcaagcccattggtggatgtttttgttagagtagactttttttaaacaagacaaaacatttttatatgattataaaagaattcttcaagggctaattacctaaccagcttgtattggccatctggaatatgcattaaatgactttttataggtcaa

SEQ ID NO: 139281 - DNA, 285 bp, Artificial Sequence
  derived and/or modified sequence
atgaatgaccacctccacgtcggcagtcacgcccatggccaaatccaggtacagcagcttttcgaggataattccaataaacggactgttctgaccacacaacctaatgggctcacaaccgtgggaaagacaggcttgcccgtagtgcccgagcgacagctggattcaatccaccgaaggcaaggttcatctacgagcttgaaaagcatggagggcatggggaaggtgaaagccacccctatgaccccagagcaagctatgaagcaatacatgcaaaaactctag

SEQ ID NO: 139282 - DNA, 471 bp, Artificial Sequence
  derived and/or modified sequence
atgaatgatcacctgcatgtcgggagtcatgcccatggtcagattcaagttcagcagctcttcgaggacaatagcaacaagcgaactgtgttaacaacacagccgaatgggctgacaacagtcggcaaaaccggattaccggtagtgccggagcggcagctcgactctatccatcgacggcagggatcaagtacctcactgaagtccatggaagggatgggaaaggtgaaggcgactccaatgaccccagagcaagcaatgaagcagtacatgcaaaaattgaccgcatttgaacatcatgaaatcttctcatacccagagatctattttcttgggctcaatgcgaagaaaagacagggcatgactgggggccccaataacggtggctatgacgacgatcagggttcttatgtgcaggtgcctcatgatcatgtggcatatcggtatgaggtcctgaaggtaattggatag

SEQ ID NO: 139283 - DNA, 285 bp, Artificial Sequence
  derived and/or modified sequence
atgaatgaccacctgcacgtgggcagccacgcccacggccagatccaggtgcagcagctgtttgaggacaacagcaacaagaggacagtgctgaccacccagcccaacggcctgaccaccgtgggcaagacaggcctgcctgtggtgcctgagcggcagctggacagcatccaccggcggcagggcagcagcaccagcctgaagtccatggagggcatgggcaaggtgaaggccacccccatgaccccagagcaggccatgaagcagtacatgcagaagctgtag

SEQ ID NO: 139284 - DNA, 471 bp, Artificial Sequence
  derived and/or modified sequence
atgaatgaccacctgcacgtgggcagccacgcccacggccagatccaggtgcagcagctgtttgaggacaacagcaacaagaggacagtgctgaccacccagcccaacggcctgaccaccgtgggcaagacaggcctgcctgtggtgcctgagcggcagctggacagcatccaccggcggcagggcagcagcaccagcctgaagtccatggagggcatgggcaaggtgaaggccacccccatgaccccagagcaggccatgaagcagtacatgcagaagctgacagcctttgagcaccacgagatcttctcctacccagagatctacttcctgggcctgaatgccaagaagaggcagggcatgactggaggccccaacaatggaggctatgatgatgaccagggcagctatgtgcaggtgccccatgaccacgtggcctaccgctatgaggtgctgaaggtgattggatag

SEQ ID NO: 139285 - DNA, 285 bp, Artificial Sequence
  derived and/or modified sequence
atgaacgaccacctgcacgtgggcagccacgcccacggccagatccaggtacagcaactgtttgaggacaactccaacaaacggactgtgctcacaacacaaccaaacggcctgaccactgtaggaaagacaggactgcccgtggtgcccgaaagacagttagattccatacaccggcggcagggttcttccaccagcctgaagtcaatggaaggtatgggcaaagtgaaggccactcccatgacacccgaacaggctatgaagcagtatatgcagaaactgtag

SEQ ID NO: 139286 - DNA, 471 bp, Artificial Sequence
  derived and/or modified sequence
atgaacgaccacctgcacgtgggcagccacgcccacggccagatccaagtacagcagcttttcgaggacaatagcaataaacgaaccgtgctaactacacagcccaatgggctgacaacagtgggaaagaccggactgcccgttgtgcctgaacgccagctagacagcatccatagacgccaagggagttctaccagcttgaaatctatggaggggatggggaaggtcaaagcgactcccatgactccagagcaggctatgaagcaatacatgcagaaactcaccgcttttgaacaccacgaaatctttagctaccccgagatttatttccttggcctgaacgccaagaaacggcagggcatgactggtggtcctaacaatggcgggtacgatgacgaccagggctcctacgtgcaggtgccccatgatcacgttgcctacagatatgaagtgctgaaggtaatcggttag

SEQ ID NO: 139287 - DNA, 285 bp, Artificial Sequence
  derived and/or modified sequence
atgaatgaccacctgcacgtcggctctcacgcacacggccagattcaggtgcagcagcttttcgaggataatagcaacaaacgtacagtgctgaccacgcaaccaaacgggttaactaccgtgggcaagacagggctgcctgtggttccagagagacagcttgatagcatccatcggaggcaggggtccagcacgtctctgaagagtatggaaggaatgggaaaggtaaaggccaccccaatgacaccagaacaagccatgaagcaatatatgcaaaagctctag

SEQ ID NO: 139288 - DNA, 471 bp, Artificial Sequence
  derived and/or modified sequence
atgaacgaccacctccatgtgggttcacacgctcatgggcagatccaggtccaacagctgtttgaggacaacagcaataagcgcacagtgttgactactcagccaaacggcctgacaaccgtcgggaagactggtctgcctgttgtgccagagagacagctcgacagcatacaccggaggcaggggtctagcacatcattaaaaagcatggaaggcatgggaaaggtaaaggccacgccaatgacccctgaacaggctatgaagcagtatatgcaaaagctcacggccttcgagcaccacgagatcttttcctaccccgagatctattttctcggcctcaacgccaagaagaggcagggcatgacagggggacccaacaatgggggatatgacgatgatcaggggagttacgtgcaggtgccccacgaccacgtggcataccggtatgaggtacttaaggtgataggctag

SEQ ID NO: 139289 - DNA, 285 bp, Artificial Sequence
  derived and/or modified sequence
atgaacgaccacctgcacgtgggcagccacgcccacggccagatccaggtgcagcagctgttcgaggacaacagcaacaagagaaccgtgctgaccacccagcccaacggcctgaccaccgtgggcaagaccggcctgcccgtggtgcccgagagacagctggacagcatccacagaagacagggcagcagcaccagcctgaagagcatggagggcatgggcaaggtgaaggccacccccatgacccccgagcaggccatgaagcagtacatgcagaagctgtag

SEQ ID NO: 139290 - DNA, 471 bp, Artificial Sequence
  derived and/or modified sequence
atgaacgaccacctgcacgtgggcagccacgcccacggccagatccaggtgcagcagctgttcgaggacaacagcaacaagagaaccgtgctgaccacccagcccaacggcctgaccaccgtgggcaagaccggcctgcccgtggtgcccgagagacagctggacagcatccacagaagacagggcagcagcaccagcctgaagagcatggagggcatgggcaaggtgaaggccacccccatgacccccgagcaggccatgaagcagtacatgcagaagctgaccgccttcgagcaccacgagatcttcagctaccccgagatctacttcctgggcctgaacgccaagaagagacagggcatgaccggcggccccaacaacggcggctacgacgacgaccagggcagctacgtgcaggtgccccacgaccacgtggcctacagatacgaggtgctgaaggtgatcggctag

SEQ ID NO: 139291 - protein, 377 aa, Artificial Sequence
  derived and/or modified sequence
MRNSETLERGVGGCRVFSCLGSYPGIEGAGLALLADLALGGRLLGTHMSQWHHPRSGWGRRRDFSGRSSAKKKGGNHIPERWKDYLPVGQRMPGTRFIAFKVPLQKSFEKKLAPEECFSPLDLFNKIREQNEELGLIIDLTYTQRYYKPEDLPETVPYLKIFTVGHQVPDDETIFKFKHAVNGFLKENKDNDKLIGVHCTHGLNRTGYLICRYLIDVEGVRPDDAIELFNRCRGHCLERQNYIEDLQNGPIRKNWNSSVPRSSDFEDSAHLMQPVHNKPVKQGPRYNLHQIQGHSAPRHFHTQTQSLQQSVRKFSENPHVYQRHHLPPPGPPGEDYSHRRYSWNVKPNASRAAQDRRRWYPYNYSRLSYPACWEWTQ

SEQ ID NO: 139292 - protein, 226 aa, Artificial Sequence
  derived and/or modified sequence
MSQWHHPRSGWGRRRDFSGRSSAKKKGGNHIPERWKDYLPVGQRMPGTRFIAFKVPLQKSFEKKLAPEECFSPLDLFNKIREQNEELGLIIDLTYTQRYYKPEDLPETVPYLKIFTVGHQVPDDETIFKFKHAVNGFLKENKDNDKLIGVHCTHGLNRTGYLICRRSLALSPRLECSGTISTHSKFCFPGSRRSPASASQVAGTTGARHHARLIFCIFSRDVVSPC

SEQ ID NO: 139293 - protein, 273 aa, Artificial Sequence
  derived and/or modified sequence
MRNSETLERGVGGCRVFSCLGSYPGIEGAGLALLADLALGGRLLGTHMSQWHHPRSGWGRRRDFSGRSSAKKKGGNHIPERWKDYLPVGQRMPGTRFIAFKVPLQKSFEKKLAPEECFSPLDLFNKIREQNEELGLIIDLTYTQRYYKPEDLPETVPYLKIFTVGHQVPDDETIFKFKHAVNGFLKENKDNDKLIGVHCTHGLNRTGYLICRRSLALSPRLECSGTISTHSKFCFPGSRRSPASASQVAGTTGARHHARLIFCIFSRDVVSPC

SEQ ID NO: 139294 - DNA, 1134 bp, Artificial Sequence
  derived and/or modified sequence
atgaggaactcagaaacactcgagagaggagtaggagggtgtagagttttctcctgtctggggagctacccaggtatagaaggcgccgggttggcccttttggccgaccttgccctaggtggtagactgctgggcactcatatgtctcagtggcaccacccccgatccggttggggccggaggcgggacttttctggaaggtcgagcgcgaaaaaaaagggaggaaatcacatccccgagaggtggaaggattatctgcccgtcggccagaggatgcctggcacccgctttatcgcttttaaagttcctctccagaagtcgtttgagaagaagctggctccagaagaatgtttcagcccgttagatctgttcaataagatcagggagcagaacgaggagctgggtctgattatcgacctgacatatacccagcgttactacaagcctgaggacctgcccgagaccgtcccttatctgaagattttcacagtgggacaccaggtccccgacgatgaaactattttcaagtttaagcatgcggttaatggctttcttaaggaaaataaggataacgacaagctgatcggtgttcattgtacacatggcctaaaccgcaccggttatctaatttgtagatacctgatagatgttgaaggtgtaagacccgatgacgcgatcgagttgttcaatcggtgtcggggacattgcctcgagcgccaaaattacatcgaggacctgcagaatggtccaattcgcaaaaactggaatagcagcgtgcccagaagtagtgattttgaggactccgctcacctaatgcaacctgtgcacaataaacctgttaaacagggacctcgctataatctgcaccagatccagggtcactcagcccctcgccacttccatacacagacccaatcgctacagcagtctgtgcggaaattttctgagaacccccacgtgtaccagcgccatcaccttccacctccaggaccacctggcgaagattactcgcatcgcaggtacagttggaatgtgaagccaaatgctagcagagccgcacaagacagacgacgatggtatccttacaactacagccgcttgagctatccagcatgttgggaatggacccagtag

SEQ ID NO: 139295 - DNA, 681 bp, Artificial Sequence
  derived and/or modified sequence
atgtcccagtggcatcacccacgcagcggttgggggcggcgccgggatttttcgggacggtccagcgctaaaaagaagggaggtaatcatattccagagcgctggaaagactacctccccgtcggtcaacgcatgccaggcacacgcttcattgccttcaaggttccgctgcaaaagtcgtttgagaagaagcttgcacccgaggagtgttttagtccgttagatctattcaataaaatccgcgagcagaacgaagaactgggcctgatcatcgacctaacttatacccagcgctattataaacccgaagatcttcctgaaaccgtaccctaccttaaaatctttacagttggtcaccaggttccagatgatgagaccatcttcaaattcaagcatgctgtgaatgggttcctgaaagagaataaagataatgacaaactgattggagtccattgcactcatgggctgaaccgtacaggatacttaatatgtagaagaagtctggcgctctccccgcgccttgaatgttcaggcacaatctcgacccacagtaagttctgtttcccgggctctcgtagatcgcccgccagtgcgagtcaagtggccggaacgacaggggcccgacatcatgcccgtctcatcttctgtattttcagcagggacgtagttagtccttgctag

SEQ ID NO: 139296 - DNA, 822 bp, Artificial Sequence
  derived and/or modified sequence
atgcggaatagcgagaccctggagcgtggcgtgggaggctgtcgcgtattttcttgtctgggcagctatcctgggatagagggcgcgggcttagccctgttagccgatctagctctgggaggcagacttctgggcactcacatgtctcagtggcaccacccgcggtctggctggggcagacggcgggatttctccggccgcagctcagctaagaaaaagggcggtaatcacattcccgaaaggtggaaggactacctgcccgtgggacaacgcatgccaggaacgcggtttatcgcattcaaggtgccactgcagaagtccttcgagaaaaagttagcaccagaagaatgtttcagccccttagacctcttcaataaaatccgagagcagaatgaggagctcggactgataatagacctcacctatactcagcgctattataaacctgaagatctgcctgagaccgtaccttacctgaaaattttcacagtcggccatcaggtaccagacgacgaaaccatcttcaagtttaaacacgccgtcaacggtttcctaaaagaaaataaagacaatgataaactgatcggcgtgcattgcacccatggtctcaacagaacaggctatctgatctgtcggagatccctggcgctgagccctagactggagtgcagtggaactatttccactcattcaaagttctgtttccccggttctagacgaagccctgccagtgctagccaggttgccgggactacaggcgcccgacatcatgccagattgatattttgtatcttctcgcgcgacgttgtgtcaccctgctag

SEQ ID NO: 139297 - DNA, 1134 bp, Artificial Sequence
  derived and/or modified sequence
atgaggaacagcgagaccctggagcggggcgtgggcggctgcagggtcttcagctgcctgggcagctacccaggcatcgagggcgccggcctggccctgctggccgacctggccctgggcggccgcctgctgggcacccacatgagccagtggcaccaccccaggagcggctggggcagaagaagagacttcagcggccgcagcagcgccaagaagaagggcggcaaccacatccctgagcgctggaaggactacctgcctgtgggccagaggatgcctggcacccgcttcatcgccttcaaggtgcccctgcagaagagctttgagaagaagctggcccctgaggagtgcttcagccccctggacctcttcaacaagatccgggagcagaatgaggagctgggcctcatcatcgacctgacctacacccagcgctactacaagccagaggacctgcctgagaccgtgccctacctgaagatcttcaccgtgggccaccaggtgcctgatgatgagaccatcttcaagttcaagcatgctgtgaatggcttcctgaaggagaacaaggacaatgacaagctgattggagtgcactgcacccacggcctgaacagaacaggctacctgatctgccgctacctgattgatgtggagggcgtgcggccagatgatgccatcgagctgttcaaccgctgccggggccactgcctggagcggcagaactacatcgaggacctgcagaatggccccatcaggaagaactggaacagctctgtgcccaggagcagtgactttgaggacagcgcccacctgatgcagcctgtgcacaacaagcctgtgaagcagggcccccgctacaacctgcaccagatccagggccacagcgcccccaggcacttccacacccagacccagagcctgcagcagagcgtgaggaagttcagcgagaacccccacgtgtaccagaggcaccacctgcccccacctggccccccaggagaggactacagccaccggcgctacagctggaatgtgaagcccaatgccagccgggccgcccaggacagaagacgctggtacccctacaactacagccggctgagctacccagcctgctgggagtggacccagtag

SEQ ID NO: 139298 - DNA, 681 bp, Artificial Sequence
  derived and/or modified sequence
atgagccagtggcaccaccccaggagcggctggggcagaagaagagacttcagcggccgcagcagcgccaagaagaagggcggcaaccacatccctgagcgctggaaggactacctgcctgtgggccagaggatgcctggcacccgcttcatcgccttcaaggtgcccctgcagaagagctttgagaagaagctggcccctgaggagtgcttcagccccctggacctcttcaacaagatccgggagcagaatgaggagctgggcctcatcatcgacctgacctacacccagcgctactacaagccagaggacctgcctgagaccgtgccctacctgaagatcttcaccgtgggccaccaggtgcctgatgatgagaccatcttcaagttcaagcatgctgtgaatggcttcctgaaggagaacaaggacaatgacaagctgattggagtgcactgcacccacggcctgaacagaacaggctacctgatctgcagaagaagcctggccctgagcccccggctggagtgcagcggcaccatcagcacccacagcaagttctgcttccctggcagccgccgcagccctgccagcgccagccaggtggccggcaccactggagcccggcaccacgcccggctcatcttctgcatcttcagcagagatgtggtgagcccctgctag

SEQ ID NO: 139299 - DNA, 822 bp, Artificial Sequence
  derived and/or modified sequence
atgaggaacagcgagaccctggagcggggcgtgggcggctgcagggtcttcagctgcctgggcagctacccaggcatcgagggcgccggcctggccctgctggccgacctggccctgggcggccgcctgctgggcacccacatgagccagtggcaccaccccaggagcggctggggcagaagaagagacttcagcggccgcagcagcgccaagaagaagggcggcaaccacatccctgagcgctggaaggactacctgcctgtgggccagaggatgcctggcacccgcttcatcgccttcaaggtgcccctgcagaagagctttgagaagaagctggcccctgaggagtgcttcagccccctggacctcttcaacaagatccgggagcagaatgaggagctgggcctcatcatcgacctgacctacacccagcgctactacaagccagaggacctgcctgagaccgtgccctacctgaagatcttcaccgtgggccaccaggtgcctgatgatgagaccatcttcaagttcaagcatgctgtgaatggcttcctgaaggagaacaaggacaatgacaagctgattggagtgcactgcacccacggcctgaacagaacaggctacctgatctgccgccgcagcctggccctgagcccccggctggagtgcagcggcaccatcagcacccacagcaagttctgcttccctggcagcagaagaagccctgccagcgccagccaggtggccggcaccaccggggcccggcaccacgcccggctcatcttctgcatcttcagcagagatgtggtgagcccctgctag

SEQ ID NO: 139300 - DNA, 1134 bp, Artificial Sequence
  derived and/or modified sequence
atgcggaacagcgagaccctggagcggggcgtgggcggctgccgggtctttagttgccttggatcttatcctggaattgaaggcgcaggtctcgcactcctggccgatctcgcccttggtgggcggctactcggtacacatatgagtcagtggcaccacccccggtccggatggggccgtcgcagagatttcagcgggcgctcctcagccaagaagaaaggcggcaatcatatcccagagcgatggaaagattacctgccagtggggcagcgtatgcctgggaccagatttattgcttttaaagtgcctcttcagaaatccttcgagaagaaactagccccagaggagtgcttctcgcccctggaccttttcaacaagatacgcgaacagaatgaggagctgggtcttatcatcgacctgacttatacacagaggtactacaaacccgaagaccttccagaaaccgtgccatatctcaaaatatttacggtcggacaccaggtgcccgatgacgaaaccatattcaaattcaagcacgctgttaacggctttctgaaggaaaacaaggacaacgataagctcatcggtgtccactgcactcacggcctgaaccgaacaggctacctgatctgccggtatctcatcgacgtggagggtgtgaggcccgatgatgctatcgaactgttcaacaggtgcaggggtcattgtctcgagcgtcagaactatatcgaggatctgcagaacggccctattcgcaagaactggaacagcagcgtgccccgctcctcagactttgaagactccgcgcatttgatgcagcctgtccacaacaaacccgtgaaacaaggcccgcgttataacctgcaccagatccagggacatagcgccccaagacattttcacacccagacgcagagcctgcagcagagcgtgcggaagttttcagaaaatccacacgtatatcagcgtcaccatctgcctccacccggtccccctggtgaggattactcccacagacgatacagctggaatgtgaaacctaacgctagccgggctgcccaggacaggaggcgctggtatccttacaattacagcaggcttagttatcctgcatgctgggagtggacccaatag

SEQ ID NO: 139301 - DNA, 681 bp, Artificial Sequence
  derived and/or modified sequence
atgagccagtggcaccacccccggagcggctggggccggcggcgggatttctctgggcgctctagcgctaagaagaaaggcgggaaccacatccctgagcgttggaaagactacctgcccgtgggacagagaatgcctggtactcggttcatagccttcaaagtcccccttcagaagagtttcgagaaaaaactcgcccccgaagagtgcttttctccactagacctgttcaacaaaatccgagaacagaatgaggaacttggcttgatcatcgatttgacctacactcagagatactacaagcctgaggatttacctgaaacagttccatacctgaagatcttcacagtgggccatcaggtccctgacgacgaaacaatttttaagttcaaacacgcagtaaatggcttcctcaaggaaaacaaggacaacgacaagttgatcggggtgcactgtacccatgggctcaatcggaccggctacttaatctgccggcgcagcctagccttgtctccccgtctcgagtgttccgggacaatctctacccatagcaaattctgctttccgggtagcaggagatccccagcaagtgcgagccaagtggccgggacaacaggcgctagacatcatgctcgtctgatattctgtatatttagccgagacgtcgtgtccccatgctag

SEQ ID NO: 139302 - DNA, 822 bp, Artificial Sequence
  derived and/or modified sequence
atgcggaacagcgagaccctggagcggggcgtgggcggctgccgggtgtttagctgccttggatcatatccaggtatagaaggagccggcctggccctgctagctgacctagctttgggcggacggcttctgggcacccacatgtcgcagtggcaccacccgcggtcgggctgggggaggcggcgggacttttctggccggagctccgctaaaaagaaaggggggaaccatattccagaacggtggaaggattacttgcctgtcgggcagcggatgcccgggactagattcattgcgtttaaggtgcctctccagaagtctttcgaaaagaagctggcacccgaggagtgctttagccctctcgacctgttcaataagattcgcgagcagaacgaggagctgggattaatcattgatttaacttacacacagcggtattacaagcccgaggacctccctgagacagtgccctatctgaagatattcacagttgggcaccaggtgcctgacgacgaaaccatcttcaagtttaaacatgctgtcaatggttttctaaaagagaataaggacaatgacaaactgatcggggtgcactgtacccatggtctgaatcggacgggttatctcatttgtcgtagatcgcttgctttgagtccgaggcttgaatgtagtggcactatcagcactcacagcaaattttgctttccaggcagccgccgatcccctgcctcagcttctcaggtggcagggaccaccggtgcccgtcatcatgccagactaatcttctgcatattctcccgcgacgtagtgtcaccttgttag

SEQ ID NO: 139303 - DNA, 1134 bp, Artificial Sequence
  derived and/or modified sequence
atgaggaattccgagactctcgaaaggggagtcggaggctgcagagtgttctcctgcttgggctcataccccggtattgaaggcgctggtctggcgctcctagcagacttagctcttggcggaagactccttggcacgcacatgagccagtggcatcacccacgctccggttggggccgacgacgggacttttctggtaggagcagtgctaaaaaaaaaggcggaaatcacattcccgaacgctggaaggattacctgccagtgggccaaagaatgccaggaacacgcttcatagcatttaaggttcctctccagaagtcctttgagaagaaacttgcccctgaggaatgtttttcgcccctggatctatttaataaaattcgggagcagaatgaagaactcgggctgatcatagaccttacatatactcagaggtattacaagcctgaagatctgcccgaaactgtgccatacctcaaaattttcaccgtgggtcaccaggtgcctgacgatgaaaccatcttcaaattcaaacatgctgttaatgggttcctgaaggagaacaaggacaacgacaaactcataggcgttcattgcacccacggacttaatcggactggctatctgatctgtcggtacctgatagatgtcgagggagtgcgtccggatgacgctatcgagctttttaaccgttgtagaggtcactgccttgagcgccagaattatattgaggacctgcagaatggcccaattagaaaaaattggaacagtagcgtgcctagatcctctgactttgaagattcagctcatttgatgcaaccagttcacaacaaaccagtaaaacagggccctcggtacaacctgcaccagattcaaggacatagtgccccaaggcacttccacacacagactcagagcctccagcagagtgtgagaaagtttagcgagaatccgcatgtgtatcagcgccaccacctcccaccccctgggcctccaggcgaagactattctcaccgccgttactcttggaatgtgaagcccaacgcgtctagagcagcacaggatcgtagaagatggtacccttataattatagcagactttcctaccccgcttgctgggagtggacacagtag

SEQ ID NO: 139304 - DNA, 681 bp, Artificial Sequence
  derived and/or modified sequence
atgtcccagtggcatcaccctagatccgggtggggccgacggcgtgatttctcaggacggtcttctgccaagaaaaaagggggaaatcacatccctgaaaggtggaaagactaccttcccgtgggtcaacggatgcctgggacgcgttttattgcgttcaaagtcccgctgcaaaagtctttcgaaaaaaaacttgcgccagaagagtgtttcagcccactggacctcttcaacaagattagagaacagaatgaagagttgggtctaatcattgatctcacctacacccagaggtattataaacctgaggatcttcccgaaactgtgccttatttgaagattttcaccgtcggtcaccaggtccctgatgatgaaaccatttttaaatttaagcatgctgtgaacgggttcctcaaggaaaacaaggacaatgataagctaattggcgtccattgcacacacgggcttaatcgaaccggatatcttatttgcagacgcagtcttgcactgagcccacggctggaatgttctggtacaatttccacacactcaaaattctgtttccccggaagcaggcgatccccagctagtgcctcacaggtcgctgggactacaggcgcacgccaccacgctagactcatcttctgcattttctctcgtgacgttgtgagcccctgctag

SEQ ID NO: 139305 - DNA, 822 bp, Artificial Sequence
  derived and/or modified sequence
atgcgcaacagtgagacccttgaaagaggggttggtggttgccgcgtcttctcctgccttggatcatacccagggattgaaggcgctgggttagccttgttagcagatttggctctaggcggacggcttttgggaacccacatgtctcaatggcaccatcctaggtcgggctggggacggagacgggatttttcaggtaggtcatcggctaagaaaaaagggggaaaccatatccctgagagatggaaggactacttaccagtggggcagagaatgcccggtaccaggttcatagctttcaaggtgccactacaaaaatctttcgaaaagaaactggccccagaagaatgtttttcacctctagatttgttcaataaaatccgagagcagaacgaggagctgggccttatcatcgatctgacgtatactcaacgctactacaaacccgaagacctgccagagaccgtaccatatctaaaaatctttacagtagggcaccaggtaccggacgacgaaaccatattcaaattcaagcatgcagtgaatggttttctcaaggagaacaaggataatgataaattgataggtgtgcattgtactcacggcctcaaccgtacaggctatctcatctgtcggcgaagcctcgccctgtctcctagactggagtgcagcggcaccatctccacccacagcaaattctgctttcctggttcccggagaagccccgcttccgcttcacaagttgcgggtactacgggggctaggcaccacgcccgattaatcttctgtatcttttcacgtgatgtggtgtcaccgtgttag

SEQ ID NO: 139306 - DNA, 1134 bp, Artificial Sequence
  derived and/or modified sequence
atgagaaacagcgagaccctggagagaggcgtgggcggctgcagagtgttcagctgcctgggcagctaccccggcatcgagggcgccggcctggccctgctggccgacctggccctgggcggcagactgctgggcacccacatgagccagtggcaccaccccagaagcggctggggcagaagaagagacttcagcggcagaagcagcgccaagaagaagggcggcaaccacatccccgagagatggaaggactacctgcccgtgggccagagaatgcccggcaccagattcatcgccttcaaggtgcccctgcagaagagcttcgagaagaagctggcccccgaggagtgcttcagccccctggacctgttcaacaagatcagagagcagaacgaggagctgggcctgatcatcgacctgacctacacccagagatactacaagcccgaggacctgcccgagaccgtgccctacctgaagatcttcaccgtgggccaccaggtgcccgacgacgagaccatcttcaagttcaagcacgccgtgaacggcttcctgaaggagaacaaggacaacgacaagctgatcggcgtgcactgcacccacggcctgaacagaaccggctacctgatctgcagatacctgatcgacgtggagggcgtgagacccgacgacgccatcgagctgttcaacagatgcagaggccactgcctggagagacagaactacatcgaggacctgcagaacggccccatcagaaagaactggaacagcagcgtgcccagaagcagcgacttcgaggacagcgcccacctgatgcagcccgtgcacaacaagcccgtgaagcagggccccagatacaacctgcaccagatccagggccacagcgcccccagacacttccacacccagacccagagcctgcagcagagcgtgagaaagttcagcgagaacccccacgtgtaccagagacaccacctgcccccccccggcccccccggcgaggactacagccacagaagatacagctggaacgtgaagcccaacgccagcagagccgcccaggacagaagaagatggtacccctacaactacagcagactgagctaccccgcctgctgggagtggacccagtag

SEQ ID NO: 139307 - DNA, 681 bp, Artificial Sequence
  derived and/or modified sequence
atgagccagtggcaccaccccagaagcggctggggcagaagaagagacttcagcggcagaagcagcgccaagaagaagggcggcaaccacatccccgagagatggaaggactacctgcccgtgggccagagaatgcccggcaccagattcatcgccttcaaggtgcccctgcagaagagcttcgagaagaagctggcccccgaggagtgcttcagccccctggacctgttcaacaagatcagagagcagaacgaggagctgggcctgatcatcgacctgacctacacccagagatactacaagcccgaggacctgcccgagaccgtgccctacctgaagatcttcaccgtgggccaccaggtgcccgacgacgagaccatcttcaagttcaagcacgccgtgaacggcttcctgaaggagaacaaggacaacgacaagctgatcggcgtgcactgcacccacggcctgaacagaaccggctacctgatctgcagaagaagcctggccctgagccccagactggagtgcagcggcaccatcagcacccacagcaagttctgcttccccggcagcagaagaagccccgccagcgccagccaggtggccggcaccaccggcgccagacaccacgccagactgatcttctgcatcttcagcagagacgtggtgagcccctgctag

SEQ ID NO: 139308 - DNA, 822 bp, Artificial Sequence
  derived and/or modified sequence
atgagaaacagcgagaccctggagagaggcgtgggcggctgcagagtgttcagctgcctgggcagctaccccggcatcgagggcgccggcctggccctgctggccgacctggccctgggcggcagactgctgggcacccacatgagccagtggcaccaccccagaagcggctggggcagaagaagagacttcagcggcagaagcagcgccaagaagaagggcggcaaccacatccccgagagatggaaggactacctgcccgtgggccagagaatgcccggcaccagattcatcgccttcaaggtgcccctgcagaagagcttcgagaagaagctggcccccgaggagtgcttcagccccctggacctgttcaacaagatcagagagcagaacgaggagctgggcctgatcatcgacctgacctacacccagagatactacaagcccgaggacctgcccgagaccgtgccctacctgaagatcttcaccgtgggccaccaggtgcccgacgacgagaccatcttcaagttcaagcacgccgtgaacggcttcctgaaggagaacaaggacaacgacaagctgatcggcgtgcactgcacccacggcctgaacagaaccggctacctgatctgcagaagaagcctggccctgagccccagactggagtgcagcggcaccatcagcacccacagcaagttctgcttccccggcagcagaagaagccccgccagcgccagccaggtggccggcaccaccggcgccagacaccacgccagactgatcttctgcatcttcagcagagacgtggtgagcccctgctag

SEQ ID NO: 139309 - DNA, 1653 bp, Artificial Sequence
  derived and/or modified sequence
agtaagccagcgtggctacgccatcacgaccggcggtggcacatgcgcaatagcgagacgctggagcgcggcgtaggtggctgccgagtcttttcctgtttagggtcttatcctggcattgagggcgccggactggcgcttttggccgacttggcattgggtgggcggcttcttgggacccacatgagccagtggcatcatccccgcagtggctggggccggagacgcgacttttcaggacgctcctcagccaagaagaagggcggaaaccacatccccgaaaggtggaaagactatctcccagttggacagcggatgcctgggactcgtttcattgctttcaaagttcctttgcaaaagagttttgaaaagaaacttgctccagaagaatgcttttcccctttggatctttttaacaaaatccgagaacaaaatgaagaacttggactgattattgatttaacatatactcaacgctattataaaccagaggatttgccagaaactgttccttacttaaaaatttttacagttggacatcaagtgcctgatgatgagactatttttaaattcaaacacgctgttaatgggtttttgaaagaaaataaagataatgataaacttattggtgtccactgtacccatggtttaaacaggactggctacctcatttgcagatatttgattgatgtagaaggcgtgaggccagatgatgcaattgaattattcaataggtgccggggacattgcttagaaagacaaaactacattgaagaccttcagaatggtcctatcagaaagaattggaattccagtgtacccaggtcaagtgattttgaagactcagcacatctcatgcaaccagtccacaataagcctgttaaacaaggacctaggtataatctacatcagatccagggtcactcagctcctcgacatttccacacccagacccaaagtttgcaacaatcagtcagaaaattttcagagaatccacatgtttaccagagacaccatctccctcctcctggtccccctggagaggactattcacacaggaggtattcttggaatgtgaagcccaatgccagtcgggcagcccaggatagaagaaggtggtatccttataattactccagactctcctatccagcctgttgggaatggacccagtgatacaaacctgtcctggaattctacctggagaccagagctggcctgaaaattactggtgtgacttttaattagttcaggtctaatcaggtttctttattgttcccttatgtattcaagcttaaggaaaaattgcattgctgtttacctctttgctgataaatttgcagtaattacagcattgcaggaaaaacaatctgttattccagtcttaaatttttctaaaagaagacaatattttagaactgaagcattgagaacttcccttgcaaattatttttaaaattctatcttgtttttctatgtatttctttctgactagacttgtgatatgcgtgtgtttatgtacagaaatttttagtgtttttgttatgttctgttattgacccaaaggccatctttattttctataactgttcaaaatttatattaaaatctacttaggagataatttctttagaacctagttactacctgtaa

SEQ ID NO: 139310 - DNA, 802 bp, Artificial Sequence
  derived and/or modified sequence
ggagcgcggcgtaggtggctgccgagtcttttcctgtttagggtcttatcctggcattgagggcgccggactggcgcttttggccgacttggcattgggtgggcggcttcttgggacccacatgagccagtggcatcatccccgcagtggctggggccggagacgcgacttttcaggacgctcctcagccaagaagaagggcggaaaccacatccccgaaaggtggaaagactatctcccagttggacagcggatgcctgggactcgtttcattgctttcaaagttcctttgcaaaagagttttgaaaagaaacttgctccagaagaatgcttttcccctttggatctttttaacaaaatccgagaacaaaatgaagaacttggactgattattgatttaacatatactcaacgctattataaaccagaggatttgccagaaactgttccttacttaaaaatttttacagttggacatcaagtgcctgatgatgagactatttttaaattcaaacacgctgttaatgggtttttgaaagaaaataaagataatgataaacttattggtgtccactgtacccatggtttaaacaggactggctacctcatttgcagacggagtcttgctctgtcacccaggctggagtgcagtggcaccatctcgactcactccaagttctgcttcccaggttcacgccgttctcctgcctcagcctcccaagtagctgggactacaggtgcccgccaccacgcccggctaattttttgtatttttagtagagatgtggtttcaccgtgttag

SEQ ID NO: 139311 - DNA, 2175 bp, Artificial Sequence
  derived and/or modified sequence
tggcacatgcgcaatagcgagacgctggagcgcggcgtaggtggctgccgagtcttttcctgtttagggtcttatcctggcattgagggcgccggactggcgcttttggccgacttggcattgggtgggcggcttcttgggacccacatgagccagtggcatcatccccgcagtggctggggccggagacgcgacttttcaggacgctcctcagccaagaagaagggcggaaaccacatccccgaaaggtggaaagactatctcccagttggacagcggatgcctgggactcgtttcattgctttcaaagttcctttgcaaaagagttttgaaaagaaacttgctccagaagaatgcttttcccctttggatctttttaacaaaatccgagaacaaaatgaagaacttggactgattattgatttaacatatactcaacgctattataaaccagaggatttgccagaaactgttccttacttaaaaatttttacagttggacatcaagtgcctgatgatgagactatttttaaattcaaacacgctgttaatgggtttttgaaagaaaataaagataatgataaacttattggtgtccactgtacccatggtttaaacaggactggctacctcatttgcagacggagtcttgctctgtcacccaggctggagtgcagtggcaccatctcgactcactccaagttctgcttcccaggttcacgccgttctcctgcctcagcctcccaagtagctgggactacaggtgcccgccaccacgcccggctaattttttgtatttttagtagagatgtggtttcaccgtgttagccaggatggtcttgatctcctgaccttgtgatccacccgcctcggcctcccaaagtgctggtattacaggagtgagccaccgcgcctggccagactccttattctttttaaggcctgcgttgttctttgcacaccgatgaacacaaaagtcagaagtttttgatattataaaacattgaagtagtgaacatttctatgtaaatatttttgaatgcatatctcatagccccggaggtaatttcactcaaaatagaatttcttaatcaaatagtatgtgtcgttatgctttttatggatgttgccacactgtactgagttatgtttgttcattcagaaaatatctcctgagcatctattatgtgtaagcagtgtgctgcgtgttagcaaagagactttagctgccctttgtgcgtcctaacagtctagggagggagtagatattaaagaatcacacaaatgcctatacaattacaattccaacaagtgctgagaaggggagtgacatggtacaatgagagcatagaatagggaggatttgacttcaacaagaggactagaggtttctgtggggaggtctgagcaaatatctgaagtataagtaggtgttaaccaggtagggatgttgtggagagaattctgaacgtaaggatcagcagagaccatattaacaggaaaatatatactgtgttggaggaactggctagggagactgggccatgggggtagtatggcgttaaaatggagctggaaatatgaataggagctgaaaccatgcagagctatgtttaaggttttagtcactaccttaagagcaatagaaaaccattgaattttttttgttggggatgagtgtggggaacacattcaaatttgtattttcaacctatcattttgctgctgagtggagaatacactgcagagggaaagaggtagaagcaaggagacaagttgggaggtgtttgtaggaactgaggcataatggtggattggaccagggcatggtggtcattttggtagaaagatacagatatactctatagagatatttaggtaatattgttgtcaggagttggtggtgaattgaatatgagagtttggaagaaatggctgacagtgatggtgactcccaagtttctggcccattctgttggttatacagtattttttagatataatgttaatatttttcccaatttgtcttttgttcattgttggtttctgataaatactctgtcatattaaggaagtctctatttttagtgtataaagcattttgataaaaaatgattctgcattttctttccttttgtttattaaattacattaatgtaaataaatatataaata

SEQ ID NO: 139312 - protein, 308 aa, Artificial Sequence [sequence omitted]

SEQ ID NO: 139313 - DNA, 927 bp, Artificial Sequence
  derived and/or modified sequence
atgaccttacgaaggcgcggagaaaaagctaccatcagcatccaggagcatatggctatcgatgtgtgtccgggacctatccgccccataaaacagatttccgactacttccctagattcccccgaggactgccccctgacgcaggcccacgggccgcggccccgccagatgcaccggctcgtcccgcggtggccggggcaggacgaaggtctcctagcgacggcgcacgggaagatgacgaagacgtggaccagttattcggagcatatggatcctcccccggacccagccctggcccatctcccgcacggcccccagctaaaccacctgaagacgagcctgacgccgatggctacgagagcgatgactgtactgccctaggaacgctggattttagtctcttatacgaccaagagaataacgctcttcattgcaccattacgaaagctaaagggctgaagccaatggatcataatggtctggccgacccttacgtgaagctacacttgttgcctggcgcttctaaggccaataagctacgcacaaagaccctgaggaatactctgaaccctacctggaatgagaccctgacatattatggtatcacggatgaagatatgatccgaaagaccttgaggatcagcgtttgtgacgaagacaagtttcggcacaacgaattcataggggaaactcgggtacctctgaaaaaacttaagcccaatcataccaagaccttttctatctgccttgagaagcagctgcccgttgacaagactgaagacaaaagcctggaagaaaggggacgtatattaattagccttaagtatagcagccagaagcagggccttttagttggcatcgttcggtgtgctcatctcgccgcaatggacgccaatggatattccgatccctatgtaaaaacgtag

SEQ ID NO: 139314 - DNA, 927 bp, Artificial Sequence
  derived and/or modified sequence
atgaccctccgccggcgcggcgaaaaagcgactatttcgattcaagaacatatggccatcgatgtttgcccgggacctatccggccaataaagcagataagcgactacttcccacggttcccaagaggattaccaccagacgccggcccaagggccgcggcacccccagacgcacctgcccgtcctgccgtagctggtgcaggccgccgttccccatccgacggcgcccgcgaggatgacgaggatgtggatcaactgttcggcgcatacggatcatcaccaggacctagccctgggccatcaccagctcgccctcctgcgaaaccacctgaagacgagccagacgcagatggttacgaaagtgatgactgcactgctctgggaaccttagatttcagcttgttgtatgatcaagagaataacgcgctgcactgtaccataactaaagccaagggattgaagcccatggaccataatggattagctgacccctatgtgaagctgcacttgctgccgggtgcctctaaagcaaacaaactcaggacaaaaaccctgagaaatacgctgaatccgacctggaacgagacattgacgtactacgggattaccgacgaggacatgatcaggaagaccttgcgaatctctgtttgcgacgaagataaattcaggcacaatgagtttatcggtgagacacgcgttccccttaaaaagctcaagccaaaccatacgaaaaccttctctatttgtctagagaaacagctgcccgtggataaaacagaggacaaatctctcgaggagcgaggaaggattcttatcagccttaagtactccagtcagaagcagggcctgttggtgggaattgtgcggtgcgcgcacttggccgccatggacgcaaacggatactcggatccttacgtgaaaacgtag

SEQ ID NO: 139315 - DNA, 927 bp, Artificial Sequence
  derived and/or modified sequence
atgaccctgcggaggagaggagagaaggccaccatcagcatccaggagcacatggccattgatgtgtgccccggccccatccggcccatcaagcagatcagtgactacttcccccgcttcccccggggcctgcccccagatgctggccccagggctgctgcccccccagatgccccagcccggcctgctgtggccggggccggcagaagaagccccagtgatggagcccgggaggatgatgaagatgtggaccagctgtttggagcctacggcagcagccctggccccagccctggccccagccctgcccggcccccagccaagcccccagaagatgagccagatgctgatggctatgaaagtgatgactgcacagccctgggcaccctggacttcagcctgctgtatgaccaggagaacaatgccctgcactgcaccatcaccaaggccaagggcctgaagcccatggaccacaacggcctggccgacccctacgtgaagctgcacctgctgcccggggccagcaaggccaacaagctgcggaccaagaccctgaggaacaccctgaaccccacctggaatgagaccctgacctactacggcatcacagatgaggacatgatcaggaagaccctgcgcatctctgtgtgtgatgaggacaagttccgccacaatgagttcatcggggagaccagggtgcccctgaagaagctgaagcccaaccacaccaagaccttcagcatctgcctggagaagcagctgcctgtggacaagacagaggacaagagcctggaggagcggggccgcatcctgatcagcctgaagtacagcagccagaagcagggcctgctggtgggcatcgtgcgctgtgcccacctggccgccatggatgccaacggctacagcgacccctacgtgaagacctag

SEQ ID NO: 139316 - DNA, 927 bp, Artificial Sequence
  derived and/or modified sequence
atgaccctgcggcggcggggcgagaaggccaccatcagcatccaggagcacatggcaatcgacgtatgtcctgggcccattcgccctatcaaacaaattagcgattacttcccgcgtttcccaagaggcttacctcctgacgccggcccgagggctgccgcccctccagacgcgccagccagacctgctgttgccggagcaggtcggagatctcctagcgatggtgctagggaggatgacgaggacgtggaccagctttttggagcctacggcagctctcccgggccttcacccggtccgtcaccagcaaggccacctgctaagccaccggaggacgagccggacgctgatggctacgaatcagacgactgcactgcccttggaacactcgacttctctcttctatatgatcaggagaacaatgccctccattgcacaatcaccaaagcaaaaggtttgaagcctatggaccacaatggcctagcagacccctatgtgaagctacaccttctgccgggtgccagcaaagccaataagctaagaactaagactttgcggaatactctgaacccaacatggaatgagacactcacctactatggcatcaccgatgaggacatgattcgcaagacattaagaatctcagtgtgtgacgaggacaagttccggcataacgagtttataggagagacccgggtgcctctcaagaagctgaagccaaatcacacgaaaaccttctccatttgtttggaaaagcagctgcccgtggataagactgaggataagagtctggaggagcgagggcgcatcctgatcagtctcaagtactcttcccagaagcaggggttgctcgtaggcatcgtccggtgcgcccacctggcggccatggatgccaacggttacagtgatccctatgtaaagacgtag

SEQ ID NO: 139317 - DNA, 927 bp, Artificial Sequence
  derived and/or modified sequence
atgaccctgcggcggcggggcgagaaggccaccatcagcatccaggaacacatggcaatcgacgtgtgtcctggcccaatcagaccaatcaagcagatttccgactattttccccggttcccaagaggtctcccacctgatgccgggccacgagctgctgcccctcccgatgctcccgccagacctgctgtcgccggggctggccgcaggagcccctcggatggcgcaagagaggacgacgaagatgttgatcagctctttggcgcctatggatcatcaccagggccctcccccggaccttcccccgcccgcccgcctgccaaaccacctgaggatgaacccgatgccgatggctacgagtccgatgactgtaccgccctgggaacgttggacttcagccttctttacgatcaggaaaataacgcactccactgtacaattacgaaagctaaaggactaaagccaatggatcacaacggactagccgacccatatgtgaagctccacctactgcctggtgcatctaaggctaacaaattacggaccaaaaccctgcggaacacactgaatcctacttggaacgaaactctgacctactacgggataactgacgaggatatgattcgtaagactctgagaatttctgtctgtgatgaggataaatttcggcacaacgagtttatcggagaaactagagtgcctttgaagaagttgaagccaaaccacactaaaactttcagcatttgtctggaaaagcagttacccgtggataaaaccgaagataaaagcctggaggagcgaggaagaatcttgatatctctgaagtacagcagtcagaaacagggactcctagtcggtatcgtgcgatgcgcccaccttgcagcgatggacgcaaacggatacagtgacccatatgtgaagacatag

SEQ ID NO: 139318 - DNA, 927 bp, Artificial Sequence
  derived and/or modified sequence
atgaccctcagacggagaggggagaaagccactattagtatacaggaacacatggccattgatgtctgcccagggcctatacggccaatcaagcagatctctgactacttccccagatttccgagaggcttgcccccagatgccggtcctcgggctgccgcaccaccggatgccccagctcggcctgcggtggccggagccggaagacggtccccaagtgatggggcacgcgaagacgatgaggatgtggatcagttgttcggcgcttacgggagctcccccggaccttcacccggtccaagcccggctcgcccacctgccaaacctccagaagatgagcccgacgcagacggttacgaatccgacgactgtaccgccctcggcaccctcgatttctcactgctgtacgaccaagagaataacgcgcttcactgtacaatcacgaaagctaagggcttgaaaccaatggatcacaatgggctagctgacccgtatgtgaagttgcacctgctgccaggggctagtaaagcaaacaagttacgcacaaagactctgaggaatacactgaatcccacttggaacgagacgctaacctattacggaatcactgatgaagacatgattcgcaaaaccctcaggatatcagtttgcgacgaggataaattcagacataacgagttcattggcgaaacccgggtgcccctaaaaaaactgaagcctaaccatactaagactttctcaatttgtctggagaagcagttgcccgtcgacaaaacagaggataagagtctggaggagcgtggaaggatactgatttctctgaaatacagtagtcaaaagcagggcctgttagtcggcattgtccgctgtgcacacctggctgccatggatgccaacggttatagcgacccctatgtcaaaacgtag

SEQ ID NO: 139319 - DNA, 927 bp, Artificial Sequence
  derived and/or modified sequence
atgacccttcgacgcagaggtgagaaggcaacaatctccatccaggaacacatggccatcgatgtatgcccgggtcctatcagaccgattaagcaaataagtgattatttcccccgatttccgaggggcctgccaccagatgccggaccaagagcagccgcacctccagacgcaccagcacggcctgccgtggccggagcaggacgcaggagcccatcggatggggctagagaagatgacgaagacgtcgaccagttgttcggggcttacggctcatcccccggacccagtccaggccctagtccagcccgtccaccagcaaaaccgccagaagatgagccagacgccgacggctatgagtctgatgattgcacagctcttggcacgctggatttctccctgttatatgatcaggagaataacgccctccactgcactatcacaaaggccaagggcctaaaacccatggaccataacggcctcgcagatccctacgtcaagctgcacctgttacctggcgcatcgaaggccaataaattgaggaccaaaactctgcgtaacacattgaacccaacttggaatgaaaccctcacatactacggaatcacggatgaggacatgatcaggaagaccttacgcatatccgtctgtgatgaagacaaattccggcacaacgagttcattggagagaccagggtcccattaaaaaaactcaagccgaaccatacgaagacattttcaatttgtcttgagaagcaactcccggtagataaaacagaggataagagcctcgaggaaagaggcagaatactgataagcctgaaatatagctctcaaaagcaggggctgctggtcggtattgtccgttgcgcacatttggcagccatggacgcaaacggctactccgatccctacgtcaaaacgtag

SEQ ID NO: 139320 - DNA, 927 bp, Artificial Sequence
  derived and/or modified sequence
atgaccctgagaagaagaggcgagaaggccaccatcagcatccaggagcacatggccatcgacgtgtgccccggccccatcagacccatcaagcagatcagcgactacttccccagattccccagaggcctgccccccgacgccggccccagagccgccgccccccccgacgcccccgccagacccgccgtggccggcgccggcagaagaagccccagcgacggcgccagagaggacgacgaggacgtggaccagctgttcggcgcctacggcagcagccccggccccagccccggccccagccccgccagaccccccgccaagccccccgaggacgagcccgacgccgacggctacgagagcgacgactgcaccgccctgggcaccctggacttcagcctgctgtacgaccaggagaacaacgccctgcactgcaccatcaccaaggccaagggcctgaagcccatggaccacaacggcctggccgacccctacgtgaagctgcacctgctgcccggcgccagcaaggccaacaagctgagaaccaagaccctgagaaacaccctgaaccccacctggaacgagaccctgacctactacggcatcaccgacgaggacatgatcagaaagaccctgagaatcagcgtgtgcgacgaggacaagttcagacacaacgagttcatcggcgagaccagagtgcccctgaagaagctgaagcccaaccacaccaagaccttcagcatctgcctggagaagcagctgcccgtggacaagaccgaggacaagagcctggaggagagaggcagaatcctgatcagcctgaagtacagcagccagaagcagggcctgctggtgggcatcgtgagatgcgcccacctggccgccatggacgccaacggctacagcgacccctacgtgaagacctag

SEQ ID NO: 139321 - DNA, 927 bp, Artificial Sequence
  derived and/or modified sequence
atgaccctccggcggcgcggggagaaggcgaccatcagcatccaggagcatatggccatcgacgtgtgccccggccccatccgtcccatcaagcagatctccgactacttcccccgcttcccgcggggcctgcccccggacgccgggccccgagccgctgcacccccggacgcccccgcgcgcccggctgtggccggtgccggccgccgcagcccctccgacggcgcccgcgaggacgacgaggatgtggaccagctcttcggagcctacggctccagcccgggccccagcccgggtcccagccccgcgcggccgccagccaagccgccggaggacgagccggacgccgacggctacgagtcggacgactgcactgccctgggcacgctggacttcagcctgctgtatgaccaggagaacaacgccctccactgcaccatcaccaaggccaagggcctgaagccaatggaccacaatgggctggcagacccctacgtcaagctgcacctgctgccaggagccagtaaggcaaataagctcagaacaaaaactctccgtaacactctgaaccccacatggaacgagaccctcacttactacgggatcacagatgaagacatgatccgcaagaccctgcggatctctgtgtgtgacgaggacaaattccggcacaatgagttcatcggggagacacgtgtgcccctgaagaagctgaaacccaaccacaccaagaccttcagcatctgcctggagaagcagctgccggtggacaagactgaagacaagtccctggaggagcggggccgcatcctcatctccctcaagtacagctcacagaagcaaggcctgctggtaggcatcgtgcggtgcgcccacctggccgccatggacgccaacggctactcggacccctacgtgaaaacgtga

SEQ ID NO: 139322 - DNA, 1080 bp, Artificial Sequence
  derived and/or modified sequence
tccgcagcggagcgggcagcggccaagtcagggccgtccgggggcgcggccggcgatgcccgcagcccccgccgcgccccgccgggcctgctgagccgcccccgggccggggtcgcgccgggccgggccgcgcccggggcggggcggcgctgcctgcatgaccctccggcggcgcggggagaaggcgaccatcagcatccaggagcatatggccatcgacgtgtgccccggccccatccgtcccatcaagcagatctccgactacttcccccgcttcccgcggggcctgcccccggacgccgggccccgagccgctgcacccccggacgcccccgcgcgcccggctgtggccggtgccggccgccgcagcccctccgacggcgcccgcgaggacgacgaggatgtggaccagctcttcggagcctacggctccagcccgggccccagcccgggtcccagccccgcgcggccgccagccaagccgccggaggacgagccggacgccgacggctacgagtcggacgactgcactgccctgggcacgctggacttcagcctgctgtatgaccaggagaacaacgccctccactgcaccatcaccaaggccaagggcctgaagccaatggaccacaatgggctggcagacccctacgtcaagctgcacctgctgccaggagccagtaaggcaaataagctcagaacaaaaactctccgtaacactctgaaccccacatggaacgagaccctcacttactacgggatcacagatgaagacatgatccgcaagaccctgcggatctctgtgtgtgacgaggacaaattccggcacaatgagttcatcggggagacacgtgtgcccctgaagaagctgaaacccaaccacaccaagaccttcagcatctgcctggagaagcagctgccggtggacaagactgaagacaagtccctggaggagcggggccgcatcctcatctccctcaagtacagctcacagaagcaaggcctgctggtaggcatcgtgcggtgcgcccacctggccgccatggacgccaacggctactcggacccctacgtgaaaac

SEQ ID NO: 139323 - protein, 1041 aa, Artificial Sequence
  derived and/or modified sequence
MATPAGLERWVQDELHSVLGLSERHVAQFLIGTAQRCTSAEEFVQRLRDTDTLDLSGPARDFALRLWNKVPRKAVVEKPARAAEREARALLEKNRSYRLLEDSEESSEETVSRAGSSLQKKRKKRKHLRKKREEEEEEEASEKGKKKTGGSKQQTEKPESEDEWERTERERLQDLEERDAFAERVRQRDKDRTRNVLERSDKKAYEEAQKRLKMAEEDRKAMVPELRKKSRREYLAKREREKLEDLEAELADEEFLFGDVELSRHERQELKYKRRVRDLAREYRAAGEQEKLEATNRYHMPKETRGQPARAVDLVEEESGAPGEEQRRWEEARLGAASLKFGARDAASQEPKYQLVLEEEETIEFVRATQLQGDEEPSAPPTSTQAQQKESIQAVRRSLPVFPFREELLAAIANHQVLIIEGETGSGKTTQIPQYLFEEGYTNKGMKIACTQPRRVAAMSVAARVAREMGVKLGNEVGYSIRFEDCTSERTVLRYMTDGMLLREFLSEPDLASYSVVMVDEAHERTLHTDILFGLIKDVARFRPELKVLVASATMDTARFSTFFDDAPVFRIPGRRFPVDIFYTKAPEADYLEACVVSVLQIHVTQPPGDILVFLTGQEEIEAACEMLQDRCRRLGSKIRELLVLPIYANLPSDMQARIFQPTPPGARKVVVATNIAETSLTIEGIIYVLDPGFCKQKSYNPRTGMESLTVTPCSKASANQRAGRAGRVAAGKCFRLYTAWAYQHELEETTVPEIQRTSLGNVVLLLKSLGIHDLMHFDFLDPPPYETLLLALEQLYALGALNHLGELTTSGRKMAELPVDPMLSKMILASEKYSCSEEILTVAAMLSVNNSIFYRPKDKVVHADNARVNFFLPGGDHLVLLNVYTQWAESGYSSQWCYENFVQFRSMRRARDVREQLEGLLERVEVGLSSCQGDYIRVRKAITAGYFYHTARLTRSGYRTVKQQQTVFIHPNSSLFEQQPRWLLYHELVLTTKEFMRQVLEIESSWLLEVAPHYYKAKELEDPHAKKMPKKIGKTREELG

SEQ ID NO: 139324 - protein, 1041 aa, Artificial Sequence [sequence omitted]

SEQ ID NO: 139325 - protein, 669 aa, Artificial Sequence
  derived and/or modified sequence
MATPAGLERWVQDELHSVLGLSERHVAQFLIGTAQRCTSAEEFVQRLRDTDTLDLSGPARDFALRLWNKVPRKAVVEKPARAAEREARALLEKNRSYRLLEDSEESSEETVSRAGSSLQKKRKKRKHLRKKREEEEEEEASEKGKKKTGGSKQQTEKPESEDEWERTERERLQDLEERDAFAERVRQRDKDRTRNVLERSDKKAYEEAQKRLKMAEEDRKAMVPELRKKSRREYLAKREREKLEDLEAELADEEFLFGDVELSRHERQELKYKRRVRDLAREYRAAGEQEKLEATNRYHMPKETRGQPARAVDLVEEESGAPGEEQRRWEEARLGAASLKFGARDAASQEPKYQLVLEEEETIEFVRATQLQGDEEPSAPPTSTQAQQKESIQAVRRSLPVFPFREELLAAIANHQVLIIEGETGSGKTTQIPQYLFEEGYTNKGMKIACTQPRRVAAMSVAARVAREMGVKLGNEVGYSIRFEDCTSERTVLRYMTDGMLLREFLSEPDLASYSVVMVDEAHERTLHTDILFGLIKDVARFRPELKVLVASATMDTARFSTFFDDAPVFRIPGRRFPVDIFYTKAPEADYLEACVVSVLQIHVTQPPGDILVFLTGQEEIEAACEMLQDRCRRLGSKIRELLVLPIYANLPSDMQARIFQPTPPGARK

SEQ ID NO: 139326 - protein, 147 aa, Artificial Sequence
  derived and/or modified sequence
MATPAGLERWVQDELHSVLGLSERHVAQFLIGTAQRCTSAEEFVQRLRDTDTLDLSGPARDFALRLWNKVPRKAVVEKPARAAEREARALLEKNRSYRLLEDSEESSEETVSRAGSSLQKKRKKRKHLRKKREEEEEEEASEKGKKK

SEQ ID NO: 139327 - DNA, 3126 bp, Artificial Sequence
  derived and/or modified sequence
atggcaaccccagctgggttggagcgctgggtccaagatgaactgcacagtgtcttaggactgtccgaacgccacgtggcccagtttctgatagggacagcccagcggtgtacctcagcggaggaatttgtgcagcggctgagggatacggataccctcgatctgtctggcccggcacgggattttgcacttcgcctatggaacaaagtgcctaggaaggccgtggtggagaagccggcaagagccgccgagcgcgaagctagggcacttctcgagaaaaacagaagttatcgtctgttggaggactctgaggaatcaagcgaggaaaccgtcagccgggctggcagctctctgcaaaagaagcggaagaaaagaaagcatctgcggaaaaagcgggaggaagaggaagaggaggaagcctcagagaagggcaagaaaaagaccggggggtccaagcaacagacagagaagccagaaagtgaggacgagtgggagcgaactgaacgagagagactccaggaccttgaggagagggatgcatttgctgaaagggtacgtcagcgcgacaaagatagaacccgtaatgtgctggaacgatcggataaaaaagcctacgaggaagcgcagaagcgattaaaaatggccgaggaagatcggaaagctatggtcccagagcttcgtaagaaatccaggcgtgaatacctcgccaagcgcgagcgggaaaaactggaggacctggaagcagagctggcagacgaggagtttctgtttggcgatgtcgagctgtccaggcatgaaagacaggagcttaaatacaaaagacgcgttagagatcttgcccgagagtacagagctgccggcgagcaggagaagttagaagcaaccaatcgctatcacatgcccaaggaaacgcgggggcagcccgctcgagccgtcgacttggtagaagaagagtccggcgcccccggcgaagagcagagaaggtgggaggaggctcggctgggggcagcttcacttaagtttggcgctcgcgacgccgccagccaagaacccaaataccagctagtgctcgaagaggaggaaacaattgagtttgtgagggctacacagctgcagggcgacgaagaacccagtgcaccacccacatcaacccaggcccagcaaaaagaatcaattcaggcagtgcgtcgttccctgccggtttttcctttccgcgaagagttgctggctgccatcgccaaccaccaggtcctaattattgagggcgagaccggatcaggcaaaacaacccagatccctcagtacctgttcgaggaaggctataccaataagggaatgaaaatcgcatgtacccaaccccggagagtggcagccatgtcagtggccgctagggtggcccgggagatgggagttaagctgggtaatgaagttggctattcaatcaggttcgaggattgcacatccgaaaggacggttttaaggtatatgacagatggaatgcttctgagggaatttctgagtgaaccagatctagcttcctactccgtagtgatggtggacgaggcccatgaacgaactctacatactgacatactgttcggcctcataaaagacgtggcccgcttccgacctgagttgaaggttctggttgcatcagccacgatggacacagcccggttcagtacttttttcgacgacgcaccagtgtttagaatccctggcaggagatttccagtcgatattttttatacgaaagcacctgaagctgactatctcgaggcttgtgtggtgtcagtcttacaaattcacgtcacccaaccaccaggagacatcctcgtgttcctgaccggacaggaggaaatcgaggcagcctgtgaaatgctccaggatagatgtagacgcctcggcagtaagatacgggaacttttggttctgcccatctacgctaacctcccaagcgatatgcaagctaggatcttccagccaacacctcccggcgctagaaaggttgtggtcgctaccaatattgccgagactagtctaaccatcgagggtattatctacgtgctggaccctggcttttgtaaacaaaagtcttataaccctcggaccgggatggaatcattgaccgtgaccccctgttcgaaagccagtgcaaatcagagagccggcagagccgggagagtagccgccggtaagtgttttagactgtataccgcgtgggcataccaacacgagctggaggagacaaccgtacccgaaatccagcgcactagtctgggcaatgtagtgctcctcctgaagtctttagggatccatgaccttatgcatttcgatttcctggatcccccgccctatgagaccctccttctggcactcgaacagttgtacgcacttggcgcgctgaatcatctcggtgagctcactactagcggtcgaaagatggccgaattacctgtagacccaatgctgtctaaaatgatcctggccagcgagaagtacagttgttcagaggaaattctcaccgttgccgccatgttaagcgtgaacaactctatcttctaccggcctaaggacaaggtggtacacgccgacaacgcgagggttaactttttcctcccgggaggggatcacctggtgctgctcaacgtgtacacacaatgggcagaatctggctactccagtcagtggtgttacgaaaattttgttcagtttagatctatgcgcagagcacgcgatgtgagggagcagcttgagggactattggagagagtcgaagtggggctgtcctcgtgccagggggactatatcagagtcagaaaggccatcaccgccggatatttctaccacactgctcggctgacacggtccggttatcggacagtgaagcagcagcagaccgttttcattcacccaaattccagcctgtttgagcaacagccccgctggctcctgtaccacgagctggtgcttacgactaaagaatttatgaggcaggtgcttgagattgaatcctcctggttattggaagtggcaccacactactataaggccaaggaactcgaagatccgcacgccaagaagatgcccaagaaaattggcaaaacccgcgaggagctgggatag

SEQ ID NO: 139328 - DNA, 3126 bp, Artificial Sequence
  derived and/or modified sequence
atggcgacccctgctggactggaaaggtgggtgcaagatgaactccactcagtactgggtctcagcgaaagacacgtggcacagtttttgatcgggaccgcccagaggtgtacatctgcagaagagtttgtgcagcggctgagggacacagatactctggatctctctggccccgctagagacttcgcactgcggctgtggaataaggtgcctcgcaaagccgtggtggagaaacccgcacgcgcagctgagagggaagccagggccctacttgagaaaaatagatcatatagactccttgaagattcggaggagtcctccgaagaaactgtgtctcgggccgggtcatccctgcaaaagaagagaaagaaacgaaaacatctgagaaagaaacgagaagaggaggaggaagaggaggcctctgagaaaggtaagaagaagaccggcgggtccaaacagcagactgaaaaaccggagtctgaagatgagtgggaacgtaccgagagggagcgcctccaggacctggaagaacgagatgcctttgccgagagagtccgacaacgggacaaggaccgcactcgcaatgtgctggagcgctcagacaagaaggcatacgaagaggcccagaaacggttaaagatggcagaagaggacagaaaagccatggtccccgagcttcggaagaagagccgaagggaataccttgctaagagggagcgggagaagctggaggatctagaagccgaactcgctgatgaggaatttctctttggagatgtcgagctctcccgccatgaaagacaggagcttaagtataaaagaagagtgcgggacctcgctcgggagtatcgcgcggccggcgagcaagagaaactcgaggctaccaaccgatatcacatgcccaaagagacaaggggccaaccagcacgagcggtggacctggttgaggaagaaagtggcgctcccggtgaagaacagagacgttgggaggaggctaggttaggcgctgcgagcttgaagtttggggcacgcgacgccgcttcccaggagcccaagtatcaacttgtgctagaggaagaggagactatcgaattcgtgagggctactcagcttcagggcgatgaggaacccagcgccccaccaacttccacacaagcccagcagaaggagagtatccaggctgttcggcggtcactccccgtgttcccattccgcgaagagcttttggccgccattgccaaccatcaggtcctgatcattgagggggaaactggtagtggcaagaccacccaaatcccgcagtatctgttcgaagaaggctacacaaacaaagggatgaaaattgcatgcacccagcccagacgggtcgcagctatgtccgtggccgcacgggtcgccagggaaatgggcgtgaaactcggaaacgaagtcggatatagcatcaggttcgaggattgcacctctgagaggacagtgctgcggtatatgacggacggaatgctgcttcgggaattcttgtctgagcctgatttagcgagttactctgtggtcatggttgatgaagcacacgaaagaaccttacacacggatatattgttcggcttgattaaagacgtggctagatttagaccagaactgaaggtgctggtggcatccgcaacgatggacaccgcccgattcagcacgttcttcgatggtgcccccgtttttaggatccctgggcgccgatttcccgtcgacattttttatacgaaagcacccgaagccgattacctggaggcctgcgtggtgtccgtgctgcagatccacgtcactcaaccccccggcgacatcctggtcttcctcacaggccaggaggagattgaggccgcatgcgaaatgctgcaggaccgctgcaggaggttagggagtaagatccgcgagctgctagtactgcctatatacgcgaatctccccagtgacatgcaggcccgaatattccaacccactcccccaggagctcggaaagtagttgtcgccacaaatattgctgagacaagtctgactattgaagggatcatttatgtgctcgacccaggtttctgtaagcagaaaagctacaacccccgaactggaatggagtccctgacagtcacgccgtgctctaaggcctctgcaaaccagcgggctggccgcgccggacgcgtcgctgccggcaagtgcttcaggttgtatactgcgtgggcttatcagcatgaactggaagagaccacggtacccgagatacagaggacaagcctaggaaacgtagttcttctgctgaagtccttgggtattcacgacttaatgcacttcgatttcctcgaccctcccccttacgagactctgttgctggcgcttgagcagctctatgccctgggagcgctgaaccacctcggcgaactgacaactagcggtagaaagatggccgagctccccgtcgatccgatgctgtccaagatgattctggcgtcagaaaagtactcttgttccgaggagattcttacagtcgctgccatgttgtcggttaataattcaatattctataggcctaaggataaggtcgtacacgcagataacgcgcgggtgaactttttcttgcccgggggggaccaccttgttctgttaaatgtctacacacaatgggcagagtcaggctatagtagtcagtggtgttacgagaacttcgttcaattccgctctatgcggagggcacgggacgtacgggagcagcttgagggtctcttagagcgagtcgaagttggcctctcgtcctgtcagggggactatatacgagttcggaaggctatcactgccggctacttttaccatacggctcggcttactcgctccggctatcggactgtgaagcagcagcaaactgtgttcatacaccctaacagttctctattcgaacagcagccccgatggctgctctatcacgaacttgtactcacaaccaaggagtttatgagacaagtactcgagatcgagtcaagctggttgcttgaggtcgcaccccattactataaagccaaagagctagaagatccacacgcaaagaagatgcccaaaaagataggcaaaacccgcgaggagctagggtag

SEQ ID NO: 139329 - DNA, 3126 bp, Artificial Sequence
  derived and/or modified sequence
atggctactccagctggcctggaacgctgggttcaagacgagcttcattctgtcctgggcttatcagagcgccatgttgcacagttccttataggaaccgcccagaggtgcacttcggctgaagaattcgtacaaaggctcagagacacagacactttggatctgtctgggcccgctagagactttgccctgaggctgtggaataaagttccacgcaaggctgtggttgaaaagcctgcccgggccgctgagagagaggcgcgtgcactgctcgaaaaaaacaggtcataccgcttactagaagactctgaggaatcttcagaagaaactgtcagtcgggcggggtctagtctccaaaaaaagagaaagaaacgaaagcacctgcgcaaaaagcgggaggaagaggaggaggaggaagcttccgagaaagggaagaagaagacaggtgggagcaaacagcagactgagaaaccggagagcgaggatgagtgggagcggacggagagagagagattgcaggacttagaagagcgggatgccttcgccgagagagtgcgccaaagggataaggaccggacgcgcaacgtgcttgagagatctgataaaaaagcttacgaagaggcccagaaacgccttaagatggctgaggaggaccgcaaggccatggtcccagagctacgaaagaaatcgcggcgggagtatctcgccaagcgggagcgcgaaaagttggaagacctggaagccgaactggcagacgaagaattcctgtttggcgatgttgaactgtctcgccacgagcgtcaagaattgaaatacaagagacgagttcgcgaccttgcccgagaatacagggccgcgggcgagcaggagaaactcgaagctacgaatcgttatcatatgccaaaggaaacccggggtcagcccgcacgagcggtcgacctggttgaggaggagagcggggcccccggcgaagagcagcggcggtgggaagaagcccgcctaggagctgctagccttaaattcggcgccagggacgccgcctcccaggagccgaagtaccagctcgtgctcgaggaagaagagactatcgagtttgtgagagccacgcagctgcagggagacgaagaaccatctgcaccccccacatccacccaggcccagcagaaagaaagtattcaggccgtgaggcgcagcctgccagtattcccctttagggaggagctcctggccgctattgcaaatcatcaagtgctgattattgagggcgaaacgggcagtggaaaaaccacccaaataccacagtatttatttgaggaagggtataccaacaaggggatgaagatcgcctgtactcagcccaggagggtggccgctatgtccgtcgccgctagagtcgctcgtgagatgggagtgaagctgggcaatgaggtggggtacagtatccggtttgaagattgtacatctgaacggactgtgctgaggtacatgactgacggtatgctgctgcgggagtttctctccgagcccgatctcgctagctactccgttgttatggtcgatgaggcccatgagcgcacgctgcatacagatatcctattcggacttattaaggacgtagctcgattccgacctgagttgaaagttttagtggcatcagctaccatggacacagctcgcttcagcaccttctttgatgacgcccctgtgttccggattcctggccggcgcttccctgtggatatcttttatacaaaagccccagaggcagattacctggaggcttgtgtggtgtccgtcctgcaaatacacgtcactcagcctccaggagacatcctggttttcctgactggccaggaagaaattgaggcagcgtgtgagatgctgcaggaccgctgtcgcagattagggagcaaaattcgggagctcttagtgctgccaatttacgctaatctcccaagtgacatgcaggcacgcatctttcagcctactccaccaggtgctcggaaggtggtcgtggctactaacattgctgaaacaagcctaaccatcgagggaattatttacgtcctggacccaggattctgcaagcagaagtcatacaacccacgtactggaatggagtctttgactgtaacaccatgctcaaaggccagcgctaatcagcgagctggacgggccgggagagtcgcagcaggcaaatgttttcgtctgtatacagcttgggcataccagcatgaactggaagaaaccactgtccccgaaatccagagaaccagtcttggcaatgtggtactacttcttaaaagcctgggcattcatgatctcatgcacttcgacttccttgacccccctccttacgagaccctgctgctggcactcgagcagctgtatgcgctgggggcgttgaaccacctcggagagttgaccacatctggccgaaagatggcagaactccctgtcgaccccatgctttccaaaatgatactcgcgagcgaaaagtactcctgctccgaagagatcctgaccgtcgctgctatgctgtctgtaaacaattccatcttctataggccaaaagacaaggtagtgcacgccgataacgctagggttaatttcttcctccccgggggcgatcatttggtgctgctgaacgtgtacacacaatgggcagagtcaggctactcatcacagtggtgttatgagaatttcgtccagttcagatccatgcggcgggcgagagacgtgcgcgagcaactcgaaggcctgctggaacgtgtggaggttggattatctagctgtcagggagactacataagagtgagaaaggcaattacagctggttacttctaccacactgcaagacttaccaggtcagggtatcggactgtgaaacaacagcagaccgtatttattcaccctaacagcagtctcttcgagcagcagccacgatggcttctgtaccacgagctcgtgctcaccacgaaagagttcatgcgccaggtgcttgagattgaaagctcgtggctgctagaggtcgcacctcattattacaaagcaaaagaattggaagacccacacgccaagaagatgcccaagaaaatcgggaagacacgtgaagagttggggtag

SEQ ID NO: 139330 - DNA, 3126 bp, Artificial Sequence
  derived and/or modified sequence
atggcgacacccgctggactggagaggtgggtgcaggacgagcttcacagcgtgctgggacttagcgaaagacacgtggcacagttcctgatcggcacagcccagcggtgcacttcagccgaggagtttgtgcaaaggctgagagacactgataccctcgatctctccggacctgcccgagactttgctctccggctgtggaataaagtaccccgaaaagctgtggtggagaaacccgctagggccgccgaacgcgaagcacgcgccctgctggagaagaatcgatcatatagactcttggaggattccgaggaatcctcagaggagacggtatcacgcgccgggtcatctcttcagaaaaaaaggaaaaagcgcaaacatctgcgcaagaaacgggaagaggaagaggaagaggaggcctccgagaaggggaagaagaaaacaggcggaagcaagcagcagactgaaaagcccgaatcagaagacgagtgggagaggacagaaagggaacgtctgcaggacctggaggagcgcgatgccttcgcagagcgcgtgcgccagcgcgacaaagatcggacgagaaacgtcctggaacgaagcgataaaaaagcttacgaagaggcccaaaaaagactcaagatggccgaggaagaccgaaaggccatggtgcctgagttgcggaaaaagtcccgccgagagtacctggccaaacgcgagcgggagaagttagaggacctggaagcggaattggccgacgaagaatttctgtttggggacgtagagcttagtagacatgagcggcaggagctgaaatataaacggcgggtacgtgacctagctcgggaatatcgggccgctggggaacaggaaaaattggaggccactaacagatatcacatgcccaaagagacaagggggcagcccgcgagggctgtggaccttgtcgaggaggaaagcggcgctccaggcgaggagcagcggaggtgggaagaggcgcgactgggagctgcatctctcaagtttggcgctcgtgatgcggcatcacaggaacccaagtatcagcttgtgctagaggaggaggagactatcgagttcgttcgggctactcagctccagggtgacgaggaaccaagtgcaccaccaacgtcaacgcaagcccagcaaaaagagtccattcaggctgtgcgcaggtcactcccggtgtttcccttcagagaggagctgctcgccgcaatcgcaaaccatcaggtactgattatcgagggcgaaacaggaagcggaaagactacccaaattcctcaatatttgttcgaggaaggttataccaacaagggaatgaagattgcatgtacgcagccccgaagagtcgcagccatgtccgttgccgcccgagtggcgagagaaatgggcgtgaaattaggtaacgaggttggctacagcataagattcgaagattgtacctccgaacgcactgtcctgaggtacatgaccgatggcatgctgctcagggagtttctttccgagcctgacctcgcttcttacagcgtcgtgatggtagacgaggcacacgaaagaacacttcacactgatattttgttcggcctgattaaggatgtcgcccgcttcagaccggaactgaaagtgctggtggccagcgccacaatggacacagcccggtttagtacattcttcgacgacgcgccggtcttcagaattcctgggcggcggtttccggtggatatcttttatactaaggccccagaggccgactacctggaggcttgcgtagtgagtgtactgcagatccatgtgacgcaaccccccggcgacattctggttttcttaaccgggcaggaggagatcgaggccgcatgtgagatgctccaggataggtgcaggaggctgggctctaagattagggagctcctggtgctgccaatctatgctaacctgccttcagacatgcaggctaggattttccagccgacaccacccggagcacggaaagtggtggttgcaacaaacatcgcagaaacctcattgaccatcgaggggattatttacgtccttgatcctggcttttgcaagcagaaatcatataatccacgtaccggaatggagagcctcacggtcactccttgttccaaagcctcagccaatcaaagagccgggagagcaggaagagtggcagccggaaaatgttttaggctgtacaccgcctgggcataccaacacgagctggaggagacaacagtccccgagatacagcgcacttcgctgggaaatgtggtcctacttctgaagtctctgggcattcacgatctgatgcacttcgatttcttggacccgccaccttacgaaactctcctgctggccctggagcagctgtacgcgctaggggctctgaatcacctgggcgagctgactacatccggccgaaagatggctgaactgccggtggacccaatgctctctaagatgatactcgcatctgaaaaatattcatgcagtgaggaaatcctaaccgtggccgctatgctgagtgttaacaacagcattttttacagacccaaggacaaggtcgtacacgcggataatgcacgcgtcaatttttttctgccaggcggggaccacctggttctgctgaatgtgtatacacagtgggccgagtccggctactcatctcagtggtgctacgaaaattttgtccagttccgcagcatgagaagggcaagggacgtgcgcgagcaattggaaggcttactcgagagggtcgaggtcggcctctctagctgccagggagactacatccgggttcgaaaagctataaccgccggctacttctaccatacagccagactgacaaggtccggttataggactgttaagcagcagcagactgtctttattcaccccaactcttctttatttgagcagcagcccagatggcttctgtatcacgagctggtgctgacaacgaaagaattcatgcggcaagtcttggagatcgagtcttcctggcttcttgaggttgcgcctcattactacaaagccaaggagctggaggatccacacgccaaaaaaatgcctaagaagattgggaaaacacgggaggaactgggatag

SEQ ID NO: 139331 - DNA, 3126 bp, Artificial Sequence
  derived and/or modified sequence
atggccacacctgccggactggagcgatgggtgcaagacgagctacactccgtgctaggactgtccgaaaggcacgtggctcaatttctcattggtaccgcacagaggtgcacatcggccgaggaattcgtgcagcggctccgtgacaccgataccctcgacctttctgggcctgctcgagatttcgccctgcgcttgtggaacaaagtgccaaggaaagccgtggttgaaaagcctgctagagccgctgagcgggaggcaagggcccttttggagaaaaatcggagctatcggttattggaggactctgaagagagtagtgaagagaccgttagtcgggcggggtcgtccttgcagaagaagcgaaaaaaaaggaagcacctgcggaagaagcgcgaggaagaagaggaagaagaggctagcgagaagggcaaaaagaaaactgggggctccaagcagcagacagaaaaacctgaatccgaagacgaatgggaaagaaccgagcgcgaaagacttcaggatttggaggagagagacgctttcgcagaaagagtgcggcagcgcgacaaggataggacccgaaacgtgctggaacggtctgacaaaaaggcctacgaggaagcccagaagcgactcaagatggcggaggaggacagaaaagccatggtgcccgagctccgtaagaaaagtcgcagggagtacctggccaaaagagagagggaaaagctggaggatcttgaggcggagttagcggacgaggagttcttgttcggagacgtcgagttgtctcgccacgagagacaagagctgaagtacaagagacgggtacgcgatctggcgcgcgagtaccgtgccgccggtgagcaggagaagctggaagccaccaacagataccacatgccgaaggagacccggggccaaccggctagagcagtggatctggtggaggaggagagcggcgcccccggagaagagcagcgcagatgggaggaggcccggctcggggccgcaagcctgaagttcggtgccagagatgcagcatcccaagaaccgaaatatcagctggtgttagaagaggaggaaactattgaatttgtacgcgcaacacagctgcaaggagacgaggaaccttcagctcctccaacatccacacaagctcagcagaaagagtcaattcaggccgtcaggcgctcactgcccgtgttcccatttcgggaagagctcctagctgcgatagcaaatcaccaggttcttatcatcgagggcgagacaggctccggaaagacaacccagatcccccagtatttgtttgaggaaggctacactaacaaggggatgaaaatcgcgtgcactcagcctaggagggtcgccgctatgagcgtggccgcccgtgttgcccgtgagatgggggtcaagctgggaaacgaggtcggatacagtattcggttcgaggattgtacatcggaaagaaccgtgctgcgctacatgaccgacgggatgttactccgtgagttcctgagtgaacccgaccttgcatcctactcagtcgtgatggtggacgaagcacacgagcgaaccttgcacacggacattctgttcggtctcattaaggacgtcgctagatttcgacccgaactgaaggtgctggtcgcatcagccactatggacacagcccggttttcaacattcttcgacgatgctcctgtgtttcgcatccctgggaggagattccccgttgatatcttttacacaaaagcacccgaggctgactaccttgaggcttgtgtcgtgtctgtcttacaaattcatgtgactcaacccccaggcgacatcctagtgttcttgacaggccaggaagaaatcgaagctgcatgcgagatgctccaggatagatgtagacggttagggtccaaaatcagggagttgctagtgctgcctatctacgccaatttgccctccgacatgcaggcccggatctttcagccaacgcctcctggggcaagaaaggtcgtggtcgcgaccaacatagctgaaacatcccttactatcgaaggtattatatacgtactggaccccggcttttgtaagcagaagtcctacaaccccagaaccgggatggagtccctgacagtgactccctgcagcaaggctagcgcgaaccagcgggcaggccgcgcaggccgggtggccgccggtaaatgcttccgcctgtatacagcatgggcctaccagcatgagttggaggaaactacagtgcctgaaatccagagaaccagtctggggaacgtcgttctgctgctgaagagcctgggcattcacgatcttatgcattttgacttcttagatcctcccccgtacgaaaccttgctgctggcgcttgagcagctctatgctcttggggcactgaatcatctgggggagctgactacctccgggagaaagatggccgaattgcccgtggatccgatgctttccaagatgatcctggcatccgaaaaatattcttgttctgaagaaatattgactgttgccgccatgttgagtgtgaacaacagtattttttaccgccctaaagataaggtggtccacgccgataacgcccgcgttaacttttttctccctggtggagaccatctggtgctcctgaacgtttatacccagtgggcggaatccgggtactcaagccagtggtgctacgagaacttcgttcaatttagatcaatgcgacgggccagggacgtccgtgagcaacttgaagggctgctggagcgagtggaggtggggctttcaagttgtcagggcgattacatacgagtacgcaaggccattaccgctggctatttttatcatacggctcgtttgacacggtctggttaccggaccgtcaagcagcagcagacggtgtttatccacccaaactcttcgctgtttgaacaacagcccaggtggttgctgtatcatgagcttgtgttaaccaccaaggagtttatgcgacaagtgctggaaattgaatcttcttggctgctagaggtggcgccccactattataaagctaaagagttagaagatccccacgcgaagaagatgcccaagaagatcgggaaaactcgcgaagagctggggtag

SEQ ID NO: 139332 - DNA, 2010 bp, Artificial Sequence
  derived and/or modified sequence
atggccacgcccgcgggtcttgagagatgggtgcaggacgagctacacagtgtcctagggctgtctgagaggcatgtggctcagttcctgatcggtaccgcgcaaagatgcacaagtgccgaagagtttgtgcaacggctgagagatacggatacgctggatttgagtggcccggcccgcgacttcgccctcaggctctggaataaggttccaagaaaggcggtagtggagaaacctgcgcgggcggcagagagagaggctagagccctgctcgagaagaataggagttaccgtcttctggaagattcagaggagtcctcggaggagacagttagcagggctggctcttccttacagaagaaacgaaagaagagaaaacacttgcggaagaagagagaggaggaagaggaagaagaggcaagtgaaaagggaaagaaaaaaacaggtggttctaagcagcaaacggaaaagcccgagagcgaggacgaatgggagaggacggaacgggagcggctgcaggatctggaagagcgcgatgcgttcgcagagcgggtgagacagagggacaaagataggacaagaaacgtgctcgaaagatccgacaagaaggcatacgaggaagctcagaaacggcttaagatggccgaagaggacaggaaagccatggttcccgaacttcggaaaaaatccagacgagaatatctggccaaaagagagcgtgaaaagctagaggacctggaggctgaactagcagacgaggagttcctgttcggggatgtggaactcagccggcacgaaaggcaggagctcaaatataaacgcagggtgagagacctggccagagagtacagagctgctggagagcaagaaaaacttgaagctaccaaccgctaccatatgcccaaagagactagaggacagcccgccagagcagtcgacctagtggaggaggagagcggcgctcccggtgaagaacaacgtagatgggaagaggcaagactgggggccgcctctctgaaatttggagccagggacgccgccagccaggagccgaagtatcagctggtgctggaggaagaagagacaatcgagtttgtccgggccactcagttgcagggggatgaagaaccttctgcaccacctacctcaacacaagcccaacagaaggaaagtatccaggccgttaggcggagtctgccggttttcccctttcgtgaagaactgctcgctgccatcgctaatcatcaggtgctcattatcgaaggtgagacaggtagcgggaagacaacccagataccccagtatctgtttgaggagggatatactaataaaggcatgaaaatagcttgtacacagcctagacgagtcgccgcaatgagcgttgcagcccgtgtggctcgggagatgggtgtgaagttggggaatgaagtgggttatagcatacggtttgaagattgtacgtcagaacgcacagtgctgagatatatgaccgacggaatgctgcttcgggagtttctgagcgaaccggatctcgccagttattcggtcgtgatggtcgacgaggcccacgaacgcacacttcacaccgatatcttgtttggcctcatcaaggatgtcgccagattccgtcctgagttaaaagtattggtggcaagcgctaccatggataccgcacggttcagcaccttctttgacgacgcacccgtatttcggatacccggaaggaggtttccagtcgatatattctacacaaaggctcctgaagccgattacctggaggcttgcgtcgtcagcgtgctgcagattcacgttacccagccaccaggtgacattctagtgttccttacaggacaagaggagattgaagccgcctgtgagatgttgcaggatcgttgtcgccgtctgggctccaagattcgggaactactagtacttcctatctacgctaatttaccctcagatatgcaggcgcggatctttcagcccactcctcctggtgcccgcaaatag

SEQ ID NO: 139333 - DNA, 3126 bp, Artificial Sequence
  derived and/or modified sequence
atggctactcctgctggactagaacgctgggtacaggacgagctgcacagtgtgctcgggctgagcgagagacatgtcgcccaattcctcattggcaccgctcaacggtgcacctctgcagaagagtttgtgcagagattacgcgacacagatacgctggatttgtcgggccccgcaagagactttgcgctgaggttatggaacaaggtgcccagaaaggcagtggtggaaaagcctgcacgggccgcggagcgcgaagcccgtgcccttcttgaaaagaacagaagctaccgcttgctcgaggacagtgaggaatcttcagaagagactgtgagcagggctgggagttctttgcagaaaaagaggaaaaaacgtaaacacttacgcaagaaaagggaggaggaggaggaggaagaggcttccgagaagggaaaaaagaaaacaggcgggtcaaagcagcagaccgagaagccagagtctgaagacgagtgggagagaacagagcgggaacggttgcaggatcttgaagagcgggacgctttcgctgagcgggtgcgccagagagacaaggacaggaccaggaacgtcctagaaagatcagataagaaggcatacgaggaggcccagaaacgtctcaagatggctgaggaggacaggaaagccatggtcccagaactgaggaaaaaaagccggcgggagtaccttgctaaacgtgaacgcgaaaagctcgaagatctggaagcagaactcgctgacgaggagtttttgttcggggacgtggagctttctcgtcacgagcgccaggaacttaaatataagcggcgggtacgcgatctggcacgggaatatcgggccgcgggcgagcaagagaagctggaagcaacaaacagataccatatgcctaaggaaacccggggccagcccgctcgggccgtcgacctggtcgaggaagaaagcggtgctcccggcgaagaacaaagacggtgggaagaagcgcgcctcggcgctgcaagtcttaagttcggcgcaagagacgctgcatctcaggagcccaagtatcagttggttctggaggaagaggagactatcgaatttgtgcgggctacccagttacagggggatgaagagcctagcgcacctccaaccagcacccaagcacagcagaaggagtccattcaggctgtgcgacggtcattacctgtcttcccctttagggaggagctgttagctgccattgcaaaccaccaggtactcataatcgagggagagacgggaagcgggaagactacgcagataccacagtacctgttcgaggaaggctacaccaacaaagggatgaaaatagcgtgtactcagcctagacgcgtggccgccatgtcagtcgctgcccgggttgcccgcgaaatgggtgtaaagcttggaaacgaggtgggttactcaatacggttcgaggactgtaccagcgagcgtaccgttttacgctatatgaccgatgggatgctcttgcgcgaattcctttccgaacccgacctcgccagctacagcgtggtgatggttgacgaagcccatgagaggaccctccacaccgacatcctgttcgggttgatcaaagacgtggctcgattccggccagagttaaaagtgttggttgcgtctgcaaccatggacacagccagattcagtactttttttgatgatgcccccgtgttcagaatccccgggagaagattccctgtggatattttttatacaaaggcccctgaggccgactacctggaagcttgtgtcgtgagtgtgctgcagatacacgtgacccagccaccgggcgatatcctggttttcttaaccggtcaggaggagatcgaggcagcgtgtgagatgctgcaggatcgatgtcgccggctggggagtaaaattcgcgaactccttgtcctgcctatttacgctaacttaccttcggacatgcaagcccggatattccagcctacccctcctggggctaggaaagtcgtggtagctacgaacattgccgaaacgagcctcacaatcgaaggaattatctacgtgcttgacccagggttttgtaaacaaaagtcctataatcctcggactggtatggaaagtctgaccgtgacaccctgttctaaggctagtgcaaaccagcgagcaggaagggccgggagagtggctgccggcaagtgtttccgcctgtatacagcttgggcttaccagcatgagctggaggagaccaccgtgcccgagattcaaagaacaagcttgggcaatgtcgttcttctgctaaagtcactggggattcacgatctcatgcactttgattttcttgacccaccaccctatgaaaccctgctgttggccttagaacagctgtacgctctgggggctcttaatcacttaggtgagctgacgaccagtggccgcaaaatggccgaattgccagtcgaccccatgctgagtaaaatgatcctggcatcagaaaagtactcctgcagtgaggagatccttacagtggcagccatgctgtctgtcaataactctatattttaccggccgaaagataaggtggttcatgctgacaacgctagagttaacttttttctgccaggcggcgaccatctggtcttactcaatgtatatacccaatgggctgagtctggatactcctcccaatggtgctacgagaactttgtgcagttccggtcaatgcgtcgggctagagacgtgagggagcagctggaagggcttctagaacgggtggaagtaggattgtcaagctgtcagggagattatatcagagtgaggaaggctataacggccgggtacttctatcatacggctaggctaacgaggagtggttatcgcaccgtgaaacagcaacagacagttttcattcaccctaattcatcccttttcgagcagcagcctagatggctcttatatcacgagctggtgcttaccacgaaggagttcatgcgccaggttctcgagatcgaatctagttggttgctggaggtggctccccattattacaaggccaaggaactcgaagacccgcatgctaagaaaatgcccaaaaaaatcggaaagacccgggaggagctgggctag

SEQ ID NO: 139334 - DNA, 3126 bp, Artificial Sequence
  derived and/or modified sequence
atggctacccccgctggtctagagagatgggttcaggacgagctgcattccgtgttagggttaagtgagcgacacgtggcacagttcctcatcggcaccgcacagagatgtacatctgctgaagaattcgtgcagcgcttgcgtgatacagacacactagacctgagtggacctgccagagattttgctttaagactgtggaacaaagtcccccgcaaggccgtcgtggagaagcccgcacgtgcggcagagcgggaggccagagctctgctcgaaaaaaatagatcgtataggctcctggaggattcagaagagtctagtgaggagaccgtgtcacgagccggctcttctctgcaaaagaaaagaaagaaacgaaagcacttgagaaaaaagcgagaagaagaggaggaggaagaagcatcagaaaagggaaaaaagaagaccggaggatccaagcagcagactgaaaagcctgaatcagaagatgagtgggaacgtacggagcgcgagcggctccaggatttagaagagagggacgcattcgcagagagggtaaggcagagggataaagacagaacgaggaatgtccttgagcgcagtgacaaaaaggcttacgaggaagcacagaagcggctcaagatggccgaggaggatcggaaggccatggttcctgagctccgaaagaaatctcgcagggaatatctggccaagcgtgagagggaaaagcttgaggatctggaagcggagttagctgacgaagagttcctgtttggcgacgttgaattgagtcggcatgaaagacaggaattgaagtataagcggcgtgtccgtgacctggcaagagagtacagagccgccggcgagcaggagaaactcgaggccaccaaccgttaccacatgcctaaggagacccgtgggcagccagctagagctgtagacctagtggaggaggagtccggagctcccggggaggaacaacggcgatgggaagaggcacggctcggcgctgcaagtctgaaatttggcgctcgcgatgctgcctcccaagagcccaaataccaattggttctcgaagaggaggaaactattgaatttgtgagagctacccagttgcagggagacgaggaaccaagcgcaccccctactagtactcaggcccagcagaaagaatctattcaagcagttaggagatcgttgccagtcttcccgtttagagaggagcttctcgccgccattgctaatcaccaggtactgattatcgagggggagaccgggagcggcaagactactcagataccgcaatacctcttcgaagagggatataccaacaaagggatgaagatcgcctgcactcagccacgtcgagtcgccgccatgtcagtggccgcaagggtcgcgcgagaaatgggggtgaaattaggaaatgaggtgggctatagcattagattcgaggattgcacatcagagaggacagtgttgaggtacatgacagacggaatgctattaagggaatttctgtcggagcctgacctggcatcatactctgtggttatggttgacgaagcccacgagagaacactccacacagacattctgttcggactgatcaaagacgtggcccggtttagacccgagttgaaagttttggtagcctccgccaccatggacacagctcggtttagcacatttttcgacgatgccccagtgttcaggatccccggccggcggtttccagtggatatcttctacactaaagctcctgaagctgattacctagaagcttgcgttgtcagcgtgctccagattcacgtaacccagcctcccggggatattctggtgttcttgaccggtcaggaggagatagaagcggcctgcgaaatgcttcaggaccgctgtagacgcctgggcagcaagatccgggaactgttagtgttgccaatttatgctaacctgccctccgacatgcaggctcggatttttcaaccaactccaccaggggccagaaaagtggtggtggcaacaaacattgcagagacttccttgacaattgagggaatcatctacgttctggacccaggcttctgcaaacagaagtcttacaacccgagaaccggaatggaatctctgaccgtgaccccgtgctcaaaggcatccgccaaccagcgagccggccgggcaggccgggtggcagctggcaagtgttttcgattgtacacagcatgggcctaccagcatgagttggaggaaactaccgttccagagatccaacgaacctcattggggaatgttgtactgctcctgaaatccttaggcatccatgacctcatgcacttcgactttttggacccccctccctacgagacactccttctggcccttgagcagctctacgcattgggggctcttaatcatttaggcgagctcacaacttcgggacgaaagatggcagagttacctgtggacccaatgttgtccaaaatgatcttagccagcgagaagtactcctgttccgaagaaattttgactgtggcagcaatgctgagcgtcaacaatagtatcttttacagacccaaggacaaagtagtccacgccgataatgcccgggtcaacttcttcctgccaggtggtgatcacttagtgctgctcaacgtatatacccaatgggccgaaagtggatattcaagccagtggtgctatgagaattttgttcaattccggagtatgagaagagctcgcgacgttagggagcaactcgaggggctactcgaacgcgtggaggttggactgtctagttgtcagggagattatatcagagtgcggaaggctataacggccggatatttttatcatacagcgcggctaacaagaagcggttatcggaccgtgaaacagcagcaaaccgtcttcattcaccctaatagcagcctcttcgagcaacagccacgatggttgctctaccatgaactggtcttgactaccaaagaatttatgcgccaagtgctagaaatcgagtccagctggctgctcgaggtggcaccgcattactacaaggccaaggagctcgaagatccccacgctaaaaagatgcctaaaaagatcggaaagacccgcgaagagctcggatag

SEQ ID NO: 139335 - DNA, 444 bp, Artificial Sequence
  derived and/or modified sequence
atggcaactccagcgggactcgagagatgggtgcaggacgagttgcactctgtgttgggtctttcagagcggcatgtcgcacaattcctaattggcactgcacagcgttgtacctctgctgaagagttcgtacagagactccgggacaccgatacactagacctgtcaggccccgcccgggatttcgccttaagactgtggaataaagtgccccggaaagcagtcgtcgaaaaacccgcccgagctgccgagagggaggctcgcgctttactggaaaaaaacagaagctacagactgctggaagactctgaagagagttcagaagagactgtgagtcgcgctggaagcagcctgcagaagaaaagaaaaaagcgcaaacacctgaggaaaaagcgggaggaagaagaagaagaagaagcttccgagaaaggcaagaagaaatag

SEQ ID NO: 139336 - DNA, 3126 bp, Artificial Sequence
  derived and/or modified sequence
atggccaccccagctggcctggagcgctgggtgcaggatgagctgcacagcgtgctgggcctgtctgaaagacatgtggcccagttcctgattggaacagcccagcgctgcaccagcgctgaggagtttgtgcagaggctgcgggacacagacaccctggacctgagcggccctgcccgggactttgccctgcggctgtggaacaaggtgcccaggaaggctgtggtggagaagccagcccgggctgctgagcgggaggcccgggccctgctggagaagaacagaagctaccgcctgctggaggacagcgaggagagcagcgaggagaccgtgtcccgggccggcagcagcctgcagaagaagaggaagaagaggaagcacctgaggaagaagcgggaggaggaggaggaggaggaggccagcgagaagggcaagaagaagacaggaggcagcaagcagcagacagagaagccagagagtgaagatgagtgggagaggacagagcgggagcggctgcaggacctggaggagagagatgcctttgctgagcgggtgcggcagagggacaaggacaggaccagaaatgtgctggagaggagtgacaagaaggcctatgaggaggcccagaagaggctgaagatggccgaggaggacaggaaggccatggtgcctgagctgaggaagaagagcagaagagagtacctggccaagcgggagcgggagaagctggaggacctggaggccgagctggctgatgaggagttcctgtttggagatgtggagctgagcagacatgagcggcaggagctgaagtacaagagaagagtgcgggacctggcccgggagtacagagctgctggggagcaggagaagctggaggccaccaaccgctaccacatgcccaaggagacccggggccagcctgcccgggctgtggacctggtggaggaggagagcggggcccctggagaggagcagaggcgctgggaggaggcccggctgggcgccgccagcctgaagtttggagccagagatgctgccagccaggagcccaagtaccagctggtgctggaggaggaggagaccattgaatttgtgcgggccacccagctgcagggagatgaggagcccagcgccccacccaccagcacccaggcccagcagaaggagagcatccaggccgtgcggcgcagcctgcccgtcttccccttccgggaggagctgctggccgccatcgccaaccaccaggtgctgatcatcgagggggagaccggcagcggcaagaccacccagatcccccagtacctgtttgaggagggctacaccaacaagggcatgaagatcgcctgcacccagccccggcgggtggccgccatgtctgtggccgcccgggtggcccgggagatgggcgtgaagctgggcaatgaggtgggctacagcatccgctttgaggactgcaccagcgagaggacagtgctgcgctacatgacagatggcatgctgctgcgggagttcctgtctgagccagacctggccagctacagcgtggtgatggtggatgaggcccacgagaggaccctgcacacagacatcctgtttggcctcatcaaggatgtggcccgcttccggcctgagctgaaggtgctggtggccagcgccaccatggacacagcccgcttcagcaccttctttgatgatgcccctgtgttccgcatccctggaagacgcttccctgtggacatcttctacaccaaggcccctgaggccgactacctggaggcctgtgtggtgtctgtgctgcagatccacgtgacccagcccccaggggacatcctggtgttcctgaccggccaggaggagattgaagctgcctgtgagatgctgcaggaccgctgccggcggctgggcagcaagatccgggagctgctggtgctgcccatctatgccaacctgcccagcgacatgcaggcccgcatcttccagcccaccccacctggggccaggaaggtggtggtggccaccaacattgctgagaccagcctgaccatcgagggcatcatctacgtgctggaccccggcttctgcaagcagaagagctacaaccccaggacaggcatggagagcctgactgtgaccccctgcagcaaggccagcgccaaccagagagctggccgggccggccgggtggccgccggcaagtgcttccggctgtacacagcctgggcctaccagcacgagctggaggagaccaccgtgcctgagatccagaggaccagcctgggcaatgtggtgctgctgctgaagagcctgggcatccatgacctgatgcactttgacttcctggaccccccaccctatgagaccctgctgctggccctggagcagctgtatgccctgggcgccctgaaccacctgggggagctgaccaccagcggcaggaagatggccgagctgcctgtggaccccatgctgagcaagatgatcctggccagcgagaagtacagctgcagcgaggagatcctgactgtggccgccatgctgtctgtgaacaacagcatcttctaccggcccaaggacaaggtggtgcacgccgacaatgcccgggtgaacttcttcctgcccggcggggaccacctggtgctgctgaatgtgtacacccagtgggccgagagcggctacagcagccagtggtgctatgagaactttgtgcagttccgctccatgagaagagccagagatgtgcgggagcagctggagggcctgctggagcgggtggaggtgggcctgagcagctgccagggcgactacatccgggtgaggaaggccatcacagctggctacttctaccacacagcccggctgaccaggagcggctacagaacagtgaagcagcagcagacagtgttcatccaccccaacagcagcctgtttgagcagcagccccgctggctgctgtaccacgagctggtgctgaccaccaaggagttcatgaggcaggtgctggagattgagagctcctggctgctggaggtggccccccactactacaaggccaaggagctggaggacccccacgccaagaagatgcccaagaagattggcaagacccgggaggagctgggctag

SEQ ID NO: 139337 - DNA, 3126 bp, Artificial Sequence
  derived and/or modified sequence
atggccaccccagctggcctggagcgctgggtgcaggatgagctgcacagcgtgctgggcctgtctgaaagacatgtggcccagttcctgattggaacagcccagcgctgcaccagcgctgaggagtttgtgcagaggctgcgggacacagacaccctggacctgagcggccctgcccgggactttgccctgcggctgtggaacaaggtgcccaggaaggctgtggtggagaagccagcccgggctgctgagcgggaggcccgggccctgctggagaagaacagaagctaccgcctgctggaggacagcgaggagagcagcgaggagaccgtgtcccgggccggcagcagcctgcagaagaagaggaagaagaggaagcacctgaggaagaagcgggaggaggaggaggaggaggaggccagcgagaagggcaagaagaagacaggaggcagcaagcagcagacagagaagccagagagtgaagatgagtgggagaggacagagcgggagcggctgcaggacctggaggagagagatgcctttgctgagcgggtgcggcagagggacaaggacaggaccagaaatgtgctggagaggagtgacaagaaggcctatgaggaggcccagaagaggctgaagatggccgaggaggacaggaaggccatggtgcctgagctgaggaagaagagcagaagagagtacctggccaagcgggagcgggagaagctggaggacctggaggccgagctggctgatgaggagttcctgtttggagatgtggagctgagcagacatgagcggcaggagctgaagtacaagagaagagtgcgggacctggcccgggagtacagagctgctggggagcaggagaagctggaggccaccaaccgctaccacatgcccaaggagacccggggccagcctgcccgggctgtggacctggtggaggaggagagcggggcccctggagaggagcagaggcgctgggaggaggcccggctgggcgccgccagcctgaagtttggagccagagatgctgccagccaggagcccaagtaccagctggtgctggaggaggaggagaccattgaatttgtgcgggccacccagctgcagggagatgaggagcccagcgccccacccaccagcacccaggcccagcagaaggagagcatccaggccgtgcggcgcagcctgcccgtcttccccttccgggaggagctgctggccgccatcgccaaccaccaggtgctgatcatcgagggggagaccggcagcggcaagaccacccagatcccccagtacctgtttgaggagggctacaccaacaagggcatgaagatcgcctgcacccagccccggcgggtggccgccatgtctgtggccgcccgggtggcccgggagatgggcgtgaagctgggcaatgaggtgggctacagcatccgctttgaggactgcaccagcgagaggacagtgctgcgctacatgacagatggcatgctgctgcgggagttcctgtctgagccagacctggccagctacagcgtggtgatggtggatgaggcccacgagaggaccctgcacacagacatcctgtttggcctcatcaaggatgtggcccgcttccggcctgagctgaaggtgctggtggccagcgccaccatggacacagcccgcttcagcaccttctttgatggagcccctgtgttccgcatccctggaagacgcttccctgtggacatcttctacaccaaggcccctgaggccgactacctggaggcctgtgtggtgtctgtgctgcagatccacgtgacccagcccccaggggacatcctggtgttcctgaccggccaggaggagattgaagctgcctgtgagatgctgcaggaccgctgccggcggctgggcagcaagatccgggagctgctggtgctgcccatctatgccaacctgcccagcgacatgcaggcccgcatcttccagcccaccccacctggggccaggaaggtggtggtggccaccaacattgctgagaccagcctgaccatcgagggcatcatctacgtgctggaccccggcttctgcaagcagaagagctacaaccccaggacaggcatggagagcctgactgtgaccccctgcagcaaggccagcgccaaccagagagctggccgggccggccgggtggccgccggcaagtgcttccggctgtacacagcctgggcctaccagcacgagctggaggagaccaccgtgcctgagatccagaggaccagcctgggcaatgtggtgctgctgctgaagagcctgggcatccatgacctgatgcactttgacttcctggaccccccaccctatgagaccctgctgctggccctggagcagctgtatgccctgggcgccctgaaccacctgggggagctgaccaccagcggcaggaagatggccgagctgcctgtggaccccatgctgagcaagatgatcctggccagcgagaagtacagctgcagcgaggagatcctgactgtggccgccatgctgtctgtgaacaacagcatcttctaccggcccaaggacaaggtggtgcacgccgacaatgcccgggtgaacttcttcctgcccggcggggaccacctggtgctgctgaatgtgtacacccagtgggccgagagcggctacagcagccagtggtgctatgagaactttgtgcagttccgctccatgagaagagccagagatgtgcgggagcagctggagggcctgctggagcgggtggaggtgggcctgagcagctgccagggcgactacatccgggtgaggaaggccatcacagctggctacttctaccacacagcccggctgaccaggagcggctacagaacagtgaagcagcagcagacagtgttcatccaccccaacagcagcctgtttgagcagcagccccgctggctgctgtaccacgagctggtgctgaccaccaaggagttcatgaggcaggtgctggagattgagagctcctggctgctggaggtggccccccactactacaaggccaaggagctggaggacccccacgccaagaagatgcccaagaagattggcaagacccgggaggagctgggctag

SEQ ID NO: 139338 - DNA, 2010 bp, Artificial Sequence
  derived and/or modified sequence
atggccaccccagctggcctggagcgctgggtgcaggatgagctgcacagcgtgctgggcctgtctgaaagacatgtggcccagttcctgattggaacagcccagcgctgcaccagcgctgaggagtttgtgcagaggctgcgggacacagacaccctggacctgagcggccctgcccgggactttgccctgcggctgtggaacaaggtgcccaggaaggctgtggtggagaagccagcccgggctgctgagcgggaggcccgggccctgctggagaagaacagaagctaccgcctgctggaggacagcgaggagagcagcgaggagaccgtgtcccgggccggcagcagcctgcagaagaagaggaagaagaggaagcacctgaggaagaagcgggaggaggaggaggaggaggaggccagcgagaagggcaagaagaagacaggaggcagcaagcagcagacagagaagccagagagtgaagatgagtgggagaggacagagcgggagcggctgcaggacctggaggagagagatgcctttgctgagcgggtgcggcagagggacaaggacaggaccagaaatgtgctggagaggagtgacaagaaggcctatgaggaggcccagaagaggctgaagatggccgaggaggacaggaaggccatggtgcctgagctgaggaagaagagcagaagagagtacctggccaagcgggagcgggagaagctggaggacctggaggccgagctggctgatgaggagttcctgtttggagatgtggagctgagcagacatgagcggcaggagctgaagtacaagagaagagtgcgggacctggcccgggagtacagagctgctggggagcaggagaagctggaggccaccaaccgctaccacatgcccaaggagacccggggccagcctgcccgggctgtggacctggtggaggaggagagcggggcccctggagaggagcagaggcgctgggaggaggcccggctgggcgccgccagcctgaagtttggagccagagatgctgccagccaggagcccaagtaccagctggtgctggaggaggaggagaccattgaatttgtgcgggccacccagctgcagggagatgaggagcccagcgccccacccaccagcacccaggcccagcagaaggagagcatccaggccgtgcggcgcagcctgcccgtcttccccttccgggaggagctgctggccgccatcgccaaccaccaggtgctgatcatcgagggggagaccggcagcggcaagaccacccagatcccccagtacctgtttgaggagggctacaccaacaagggcatgaagatcgcctgcacccagccccggcgggtggccgccatgtctgtggccgcccgggtggcccgggagatgggcgtgaagctgggcaatgaggtgggctacagcatccgctttgaggactgcaccagcgagaggacagtgctgcgctacatgacagatggcatgctgctgcgggagttcctgtctgagccagacctggccagctacagcgtggtgatggtggatgaggcccacgagaggaccctgcacacagacatcctgtttggcctcatcaaggatgtggcccgcttccggcctgagctgaaggtgctggtggccagcgccaccatggacacagcccgcttcagcaccttctttgatgatgcccctgtgttccgcatccctggaagacgcttccctgtggacatcttctacaccaaggcccctgaggccgactacctggaggcctgtgtggtgtctgtgctgcagatccacgtgacccagcccccaggggacatcctggtgttcctgaccggccaggaggagattgaagctgcctgtgagatgctgcaggaccgctgccggcggctgggcagcaagatccgggagctgctggtgctgcccatctatgccaacctgcccagcgacatgcaggcccgcatcttccagcccaccccacctggggccaggaagtag

SEQ ID NO: 139339 - DNA, 444 bp, Artificial Sequence
  derived and/or modified sequence
atggccaccccagctggcctggagcgctgggtgcaggatgagctgcacagcgtgctgggcctgtctgaaagacatgtggcccagttcctgattggaacagcccagcgctgcaccagcgctgaggagtttgtgcagaggctgcgggacacagacaccctggacctgagcggccctgcccgggactttgccctgcggctgtggaacaaggtgcccaggaaggctgtggtggagaagccagcccgggctgctgagcgggaggcccgggccctgctggagaagaacagaagctaccgcctgctggaggacagcgaggagagcagcgaggagaccgtgtcccgggccggcagcagcctgcagaagaagaggaagaagaggaagcacctgaggaagaagcgggaggaggaggaggaggaggaggccagcgagaagggcaagaagaagtag

SEQ ID NO: 139340 - DNA, 3126 bp, Artificial Sequence
  derived and/or modified sequence
atggccacccccgccggcctggagcggtgggtgcaggacgagctgcattctgttttgggcttgtccgaacgacacgtggcccagttcctcattggaacagcacagcggtgcacaagtgccgaggaattcgtgcagcgcctaagggatacagacaccctggacctttccggccccgcaagggattttgcattaaggctgtggaacaaagtgccgcgcaaagccgtggtggagaaacctgcccgcgcagccgaacgcgaggcgagggcccttcttgagaagaaccggtcataccgccttttggaagatagtgaggaaagctctgaggaaacagtgtctcgcgcagggagttcactccagaaaaaaaggaaaaaacggaaacacttaaggaagaagcgggaggaagaggaggaggaggaagcttcagagaagggaaagaaaaagacaggagggtccaagcagcaaacagaaaagcctgagagcgaggatgagtgggaacgtacggagcgggagaggctccaggaccttgaggagcgggatgcatttgcagagagggtgcgccaaagggacaaagatagaacccggaacgttttagaaagaagcgacaagaaggcttacgaagaggcccagaaaaggctaaagatggcggaagaggacagaaaagccatggtgcccgagctgcgaaaaaaatctcggagggaatacctggccaaaagggagcgggagaaactggaggacttggaggccgagctcgctgacgaggaatttttgttcggagatgtggaattgagtcgacatgagcgtcaggagttgaaatataaacgccgggtccgggatctggcacgtgagtaccgtgccgctggagaacaggagaaacttgaagctaccaacagataccacatgcccaaggaaaccaggggccaaccagcacgggccgtagacttggtggaagaggagagcggtgctccgggtgaggagcaacgcagatgggaggaagcccgcttaggcgccgcatccctgaaatttggcgctagggacgcagcatctcaggagcccaaatatcagttggtcctcgaggaagaggagacaattgagttcgtccgcgccacacagttgcaaggagatgaggagccgagcgccccccctacaagcacacaagcacagcagaaggaatccattcaggctgtccgccggtcccttccagtttttccattcagggaggagttgctggcagccatcgctaaccatcaggtgctgattatcgagggagagacaggatctggtaagaccacacagataccacaatacctgttcgaggagggctatacgaataaaggcatgaagatcgcatgcacccagccccgtcgggtggccgctatgtccgttgccgccagggttgcacgggagatgggcgtgaaactaggcaacgaggtcggttatagtatcaggttcgaggactgcacgtccgaacgcaccgtgctgaggtacatgacggacggtatgcttcttagggagtttttgtctgagccggacttggcaagctattccgttgtgatggtcgacgaagcacacgagcgaactctgcacactgacatcctgttcggcctgatcaaggatgttgcacgcttcaggcccgaactgaaagtccttgtcgcctccgcaactatggatacagccaggttttccacttttttcgatgacgcacccgtattccggattccaggaagacgctttccagtggacattttctacaccaaagctcctgaggcagactacttggaagcttgtgtggtgagcgttttgcagatccatgtgacccagccacctggcgacattctggtgtttctgaccggccaggaggagatagaagcggcttgtgagatgctgcaagacaggtgtaggcggctgggcagtaagatcagagagctgctggtgttgcccatatacgctaatctgccaagcgatatgcaagctaggattttccagcccacgccaccaggagctcggaaggtagtggtcgcgacaaacatcgccgaaacatccctgacaatcgaggggatcatctatgtgctggatcccggcttttgtaagcagaagagctacaacccccgcaccgggatggaatccctgactgttactccatgcagtaaggcatcagctaatcaaagggccgggagagccggccgtgtggccgccggcaaatgcttccggttatacacagcctgggcctaccagcatgagctggaagagactaccgttcctgaaattcagcggacctctctgggcaacgtggttctcctgcttaagagtctgggtattcacgacctgatgcacttcgattttctagatccccccccctacgagaccctgttactcgcacttgagcaactatatgcactcggtgctctgaaccacttgggtgaactgactacatccgggcgaaaaatggctgaactgcctgtcgaccccatgctgtccaagatgattctggcttccgaaaagtatagttgctctgaggagatcctcaccgttgctgcaatgctgtctgtcaataatagcatcttctataggcccaaggacaaagtagtgcacgccgacaatgcccgcgtaaacttcttcctgcccgggggtgatcacctggtactgctgaacgtgtacactcagtgggccgagagcggctattctagccagtggtgctatgagaacttcgttcagttccgcagtatgagaagagctagagatgttcgtgagcagctagagggactcctcgagagagtggaagtggggctttcatcctgtcagggggattatattagagtgcgtaaggccatcaccgccggttacttttaccatacggcacgtctcacaaggtccgggtacaggaccgtgaagcagcagcagacagtctttatccaccccaattcatcgctgtttgagcagcagccgaggtggctcctgtatcatgagctggtgctcaccaccaaagagtttatgaggcaggtcctggagatcgagtcatcttggctgttggaagtggcccctcattactacaaggcgaaagaactcgaagaccctcacgctaaaaaaatgccaaagaaaatcggtaagaccagagaagaattaggttag

SEQ ID NO: 139341 - DNA, 3126 bp, Artificial Sequence
  derived and/or modified sequence
atggccacccccgccggcctggagcggtgggtgcaggacgagctgcatagtgtccttgggttgagtgagcggcacgtcgcacagtttttaatcggaacggcacaacgctgcactagcgcagaggagttcgtccaaaggctccgcgacacagacacactggatctgagtggaccagccagggacttcgcattgagactctggaacaaggtgccccggaaagcagtagtcgaaaagccagctagggctgctgagagagaagcaagggctttgcttgagaaaaaccgaagctacagacttctcgaggacagcgaggagtctagtgaagagaccgtctcccgggccgggtcaagccttcaaaagaagcgcaagaagaggaagcatcttcggaaaaagagggaagaggaagaggaggaggaggcctccgagaaagggaagaagaagacaggcggaagcaaacaacagaccgaaaagcccgagtccgaagacgaatgggagcgaactgaacgtgagcgactgcaagacctggaagaaagggatgccttcgccgagcgggtgcgccagagagataaggatcggacgcggaacgtgttagaacgatcagacaaaaaggcatatgaagaggcccagaagcgcctaaaaatggcagaggaggaccggaaggcaatggtgccagagctacgcaaaaagagccgacgagagtacctcgctaaacgagaacgagagaaattagaggacctggaagctgagctggcggacgaggaattcctttttggggatgttgaactatctagacacgagcgccaagagcttaagtacaagcgccgggttcgcgacctagctagagaatatagagccgccggcgaacaggagaagctggaagccacaaacagatatcacatgcctaaggagaccagaggtcagcccgcccgggccgttgatctggtggaggaggagagcggagcaccgggggaggagcagcgtcggtgggaagaggctcgtctcggtgccgcaagtcttaaatttggagctcgggatgcagcctcgcaggagcctaagtatcaactggtactggaggaggaagaaaccattgagttcgtgagggccactcaactgcagggcgacgaagagccaagtgcccccccgaccagcacacaggcacagcagaaggaatccatccaggccgtgcgaaggtccctgcctgtcttccctttccgcgaggagctcctggccgccatcgccaaccaccaagtgcttatcattgaaggtgagaccgggagtggcaagacgacgcagattccccagtacctcttcgaagaaggctacacaaacaagggtatgaagattgcctgtacacagcccagacgtgttgctgcaatgtccgttgccgcccgcgtcgctcgcgagatgggcgtgaagctgggtaatgaagtggggtactcaatccggtttgaggactgcaccagcgagcgtaccgtgctcagatacatgacagatggaatgttattgcgggagttcctttccgagccggacctggctagctacagtgttgttatggtggacgaggcgcacgaaagaaccttgcacacagacatcctttttgggttaatcaaggatgtcgccagattccgtcccgagttaaaagtgctggtcgcttctgccactatggacacggcccgattttctacgttcttcgatggggcccctgtctttagaattccgggccgccggttccccgtcgacatattttataccaaagcgcctgaagccgactacctggaggcttgcgtggtgtccgtgctgcagattcatgtgacacagcctcctggcgacattctggtgtttctgacaggccaggaggagatagaggctgcttgcgagatgctgcaggatcggtgccgccgcctcggaagcaagattcgggagctgttggtcttgccaatatatgccaacctgcctagcgatatgcaggctcgcatcttccagcccaccccacccggggcacggaaggtggtggtcgcaacaaatattgccgagacctctttaacgatcgaggggatcatttatgtgctggatcccggtttctgtaagcagaaaagttacaacccgcgaacagggatggagtctctgacagtgacgccctgttcaaaggctagcgccaaccagcgagccgggcgcgccggacgcgtagcagcggggaaatgctttcggctctataccgcatgggcttatcagcatgagttggaggaaactaccgttcctgaaatccagcgcacgtccttaggaaatgtcgtgttactattaaagtctttagggatccatgacttgatgcatttcgactttctggaccctcctccttacgaaacattactcctggcgctcgaacagctgtatgcacttggcgcactaaatcaccttggtgagctgaccacttctggacggaagatggcagaactgcccgttgacccaatgttgtcaaagatgatcctggctagcgaaaagtatagctgcagcgaggaaatcctcaccgtcgcagcgatgctgtctgtgaataacagcatattttaccggcctaaagataaagtcgttcatgccgacaatgcgcgcgtgaatttctttttgcctggaggcgaccacctcgtgctgctgaatgtttacacgcagtgggctgaatccggatactcaagtcaatggtgctatgagaattttgtccagttccgcagtatgcggcgagccagggacgtgcgtgagcagctcgagggcctgctcgagcgagttgaggtcgggctgtcctcatgtcagggcgactacatccgggtgcgcaaggctataactgccggctacttctatcacactgcccgactgaccaggtctggttacaggacagtgaaacagcagcagacggtttttatacatcccaattcttcactcttcgaacagcagccacgctggctactatatcatgagctcgtcttaaccaccaaagaattcatgaggcaggtccttgagatcgaatcttcctggttgctggaggtcgctccccattactacaaagctaaggaactcgaggacccacacgctaagaaaatgcctaagaagatcggcaagaccagggaggagctgggctag

SEQ ID NO: 139342 - DNA, 3126 bp, Artificial Sequence
  derived and/or modified sequence
atggccacccccgccggcctggagcggtgggtgcaggacgagctgcatagcgtgctcggcctctctgagagacatgtggcacagtttctgattggtaccgcacagcggtgcacttccgccgaggaatttgttcagaggctgagggacacggacacacttgacctcagcggcccggcccgtgatttcgctctacggctctggaataaggtaccacggaaagcagtggttgaaaagccggcaagagccgccgaaagagaagcacgggcgctactggaaaaaaacaggagttaccgtctgcttgaggacagtgaagagtcttcagaggaaaccgtatctagggctggaagctccttacagaaaaaacgcaaaaaacgcaaacatttacgcaagaagcgcgaggaggaggaagaagaggaagcctctgaaaaaggaaagaagaaaacaggcggatctaaacaacagacggagaagcctgagtctgaagatgagtgggagcgcacagagcgcgaacgcctgcaagacctggaagaaagagatgcattcgccgagcgggtccgtcaacgggacaaagacagaaccagaaacgtgttggagaggagcgacaagaaggcttacgaggaggctcagaaacgtctgaagatggctgaagaggacaggaaggccatggtgcccgaacttcggaagaagtctaggagagaatatttggccaaacgggaacgagaaaagttggaggaccttgaagctgagctggccgacgaggaatttctcttcggggatgttgaactttcgcggcatgaaagacaagaactgaagtacaagaggagggtgcgggacctggcacgggagtatcgcgccgcaggcgagcaggagaaactcgaggcgacaaatcgttaccacatgcccaaagaaacaagggggcagcccgcccgggctgtggatctggtcgaggaggagagcggcgccccaggggaggagcagaggcgctgggaggaggctagactgggcgcggcttctctgaaatttggggccagggatgccgcttcacaggagccaaagtaccagctggtgctggaggaagaagagaccatcgagttcgtaagagctactcagctacagggcgacgaggagccgtccgcccctcccacgtcaacccaagcccagcagaaggaatctatacaggcagtccggaggtcactgcctgtgtttccatttagagaagaactgctagcagcaattgccaaccaccaagtgctgattattgagggagagacaggatcaggtaaaacgacacaaatcccccagtacctcttcgaggaaggatacaccaacaagggtatgaagattgcctgtacccaacctcgccgagtcgctgcaatgtccgtggccgccagagtcgcgagggagatgggtgtgaaactggggaacgaggttggctactcaattagattcgaggattgtacaagcgagcggacggtgctcagatacatgactgatggaatgctgctgcgggaatttttaagtgagccagatctggctagctactcggttgtgatggttgatgaggcacacgaaagaacactccacaccgatatcctgtttggtctgatcaaagatgttgctcgctttcgtcctgagctgaaagttctcgtagcctccgctacaatggacaccgcgcggttttcgacgttcttcgatgatgcgccggtgttccggatccctggacgcagattccctgtcgacattttctacacgaaggcccccgaagccgattaccttgaagcttgtgtcgtgtccgtgctgcagattcacgtcacccagcctccaggagacattctagtgttcctgaccgggcaggaagaaatagaggctgcctgtgagatgctgcaggacagatgtcggcgactggggtccaagatcagagaactactcgtcttacctatttatgcgaatctgccctccgacatgcaggcacgcatttttcagcccaccccccccggagccaggaaggtcgtggtcgcgactaacattgccgaaacttccctgactatcgagggaattatctatgtcctggatcctgggttctgtaaacaaaaatcatacaacccgagaaccggcatggagagcctgactgttacaccatgcagtaaggcttccgctaatcagagggcagggcgagctgggcgggttgccgccggcaaatgtttccgcctttacacagcctgggcctaccaacatgagcttgaggaaacaactgtcccggagattcagcgcacgtcgttaggcaacgtggttttgctgctaaaatccctcgggattcacgatctgatgcacttcgattttcttgatccccccccttatgaaaccctactgctagcgcttgagcaactgtacgctctcggggccctgaaccatcttggggagttgacaacgagtggaaggaagatggctgaattaccagtggaccctatgctgtccaagatgatcctcgcatccgagaagtactcttgctctgaagagattcttacagtggcagccatgctgagcgtaaacaactctatcttctaccgtccgaaagacaaggtggtgcatgctgataacgcaagagttaactttttcctgcccggtggggaccatcttgtcctcttgaatgtgtacacacaatgggcagagtctggctacagttcacaatggtgttacgaaaattttgtccagttcagaagcatgcggagagccagagacgtgagagagcagttagagggattactcgagcgggtggaggttgggctgagcagctgtcagggcgactacatcagggtgagaaaagccattacagccggatatttttaccatactgccagattaaccaggagcgggtatcggacagttaaacagcaacaaactgtatttattcaccccaacagttccctgttcgagcagcagccccgctggcttttgtaccacgagctcgttttgactaccaaggaatttatgcgacaggtgctagagattgaatcttcctggctccttgaagtcgcaccccattactacaaggccaaggagcttgaggaccctcatgctaaaaagatgcccaagaaaatcggaaagacccgcgaggaattaggctag

SEQ ID NO: 139343 - DNA, 3126 bp, Artificial Sequence
  derived and/or modified sequence
atggccacccccgccggcctggagcggtgggtgcaggacgagctgcacagcgtgcttgggctttctgagaggcatgtcgctcagtttctgatcgggactgcacagagatgtaccagcgccgaggaattcgtccagcgccttagggacacagatactctggatctgtcaggcccagcgcgggacttcgctctgcgcctctggaacaaagttccccgcaaggctgtggtggagaaaccagctcgcgctgctgagagggaggctcgcgctctgctggagaaaaataggtcctacaggcttttagaagactccgaggaatccagcgaagaaaccgtgagccgtgccgggagctccctgcaaaagaaacgcaagaaacggaagcatctgcggaagaagcgggaggaggaggaagaagaagaggcttccgaaaaaggcaagaaaaagacaggagggtccaaacaacaaaccgagaagcccgagtccgaggatgaatgggagcgtaccgagcgggaacggttgcaagatctagaggagagggatgctttcgccgaacgcgtccgccagagggacaaagatcgcactaggaacgtactcgagaggagtgacaaaaaagcgtacgaagaggctcagaagagactaaaaatggcagaggaggataggaaagccatggtgccggaactgcggaagaagtctcgccgcgagtaccttgctaagagagagcgggagaaactagaagatttggaggctgagcttgccgatgaggagttcctcttcggggacgtggagctttcccgtcacgagaggcaagagttgaaatacaagcggcgcgttcgggacctggctcgggaatatcgagcagcaggcgagcaggaaaagctggaggcaacaaaccggtatcacatgcccaaagaaactcgcggacagccggcacgagccgtggacctcgtggaggaggagagcggggcccctggagaagagcagcgccggtgggaggaggctcgcctcggagctgctagtctcaagttcggagcccgagacgcagcctctcaggagccaaagtatcagctggtcctggaagaggaagagaccattgaattcgtgcgagccacccaactgcagggtgatgaggagccatccgctccgcctacttcaacccaggctcagcaaaaggagtccatccaggccgtccggaggagtttgcccgtctttccttttcgcgaggagctgcttgcagctattgcgaatcaccaggtattaatcattgagggagaaaccggttccggcaaaacaacccagattccgcagtatctctttgaagagggctacactaataagggaatgaagattgcctgtacacagccccggagggtggctgctatgagcgtagccgctagagtggcccgtgagatgggagtcaaacttggcaatgaggtcggatactcaatcagattcgaagactgtacatcagaacgcacagtgctcagatacatgacagacgggatgctcctgcgggagtttttgtctgaaccagatctcgcctcctactccgtggtaatggtggatgaggcgcatgagagaaccttgcatacagacattctgttcggactgatcaaagatgtcgcaaggtttagacccgagctcaaggtgcttgtggcgagcgccactatggacaccgcccggttttccacattttttgacgatgcccctgtcttcagaatccccggccgcaggttccctgtagacattttttacaccaaggccccagaagcggactacctggaggcgtgcgtagtgagcgtgctccagatccatgtaactcagcctcctggtgacattctggtgttccttacgggccaagaggaaattgaagccgcctgcgagatgctgcaagaccgatgtcgccgtttggggtctaaaattcgcgaattacttgtactaccgatatatgctaatctacccagtgacatgcaggccagaatttttcaacctactcctccgggcgcaaggaaggtggtggtggccacaaatattgccgagacgtccctaaccattgagggcatcatctacgttttagatcccggcttttgtaaacagaaatcctacaatccaaggactggtatggagagcctgactgttaccccttgctcaaaagctagtgcaaaccagagggcgggcagggcaggacgggtggcggccggtaagtgttttagactgtatacagcctgggcttaccagcatgaactcgaggagaccacagtgccagaaatccagcggactagcctagggaacgtcgtgctgctgttaaaatcactgggaattcacgacctgatgcatttcgattttctggacccccctccatacgagaccctgctactggcgctggaacaactgtatgctctcggcgcactgaatcacctcggcgagctgacaacctccgggagaaaaatggccgaactgccggtggacccaatgctctccaagatgattctcgcgtctgagaagtatagctgctccgaggagatcctgacagtggccgccatgctgtccgttaacaacagtatcttctatcggccaaaagacaaagttgtgcatgcagacaatgcacgcgtgaacttcttcttacccgggggcgatcacttggtgctgctcaacgtctatactcagtgggctgagtccggctactcatcccaatggtgctatgagaattttgtgcagtttaggagcatgcgccgggcccgtgatgtccgggagcaactggaagggctgctggagcgcgttgaagtgggtttgagctcatgtcagggggattacataagggtgcgaaaggcaatcaccgcaggttacttctaccacacagcccggttgacgcgatccgggtatcggactgtcaagcagcagcaaactgtgtttattcatcccaacagcagtctgttcgaacagcaacctcgttggttgctgtaccacgagctcgttctcactaccaaagagtttatgcgacaggtgctggaaattgagagctcttggttgttggaggtcgctccacactactataaagccaaggagttggaagacccgcatgcaaaaaaaatgcctaaaaagattggcaagaccagagaggaattaggatag

SEQ ID NO: 139344 - DNA, 3126 bp, Artificial Sequence
  derived and/or modified sequence
atggccacccccgccggcctggagcggtgggtgcaggacgagctgcattctgttctcggtttgtccgagcggcacgtggctcagtttttaattgggacggctcagagatgcacgtccgctgaagaattcgttcagcgattaagagatacagacaccctcgacctgagtggtccagcacgggacttcgctctgaggttatggaataaggtacctcggaaggccgtagtggagaagcccgccagagctgctgagagggaagccagggcgcttctggaaaaaaataggtcttaccgactcttagaagactcagaggaaagctctgaagagactgtgtcacgggccggatcaagtctgcagaaaaagaggaaaaagcgcaaacatcttaggaagaaacgcgaggaagaggaggaggaggaagccagcgagaaaggaaagaaaaaaaccgggggatctaaacagcaaacagagaagccagagtccgaggatgagtgggaaaggaccgaaagggagaggctgcaggaccttgaggagagggatgcctttgccgagagagtccgccaaagagacaaagacagaacccggaatgtcctggagcgttctgacaaaaaggcctatgaagaggcacagaagcgcctgaagatggcagaagaggacagaaaggccatggtccccgagctcaggaagaagtccaggcgtgaatatctggcaaagcgcgagcgtgagaagctggaagacctagaggcggaactcgcggacgaagaatttctgttcggcgatgttgaactttcccgccacgaaagacaagagctgaaatacaagcgacgcgttagggacctagccagagagtatcgcgcagcaggcgaacaggagaagctggaagctacaaatcggtatcacatgcctaaagagacccggggtcagcctgcccgtgccgtcgacctcgtcgaggaggagtccggagcgcctggggaagagcagaggcgatgggaggaggcgaggctgggagccgcctccttgaagtttggagcgcgggatgcggccagccaggaaccgaaatatcagctggtgctggaggaggaggaaactatcgaatttgttcgggctactcagctccaaggcgatgaggagccttcagctccccctacgagcacccaggcacagcaaaaggaatctatccaagctgtgcgacggtccctccctgtgttcccctttagggaggagttactggctgcaattgcaaatcatcaggtgctcattattgagggggaaactggctccgggaagacaactcagattcctcagtatttgttcgaggagggatataccaacaagggcatgaagatagcctgcactcagccccgcagagtagcagccatgagcgtggccgccagagtggcgagggagatgggtgtgaagctgggcaatgaagtcggctactccattagatttgaggactgcacctccgagcggaccgtgcttcggtatatgaccgacgggatgctcctgcgagagttcctttcggaacccgatctggcctcctacagcgtcgttatggttgacgaagcccacgagagaactttgcacacggatatcttatttggcctgatcaaggatgttgcccgctttcggccagaattaaaagtactagtggcctctgctacaatggacactgcgcgcttctctactttttttgatgacgctccagtgtttcgaatcccaggacgcagatttcctgttgacatattctacactaaagcccccgaggcagactatctggaggcctgcgtggtaagtgtactccaaattcatgtgacccagccaccaggcgatatactggtattcctcactgggcaggaggagattgaagccgcctgtgaaatgttacaggatcgttgtaggagacttggctccaagatccgcgagttgctggtgcttccaatctacgctaacttgcccagtgacatgcaggcccgcatattccagcccacccctccaggggctcggaaagtcgtagtcgccaccaacatcgccgaaacctccttgactattgagggtataatctacgtgttggacccaggattttgcaagcagaagtcctataatccaagaaccggtatggagagcctgaccgtgacaccgtgcagcaaagcttctgctaaccagagagctgggcgggccggacgagtcgctgctgggaaatgcttcagactgtatactgcatgggcataccagcatgaactagaggaaacaactgtgccagagatccagagaacttctctggggaatgtggtgctccttcttaaatcactgggcattcacgacctcatgcacttcgatttcctggatccgccgccctacgagaccctgctgctagctctagagcaactgtacgcccttggtgcactgaatcacctgggcgagctgaccacctcaggtcggaaaatggctgagctccctgtggaccccatgcttagcaaaatgatccttgccagcgagaagtatagttgcagcgaagagattctgacagtcgccgccatgctgagcgttaataactccattttttatcgccccaaagacaaggtagtgcacgcggacaacgcccgtgtcaacttttttctgcccggcggagatcatttagtcctactcaacgtttacacccagtgggcagagtccggatatagcagccaatggtgttacgagaatttcgtgcagtttcgcagtatgcgtcgtgcccgcgacgtgagagagcagctagaaggactcctagagagagttgaggttggactatcctcctgtcagggggattatatcagggtccgaaaggcaataacagctggctatttttaccatacagcccggcttacccgatctggatatcggaccgtgaaacagcagcaaacagtcttcatacaccccaactcgtcgctgttcgagcagcagccccgttggttgctctaccatgaactggtccttacaaccaaagagttcatgagacaggtgttggagatagaaagctcttggctactggaagtggctccgcactactacaaagcaaaggaactggaagatccccatgccaagaaaatgcctaagaagatcggaaaaactagggaagagctgggctag

SEQ ID NO: 139345 - DNA, 2010 bp, Artificial Sequence
  derived and/or modified sequence
atggccacccccgccggcctggagcggtgggtgcaggacgagctgcactcagtgctgggcctttcagaacggcacgtggctcaattcctcatcggcacagcgcagaggtgtacatccgctgaagagttcgtccagcgacttagggacactgatactctcgacctgtccggcccagcccgcgatttcgccctgagactctggaacaaggtgccaaggaaggctgtcgtggagaaaccagctagagccgcagaaagagaagcccgagctttgctcgagaagaaccggtcataccgactactagaagatagtgaagagtcctcagaggagacagtctcaagagccggtagcagcctgcaaaaaaagaggaaaaagaggaaacacttgcgcaaaaaaagggaagaggaggaggaagaggaggcctccgaaaaaggaaagaagaaaaccggcggatcgaagcagcaaaccgagaagccggagagcgaggatgaatgggagcgaactgagcgcgagcgcctccaagacttggaggaacgggacgccttcgctgaaagagtgcgtcaacgtgataaggatcggacacggaatgttttggaacgttcggacaagaaagcatatgaagaggctcagaagaggctaaagatggccgaggaggacagaaaagccatggttcccgaactgcggaaaaagagcaggagggagtatttagccaaaagagagagggagaagctggaggacctggaggccgaactggccgacgaagagttcctctttggagatgtggagttgagccgacacgaaaggcaggaacttaaatataagcgacgcgtgagggacttggccagggaatatagggctgcgggcgaacaagagaagcttgaggccaccaataggtaccacatgcctaaagaaacccgcggccaacctgcaagggcagtggacctggtggaagaggagtcaggggcgcccggggaagagcaaagaagatgggaggaggccagactgggcgccgcatcccttaagttcggcgctagagatgctgcttcccaggaaccaaaataccagcttgttctggaagaggaagagacaatagaattcgtgagagctacacaactgcagggcgatgaagagcctagcgcaccacccaccagcactcaagcgcagcagaaagaaagcatccaggctgtgcgccgcagcctgcctgtgttcccatttagagaggagctgcttgccgctatcgccaaccatcaggtgctgatcattgagggagagaccgggagcggaaaaaccacacagatccctcaatacctcttcgaggagggttatacaaataaaggtatgaaaattgcttgtactcagccacggagagttgccgcaatgtctgtggcagcccgagtggcccgcgaaatgggagtgaaactgggcaatgaggtagggtatagcattcgatttgaagactgtactagcgagcgcacagtgcttaggtacatgaccgatgggatgctcctgagggaatttctcagtgaacccgacctggctagctattccgttgtaatggtggatgaggcccacgaacggacccttcacaccgatatcctgtttgggctgattaaagatgtcgcccggttcagaccggaactgaaagtattagtggcctctgctacaatggacacagcacgattttctactttctttgacgacgctcctgtgttcagaatccccggtcgtaggttcccagtggacatcttttacacaaaagccccggaagccgattatctggaagcctgtgtggtgagtgtgcttcagatccacgtcacccagcccccaggcgacatacttgtgttcctcactggtcaggaggagattgaagccgcctgtgagatgctgcaagaccgctgccggcgcttaggtagcaaaatcagagaactgttggtcctgcccatctacgcaaatctcccttccgacatgcaggcacgaatattccagccaaccccgcctggagccaggaaatag

SEQ ID NO: 139346 - DNA, 3126 bp, Artificial Sequence
  derived and/or modified sequence
atggccacccccgccggcctggagcggtgggtgcaggacgagctgcacagcgtgctagggctcagcgagcgacatgtggcacagttcctgataggcacagcacagcgttgcacatcagcagaagagttcgttcaacgcctgcgcgacacggacaccctggatctatcagggccggccagggactttgctctgcgactttggaacaaagtcccaaggaaggccgtggtcgagaaacctgctcgagctgctgagcgtgaggcaagggcactgctcgaaaagaatcggtcatatcgtctgctcgaagatagcgaggagtcctccgaggagactgtgtctcgggcggggtcctccctgcagaaaaagcggaagaagcggaaacatctgcggaaaaaacgcgaggaggaagaggaagaagaggcctccgagaaagggaagaagaagacaggtgggagcaagcaacagacagagaaaccagaatccgaggatgagtgggaaagaaccgagagggaacgtttgcaggatctggaggaacgggatgccttcgccgagcgagtgcgccaacgagacaaagatagaactaggaatgtgttagaaagatccgacaaaaaagcatatgaagaggcccaaaaaagactgaagatggctgaagaagaccgcaaagccatggtccccgaactgcgcaagaaatctcgacgggaatacctggcaaaacgggagagggaaaagctggaagatttggaggctgaacttgctgacgaggagtttcttttcggcgacgtggagcttagccgccatgaaaggcaagagttaaagtataagagacgagtgagagacttggcccgcgagtaccgagccgctggggagcaggaaaagttagaggcgaccaatcgctatcacatgcctaaggagacacgaggtcaaccagccagggccgtcgatctggtggaggaggagagtggcgcgcccggggaagagcaaaggagatgggaagaagcaaggctgggcgctgcgtctctaaagtttggcgctagggacgctgcctcccaggaacccaaatatcagttggtgctggaggaggaagaaactatcgaattcgttagagcaacgcaactgcagggcgatgaggaaccctctgcgccccctacttccactcaggcccagcagaaggaaagtatacaggccgttcgccgatccctgcctgttttcccctttcgggaggagctgcttgccgcaatcgccaatcatcaggtgcttatcatcgaaggcgaaacgggctcagggaagaccactcaaataccacaatatttatttgaggagggatacacaaataagggcatgaagattgcctgtacgcagcccagaagagtggctgccatgtccgtggctgcacgggtcgctcgtgaaatgggggtgaagttgggcaatgaagttggctacagtatcaggtttgaagactgtacttcggaaaggacggtgctgcgatacatgaccgatggtatgctactgagagagttcctgagtgagcccgacctcgcatcatacagtgtggtgatggttgacgaggcgcatgaaagaactctccacacggatatcctgtttggcctcatcaaagatgttgcgcggttccgaccagaactgaaggtcctcgtggccagcgcaacgatggacactgctagattctctacatttttcgatgatgcaccggtgttccgtattccggggcggcgcttccctgtcgatattttctacactaaagctccagaggccgactacttagaagcctgcgtggtctcagttctgcagatccacgttactcagccccctggggatatactcgtttttctgacgggacaagaagagatcgaggccgcttgtgagatgctccaggatcgctgccgccggttgggttctaaaatacgagagcttctggtgttgcctatctacgccaatctgccttcagatatgcaggcccggatcttccaaccaacgccgcctggcgcccgaaaagtggtggtggcgaccaacattgctgaaacttccctcacaatagaagggattatatatgtgctggacccaggcttctgcaagcagaagagctataacccacgcaccggtatggagagcctgacagtgactccttgctcaaaggcctctgctaaccagcgtgcgggccgagctggcagggtcgccgccggtaagtgtttccgactatatacagcctgggcttaccagcatgagctagaggaaaccacggtgccggagatccagaggacgtcactgggcaacgtcgtcttactcctgaaatccctgggcatacacgacctaatgcacttcgacttcctggaccctccaccgtatgagaccctgctacttgctctggaacaactgtatgctctcggggcactgaatcacctcggcgagctcactacttcggggcggaagatggcagaactgccagtggatcctatgctgtcaaagatgattctcgccagcgagaagtacagctgttcagaggagatcctaacagtggcagcgatgctgtctgtgaacaattccattttttataggcccaaagataaagtagtgcatgcggataacgccagggtgaatttctttctcccgggaggtgatcatttggtcttacttaacgtctacacccaatgggctgagagtggctacagcagccaatggtgctacgagaattttgttcagtttaggtccatgcgccgggctcgcgacgttagagagcagctggagggcttactcgagcgagtagaggttggcctgtcttcctgccagggcgactacatcagggtgcgcaaagctattactgctggctatttctatcacacagctagactgacacgctccggatatcgaactgtaaagcagcagcagacagttttcattcatcccaattccagcctattcgaacaacagcctagatggttgctgtatcatgaacttgttctgacaactaaagagttcatgcggcaggtcctcgaaatcgaatcttcctggctattagaagttgctccccactattataaggctaaggagcttgaagacccccacgctaagaagatgccaaagaagattggcaaaactcgagaagagttgggctag

SEQ ID NO: 139347 - DNA, 3126 bp, Artificial Sequence
  derived and/or modified sequence
atggccacccccgccggcctggagcggtgggtgcaggacgagctgcactctgtgctcggcctgagcgaacgccacgtggcccaatttctcattgggaccgctcaaaggtgcacctctgccgaagagttcgttcagcggctgagagataccgatactcttgatttatccggcccagcacgggattttgccctgagattgtggaataaagtaccgcggaaagccgtggtggaaaaaccggccagagcggctgagagggaggctcgggcgctcctggagaagaatagatcttatagactcctcgaggacagtgaagaatctagtgaagagacagttagtcgcgccgggagcagtctgcaaaaaaaaagaaaaaagaggaagcatctacgaaagaagcgtgaggaggaagaggaggaggaagccagtgaaaagggcaaaaagaagacgggagggtctaagcagcaaaccgaaaagcctgagtcagaggacgaatgggagcggacagagcgggagaggctacaggacctagaagaacgggatgctttcgctgaaagagtgaggcagcgtgataaagatcggactagaaacgtgttagagagatcagataagaaagcctatgaggaagcccagaagagactgaaaatggccgaggaggatcggaaggccatggtgccagagcttaggaaaaaatcacgtcgagagtacctcgccaagcgcgagagggagaagctggaggacctggaggcggaattagcagacgaggagttcctgttcggtgatgtggaactaagcagacatgaaagacaggaactcaagtataaacgccgggtcagagatctggcacgtgagtatcgggctgccggcgagcaggagaaactggaggcaaccaaccggtaccacatgcctaaggagacacggggtcagcccgcaagagcagttgacctggttgaggaggaatccggcgcgcccggtgaagagcagcggagatgggaagaggcccgactgggagccgcttcgctcaagtttggagcgcgtgacgctgcatcccaggagccaaaatatcagctggtgctcgaagaagaggagacaatcgaatttgtcagggctacacaattacagggagacgaggaaccctccgcacctccaacttctacccaggcccagcaaaaagagtccattcaggcagtaagacgcagtctacccgtgttcccctttcgggaagagctgctggccgctattgcaaaccaccaggtgctcattattgaaggtgaaacaggttctgggaagaccacccagattccacagtaccttttcgaggaaggatacaccaataagggaatgaagatcgcctgtacgcagccaaggcgagtggcagcgatgagtgtggcagcgcgggtggcccgcgagatgggtgtgaagctgggcaatgaggtaggttacagcatccgctttgaggactgtacctctgaaaggacagtattgaggtacatgaccgacggaatgctcctgcgggagttcctgagcgagcccgatttggcctcctactccgtggtcatggtcgacgaggcacatgagagaacgctacatacagacatcctattcgggttgatcaaggacgttgctagattccggccggagctcaaagtgcttgtggctagtgccacaatggacacagcccggttcagtacattcttcgacgacgcaccagtgtttcggattcctgggcgtaggttccctgtcgatatattctacaccaaagctccagaagctgactatctagaggcctgcgttgttagtgtgcttcagatacatgttacacagccgcccggagacatcctggtgttcttgacagggcaggaggaaattgaggccgcttgcgagatgcttcaggaccgttgccgccgccttggctcaaaaatcagagaactgttagtcctgcctatttatgctaacttgccctccgatatgcaggcaagaatcttccagccaacaccccctggcgcaagaaaagtcgtggtcgcaactaatatagctgaaaccagccttaccatcgagggcattatttatgtcctggatcccggattttgcaagcagaagtcctacaacccaagaacaggcatggagagcttgaccgtgaccccatgcagtaaggccagcgccaaccagagagctggcagagccggcagggtggccgccgggaagtgtttcaggctgtatactgcttgggcctaccagcacgagctcgaggaaaccaccgtgccggagatccagaggactagccttggaaacgtggtactgttgctaaagtctctgggcatccacgacttgatgcacttcgactttcttgatccacccccctacgagactttgctgcttgccctagaacagctttacgcgctgggggctttgaatcacttgggcgagcttacaacaagcgggcggaagatggccgaattacccgtcgatcctatgctcagtaagatgatcctcgctagcgaaaaatactcatgttccgaagaaatcctgacagtggctgctatgctctctgtgaacaactcaatcttttacaggcccaaagataaggtggtgcacgctgacaatgcaagagttaattttttcctacctggcggcgaccacttagtgctcttaaacgtctatacacagtgggctgagtcaggctactctagtcagtggtgttacgaaaatttcgtgcaattccgcagtatgagacgagctagagacgtgagagaacagctcgagggcctgctcgaacgcgttgaagtgggcctgagctcttgccaaggtgattatataagagttcgaaaagcgattacagccggatatttttaccatacagcccgtctgacacggtcaggttatagaaccgtaaagcagcagcagacagtttttattcacccaaatagctccctttttgagcaacagcccagatggttactctaccatgagctggtcctcaccacaaaggaatttatgcggcaggtcttagaaatcgagagcagctggctgctcgaagttgcccctcattactacaaggctaaagagctggaagatcctcatgcaaagaagatgccgaagaagataggcaaaacgcgggaggagctcggatag

SEQ ID NO: 139348 - DNA, 444 bp, Artificial Sequence
  derived and/or modified sequence
atggccacccccgccggcctggagcggtgggtgcaggacgagctgcatagcgtacttggcctatctgagcggcatgtggcccagttcctgattgggactgctcagcggtgtaccagtgctgaagaattcgtccagcggcttagggacacagacacactggatctatccgggccggcccgcgacttcgctctgcggctgtggaataaagtaccaaggaaagccgtcgtagagaagcccgccagagcagctgagcgtgaggcccgggcgctgctagaaaaaaacaggagctatcgtctgctggaagatagcgaagaaagttccgaagagactgtttctcgtgccggctcctccctccagaagaaacggaagaagcgaaaacacctgcgcaagaagcgagaagaagaggaagaagaggaagccagcgagaagggcaaaaagaagtag

SEQ ID NO: 139349 - DNA, 3126 bp, Artificial Sequence
  derived and/or modified sequence
atggcgacccctgcgggtctggaacgttgggtccaagacgaactccattctgtcctcggattgagtgagcgacacgttgcacagtttctcattgggacagcacagaggtgcacaagtgccgaggaatttgtccagaggctcagagatactgacaccttggatctctcagggcctgcccgtgacttcgcattgagactgtggaataaagtgcctcggaaggcagttgtagaaaagccggctcgagctgctgaacgggaggccagggcattactcgaaaaaaaccggagctataggcttctggaagatagcgaggagagcagtgaggaaacagtcagccgggcaggtagctctcttcaaaaaaaaaggaagaaaagaaagcacttaaggaaaaagcgagaggaagaagaagaagaggaagccagcgagaaagggaagaaaaagacaggtggcagtaaacagcagaccgaaaaaccggaaagtgaggatgagtgggaacggactgagcgcgagagactgcaggacctcgaggagcgcgacgcctttgcggaacgggtgcgccagagagataaggaccgcaccaggaacgtcctggagagatcagacaagaaagcatacgaggaagcacagaagcgactcaagatggctgaggaagacaggaaagctatggttccggagctgagaaaaaaaagtcgcagggagtacctcgcaaaaagggagcgcgagaagttagaggacctggaggctgagctggccgatgaggagttcctctttggagacgtcgaattgagtcggcatgaacgacaagaactgaaatataaaaggcgagtgcgtgatcttgccagggaatatcgcgcagcaggcgagcaggaaaaactagaggccaccaatcgataccacatgcccaaggagacacgcggtcagcctgcgcgtgctgttgatctggtggaggaagaatcaggggctcctggcgaggagcagcggaggtgggaagaggccagactcggcgcagcctcgctgaaattcggagcgagggacgccgcaagccaggagccgaaatatcagttggtattggaggaagaagaaaccatagagtttgtccgggcaacgcagcttcagggtgacgaggagccgtcggccccacctacgtcaacccaggcgcaacaaaaggaaagcatacaggccgttcggagaagtctgccagtttttccttttagggaagagctactggctgcgatcgctaaccaccaggtgctgattattgagggggaaaccggtagcggaaaaacgacccagatcccccagtacctattcgaggaaggatacacgaacaagggtatgaagatcgcctgcacgcagcctagacgggtggcggcaatgagtgttgccgctcgggtcgcccgagagatgggtgtgaagctgggcaacgaggtcgggtatagcatacgattcgaagattgcacatcagagagaacagttctgagatatatgaccgacgggatgctactccgggaattcctatcagaacccgacctggctagctacagtgtggtgatggtggacgaagcccatgagagaacccttcatactgacatcttgtttggtctgattaaagatgtggccaggttccgccctgagttgaaggtgctggtggcctctgccaccatggacaccgccagattttcaacctttttcgatgatgcccctgtctttcggataccgggacgcagatttccagtagatatcttttacactaaggcccctgaggccgactacctagaggcctgtgtcgtatccgtgctccagattcatgtgactcagcctcctggagatatactcgtgtttctcaccggacaagaggaaattgaggccgcttgtgagatgctacaggatagatgccggaggctcggctctaagatccgagagctgctagtcctgcctatttacgctaaccttccaagtgatatgcaggcgaggattttccaaccgaccccacccggagcccgaaaggtcgtggtcgccaccaacatcgccgagacttccctgacaatcgaaggaattatctatgtgctcgaccctgggttttgcaagcaaaagtcttataacccccgtaccggcatggagtctctgactgtcacaccatgttccaaagcttccgcgaaccagcgagctggcagagccggacgcgtggcagccggaaaatgtttccggttgtacactgcctgggcctatcaacacgaacttgaagaaaccactgtgcccgaaatccaaaggacctctctcggcaatgttgtcctgctgcttaaatcactggggatccacgacctcatgcactttgactttctagaccctcctccctacgagacgttactgttggccctcgaacagctatacgccttgggtgcactcaaccacctcggggaattaactactagcggcaggaagatggccgagctgccggttgaccccatgttatccaagatgattcttgcttcagagaagtactcatgttccgaagagatcctgacggttgccgcaatgctgtcagtaaataactcgattttttacaggcctaaggacaaagtggttcatgccgataacgcaagggttaattttttcttaccaggcggtgatcatcttgtgttactgaatgtctacacacagtgggccgaaagtggatatagctctcaatggtgctacgaaaacttcgtgcagtttagatccatgcgcagagcccgtgacgtgcgggaacaactggaaggactgctcgaacgcgtggaagtgggcctaagctcttgtcagggtgattatatcagagtgagaaaggctattaccgcaggctatttttaccacaccgctcgcctgaccagatctggttacaggacggttaagcaacagcagacagtgttcattcaccccaatagttcgctttttgaacagcaacccagatggctgctttaccacgagttagttttgacaacaaaggagttcatgaggcaggtcctagagattgagagcagttggctgttagaagtggctccacactattacaaagccaaggagctggaggatccgcatgccaagaagatgcctaaaaaaattggcaaaacaagagaagagctgggctag

SEQ ID NO: 139350 - DNA, 3126 bp, Artificial Sequence
  derived and/or modified sequence
atggcaacccccgctggcttggagcgatgggtccaggatgagcttcacagcgtcctgggattatccgagcggcacgtcgcccagtttcttatcggtacagcccagcgctgtacatctgctgaggaattcgttcaacgccttcgcgacaccgacacactggatctcagcgggccagcacgggattttgcacttcgcctctggaataaggtccccagaaaagcagtggtggaaaaacctgctagagccgcagaacgggaggccagagcactactggagaaaaataggagctacagactcctcgaggatagtgaggaatcctcggaggaaactgtgtcccgggctgggtccagtttgcagaagaagcgaaagaagcggaagcacctgcggaagaaaagggaggaggaggaagaggaggaggcctccgagaagggtaaaaagaaaactggtgggtctaagcagcagaccgaaaagccagagtctgaggacgagtgggagagaaccgagcgggaaaggctccaagacctcgaggagagagacgcctttgcagaacgcgtgcgacagcgcgacaaagaccggacacgaaatgtcctcgagcgttctgacaaaaaagcatacgaggaagctcagaagaggcttaagatggcagaagaggacagaaaggccatggttcctgaactacgcaagaagtctagacgagagtacctggctaagagagagcgagaaaagcttgaggacctggaagcagagcttgctgatgaggagttcctttttggggatgtggagctgagcaggcatgaaagacaagagctgaaatataagaggagagtgagggatctggcccgagagtacagagccgctggggaacaagaaaaactggaagccacaaatcgatatcatatgcctaaggagacaagaggacaacccgctagggccgtagacctcgtggaggaagaatcaggggctcccggagaggagcagcggaggtgggaggaggccaggctcggcgcagcttccctgaagttcggcgctcgggacgctgccagtcaggagccaaagtaccagctggtgctcgaggaggaagagacaattgaattcgttcgagccacccagctccagggagacgaagaacctagcgctccaccgacaagtacacaggcccagcaaaaggaatctatacaggccgtcaggcgttctctgcccgtcttccctttccgggaggagctactggcagccattgcaaaccatcaggtattaatcatcgagggcgaaacaggaagcggtaaaaccacacaaattcctcaatatctctttgaggagggctacactaataaaggcatgaagatcgcctgtactcagccacggagggtcgcggctatgagcgtcgcagccagagtggcacgcgagatgggcgtgaaactaggaaacgaggtgggctactctattagatttgaggactgtactagtgagcgcaccgttctgcggtatatgacggatgggatgttgttaagagagtttttgagcgaaccagacctggctagctattcagtggtaatggttgatgaggcccatgagcggaccctgcacaccgatatcctgtttggtcttatcaaagatgtggccaggttccgccctgagctaaaggtgcttgtggccagcgctaccatggatacagctcgtttttcaaccttctttgacggcgcacctgtgttccggatacccggaagacggtttccagtggatattttctacacaaaggcgccagaagctgactacctcgaggcatgcgtcgtgtcagtcctgcagattcacgtcacccagccccctggagatatactggtattcttaacgggccaggaggagatcgaggcagcctgcgagatgctacaggacagatgcaggagactgggatctaagattagggagttactagtgctgcccatctacgctaatttgcctagtgatatgcaggctcggatttttcagcccacccctccaggagcccgaaaggttgtggtggctaccaacatcgctgagacctcactgacgatcgaggggatcatctacgtgttggatccgggattctgtaagcagaagtcatacaacccgaggaccgggatggagtcattgactgttacaccctgttccaaagcatccgcgaaccagcgagccggacgggctggtcgggtcgctgctggaaagtgttttcggctttatactgcatgggcgtaccaacatgagttggaagagaccaccgtgcctgagatccagaggaccagtctgggcaacgtcgtgctgctcctgaagagtctgggcattcatgacctcatgcacttcgactttctggacccacccccatacgagacactgctgctggcgttagagcagctgtatgccctcggggctctgaaccaccttggggaactcactacgagcggcagaaaaatggccgagctgcctgttgaccctatgcttagtaaaatgatcctggcaagtgagaagtactcgtgtagcgaagagattttgactgtcgcagcaatgctcagcgtaaataactccatcttttaccggccaaaggacaaggttgtccacgccgacaatgcgagagtgaatttctttcttcctggcggagaccacctggtcttgcttaacgtttacacccagtgggccgaaagcggctattcgtcgcagtggtgttatgaaaacttcgttcagttccggagcatgagacgagctcgggatgtacgtgaacaactagagggcctcctggagcgggtggaagtcgggctatcgagctgccagggggattatatccgggtgcggaaggctatcactgcaggttacttctatcataccgcgaggctgacacggagcggataccgcacggtgaagcagcagcaaaccgtgtttatccaccccaatagttctctcttcgagcagcagccgagatggctactgtatcatgagctcgtgctgacaaccaaagagttcatgaggcaagtcttagaaattgaaagttcctggctcctcgaggtggctcctcattattacaaagctaaagaactcgaagatcctcacgctaagaaaatgcccaagaaaattggcaaaacccgtgaagagctcggctag

SEQ ID NO: 139351 - DNA, 3126 bp, Artificial Sequence
  derived and/or modified sequence
atggcaacacctgcaggcttagagcgttgggtccaggatgagttacattccgtcctgggcctctctgagcgccacgtggctcagttcctgataggtacggcccagaggtgcactagcgctgaggaattcgtccaacggctccgggacactgatactcttgacctgtctggccctgcaagggatttcgctcttagactctggaataaggttccaagaaaagcagtggttgaaaagcccgctagagccgctgaaagagaggcccgagccctcttagaaaagaatagatcatatcgcctgctcgaggattctgaagaatccagcgaagagacagtctcgagggccggttccagcctccagaagaagagaaaaaagcgcaagcacctgcgaaaaaaaagagaggaggaggaggaagaggaggcgtcagagaagggcaaaaaaaaaacagggggatctaagcagcagacagagaagcccgagagtgaggacgaatgggagcggactgagcgagagaggctccaggatctagaagaaagagatgcattcgctgaacgagtaagacagagggacaaggatcgaacacggaatgtgctagaacggtctgacaagaaggcttatgaggaggcccaaaaaagattaaaaatggccgaagaggatcgtaaggccatggtgcccgagcttcgtaaaaaatcacggcgagagtacctcgccaagcgagaacgggaaaagcttgaagacctcgaggcagaactcgccgatgaggaattcctgttcggtgatgtggaactgagcaggcacgagaggcaggaactgaagtataagaggagagtgagggacctggcacgggaatacagggccgctggcgaacaggagaagctggaggctacaaatagataccacatgccgaaggagactcgcggacagcctgcgcgtgcagtggacctggtcgaggaggaatccggggcacccggtgaggagcagcgaaggtgggaggaggctcggctgggggcagccagtctcaaatttggcgcacgggacgccgctagccaggagcccaaataccaactcgtgctggaagaggaagaaaccatcgagttcgtaagagccacccagttgcaaggcgacgaagaaccatccgcccctccaacaagcactcaggctcaacagaaggagtctattcaagccgtgaggcggagcctgcccgtgttcccttttcgagaagagctcctggcagccattgcaaaccaccaggtccttataattgaaggagaaactggatctggcaagaccactcagatcccgcagtacctgttcgaagaggggtacactaacaagggtatgaagatcgcctgtactcaaccccgtagggtcgccgctatgtccgtagccgctagagttgccagggaaatgggagtaaagctcggcaacgaggtagggtactctattagattcgaggattgtacaagtgaaaggacggtccttaggtacatgaccgatggcatgttgcttagggaattcctatccgaacccgacctcgcctcttactctgtcgtcatggtcgacgaggcgcacgagcggaccctgcacacggacatcttgttcggcctgatcaaagatgtggcaaggttccggccagaacttaaggttttagtggctagcgctaccatggataccgcaagatttagcaccttcttcgatgacgctcctgtatttagaattcccggacgacgtttcccggtggatatattctataccaaggctcctgaggccgattatctggaagcctgcgtggtgtctgtactacagattcatgtcacccaaccccctggagatattcttgtgtttctgaccggccaggaggagatcgaagccgcttgtgagatgttgcaggatcggtgccgcaggcttgggtccaaaatccgtgaacttctcgtgttgcccatctacgcaaaccttccatcagatatgcaagcaaggatctttcagcccactccacctggtgcccgaaaggtagtagtggctactaatatcgccgagacctccctgaccatagagggtatcatctacgttctggacccgggattttgtaaacaaaaatcgtataaccctcggaccgggatggaatcactgactgttactccctgcagcaaagcttctgcgaaccaacgcgctggcagagccggtcgcgttgccgctggaaagtgctttcgactttatacagcatgggcatatcagcacgagctggaggagacgactgtcccagaaattcagcgtacatctcttggtaatgtagttcttctgcttaaaagtttgggcatccacgacttgatgcatttcgattttctggacccccctccgtatgaaacactcttactcgccttagagcaactgtatgcgttaggggctctcaaccatctaggcgagctcaccactagtggacggaaaatggctgaactccccgtcgaccccatgcttagtaagatgattcttgcatccgaaaaatatagttgcagcgaggaaattcttacggtggctgcgatgctcagcgtgaataatagcattttttatcggcctaaggacaaagttgtgcacgccgataatgccagagtgaattttttccttcctggaggtgatcatcttgtgctgctgaatgtttatacccagtgggccgaaagtgggtactcatcacagtggtgttacgagaactttgtgcagtttcgctccatgagaagagcccgtgacgtgcgggagcagctcgaggggctccttgaacgcgtcgaagtggggctgtcatcttgccaaggcgattatattcgtgtccgcaaagcaatcactgccggatacttttaccacactgcacgactaaccaggtctgggtaccgcaccgtgaaacagcaacaaacagtctttatacatcctaatagctcactttttgagcagcagccccgttggctgttgtaccacgagttggtcctgacaacgaaggagttcatgcggcaggtgcttgagattgagtcgagttggctcttggaagtggctccacattattacaaggccaaggagctggaggaccctcacgccaaaaagatgcctaaaaaaatcggcaaaactcgggaagaactcggctag

SEQ ID NO: 139352 - DNA, 3126 bp, Artificial Sequence
  derived and/or modified sequence
atggccactcctgccggattagagcgctgggtccaggacgaactgcacagcgtcctgggtctgagcgagcggcatgtcgcacagtttctgatcggaacagcccaacggtgcactagcgcggaggaattcgtgcagaggttgcgcgacacagatacactcgatctgtcaggaccagcaagggattttgcccttcggctgtggaacaaggtgccaagaaaagcggtggtagaaaagcccgctcgcgctgcggagcgagaggctcgagctttgctggagaagaacaggtcatatagactgctggaggactccgaggaatcttccgaagaaactgtgtcgcgagcaggctcctctctgcagaagaaacggaagaagcgcaaacatctgagaaagaagagggaggaagaggaagaggaggaagcctctgagaaagggaaaaagaaaacagggggatcaaaacagcagactgagaaacccgagtcagaggatgagtgggagagaacagagagggaacggttacaggaccttgaagagagagatgccttcgcagagagggtgcgtcagcgggataaagaccggactcggaatgtcttggaaaggtccgataagaaagcctacgaggaggctcaaaagagactaaagatggcggaggaggacagaaaagcaatggtgccagagctgcggaaaaagtctagacgagaatatttagcaaagagagaaagagagaagctggaggacctggaagcggagctcgccgacgaagagttcctgtttggagacgtggagctatctcgtcatgaacgccaagagctgaagtacaagagacgggtgcgggacctagcaagggaataccgcgctgcaggtgaacaggagaaattggaggccaccaacagatatcatatgcctaaagagaccagaggccaaccagccagggccgtcgatcttgtggaggaggagtctggcgcaccgggtgaggagcagaggagatgggaggaggctagattaggagcggctagtctcaagtttggggcaagagacgccgcttcacaggaacctaaataccagcttgtgctggaggaggaagagaccatcgagtttgtcagagccacccagctccagggggacgaggaaccttctgcacccccaacctccactcaagcccagcagaaggagtccatacaggccgttaggcggagtcttcctgttttcccctttcgcgaagagctactggcggctatcgcaaaccatcaagtgcttatcatcgagggcgagactggcagtggtaaaacaacccaaatcccacagtacctgttcgaagaaggctacacaaataaaggtatgaaaatcgcttgcactcagccaagacgagtggccgctatgtcagtagccgcacgggtcgccagggaaatgggggtcaagctggggaatgaggtgggttacagtattcgattcgaagattgcacaagtgagcggactgtgttacgatacatgacagacggaatgctgctgcgggagttcctgtctgagcccgatcttgcatcctactccgtggtcatggttgacgaggcacatgagcgaaccctgcatacagatattttatttggcctgatcaaggacgtggcgaggttcaggcctgaactgaaggtgttggtcgccagtgcaaccatggatactgcgcgattcagtacatttttcgacgacgcgcctgtgtttagaatacctggcaggagatttccagtggatatcttttacacaaaggcaccggaagctgactatctggaagcatgcgtggtttcagttctgcaaattcatgtcacacagccacccggtgacatacttgtgtttttgactggacaggaagagatagaagccgcatgtgagatgctgcaagatcggtgccggcgactaggaagcaagattcgggagttactagttctgcccatttatgccaatctgcctagcgatatgcaggcaagaatctttcagccgacgcctccaggtgcccgaaaagtggtggtggctaccaacattgcagagacctcgctcaccatcgaggggatcatctacgttttagaccccggtttttgcaagcaaaagagctataatcctcgcaccggaatggagtcattgaccgtgaccccctgtagcaaagccagcgcaaaccagagggcagggagggctggacgcgttgccgctggcaagtgttttcgtctgtacacggcttgggcatatcagcacgagctggaggagacaactgtgccagaaatccagcgcacgtcactgggcaacgtcgtgcttttactcaagagcctgggtattcatgatttgatgcactttgatttcctagatccccctccttacgagacgctgctgctggctttggagcaactgtacgccctgggcgctttaaatcacttgggcgaactcaccacctccggtagaaagatggcagaactcccagttgaccctatgttgtccaagatgatcttagcatccgaaaaatactcttgtagcgaggagattctgacagtggccgctatgctaagcgtgaacaactcaattttttaccgacccaaggacaaagtcgtgcacgcggacaatgctcgggtgaactttttcctccccggaggcgatcacctcgtcctcctaaacgtatacactcagtgggccgaaagcggctacagcagccagtggtgttatgaaaactttgtgcagttccggtcgatgcggagagcaagagatgttagagaacagctcgaaggcctgcttgagcgtgtcgaggttgggttaagtagttgccaaggagattacatcagggtgcgcaaggcgatcacagccggttatttctatcatacggcgaggctgacgcggagcgggtaccgcacggtcaagcagcagcagactgtctttattcaccctaattcttcactctttgagcagcagcctagatggctcctctatcacgaattggttctgacgactaaagaattcatgagacaggtgctggagatagagtcatcatggctcctggaggtggctccacactattataaggccaaagagctcgaggacccacacgcgaaaaagatgcccaaaaaaattggcaagacacgtgaggaattgggctag

SEQ ID NO: 139353 - DNA, 3126 bp, Artificial Sequence
  derived and/or modified sequence
atggccacccccgctggtctcgaacgctgggtgcaggacgagctccattccgtgctgggccttagtgagagacatgtggcccaattccttattggcactgcgcaaagatgcacttcagcagaggaatttgtgcaaaggctgagggataccgacaccctggatctcagcggaccagcgagggatttcgcactacggctgtggaataaagtcccacgcaaggcggtggtggagaagcccgcacgcgcagccgagcgcgaagcacgggctctgttagagaaaaacagatcgtaccggctccttgaagattccgaggagtcatctgaggaaacagttagtcgcgcaggctcatctttgcaaaagaaacgaaaaaagagaaaacacctgcgcaaaaagcgcgaagaggaggaagaagaggaggcctccgaaaagggcaaaaagaagacgggcggatccaagcagcagacagaaaagccagagtccgaagatgagtgggagcggaccgaacgcgagaggttacaggatctggaggaacgtgatgcttttgccgagagagtgaggcagcgggataaggatagaactcgcaacgtcttagaaagatcagacaagaaggcctatgaagaggcccagaaaagactgaagatggcggaggaggatagaaaagctatggtgccagagcttcggaaaaaaagcagacgggaatacctagccaagagagagcgggaaaagttagaggatctcgaggcagagctggccgatgaagagttcttattcggtgatgtcgagttgtcgcgccatgagaggcaggagttaaagtacaaaagaagagtgagggatctggcacgcgagtacagggctgctggggaacaggagaaacttgaggccactaacagataccatatgcccaaggaaacacggggacaacctgctcgggctgttgacttggtggaggaagagtctggcgcaccaggcgaagaacaacgtcggtgggaagaggccaggctgggtgccgcaagcttaaagtttggagctagagacgcagccagccaggaaccaaaatatcagctggtattggaggaagaggaaactatcgagtttgtgagggccacacagcttcagggggatgaggagcccagtgcaccacccacatcaacccaggctcagcagaaagagagcatacaagctgtcaggaggtcactgcctgtattccccttcagggaagagctcttagctgcaatcgcgaaccatcaggtgctgataatcgagggagagactgggagtgggaagaccacccagatcccacaatacctgtttgaagaaggatacacgaacaaaggcatgaagatcgcatgcactcagccgcgacgtgtcgcggctatgtctgtggccgctagagtagccagagagatgggggttaagctcggaaatgaagtaggctactcaatcaggtttgaggattgtacctctgagcgcactgtcctgcggtacatgaccgacggcatgctgctgcgtgaattcctttctgaacccgacctcgccagctattcagtcgtgatggtggacgaggctcatgagaggacgttgcatacagacatcctgttcggattaatcaaggacgtggctcggttcagacccgagctcaaggtgcttgtggcaagcgccaccatggacactgctaggttttccactttttttgatgacgccccagtcttccgcattcctggcaggcggttcccagtggatatcttttacactaaagccccagaggctgactaccttgaagcgtgtgtggtatcggtcctgcagattcatgtgacccagcctcccggagatatcctggtctttctgacaggccaagaggaaatcgaggccgcttgtgaaatgctgcaggatcggtgccgccgattaggttctaagattcgcgagctcctggtgctgcctatttacgctaaccttcccagcgatatgcaggccaggatcttccagccaacacctccaggcgctagaaaggtggtagtggccaccaacatcgctgagacaagcctgacaattgaaggtatcatttacgtgctagatccaggcttttgcaaacagaaatcctacaacccccgtactgggatggagtccttgactgtgactccatgctcaaaggcctcagccaatcagcgggctgggagggctggaagagttgcagctggcaaatgcttcaggctgtatacagcgtgggcgtaccagcacgagctggaagagaccacagtgcccgaaatccagcgcaccagcctgggaaatgtggtcctgttgttgaagtccttgggcatccatgatcttatgcatttcgactttctggatccaccaccttatgaaactcttttactggccttggagcaattgtacgccctcggcgcactgaaccaccttggggagcttacgacctcgggccgaaagatggccgaactgcccgtggaccctatgctgtcaaagatgatcctggccagcgagaagtactcttgctccgaggaaatactcaccgtagctgccatgttaagcgttaataacagtatcttctacaggccaaaagacaaggtcgtgcacgccgataatgctcgcgttaattttttcctgcccggaggtgaccatctcgtgctgctgaacgtgtacactcagtgggccgaatcgggctattccagtcagtggtgctatgaaaattttgtccagtttcgatcaatgaggcgggcacgcgacgttagggagcagctagaaggcctcctggaaagggtggaggtgggcttaagttcctgtcaaggagattatatccgtgtgcgaaaggccattacagccggatatttctaccacactgccagattaacacggtcaggatatcggaccgtaaaacagcagcagaccgtgtttatacacccaaacagctctctctttgagcagcagcctcgatggttattgtatcacgaactggtcctgacaaccaaagaattcatgagacaggtgctggagattgaatcaagctggctccttgaggtggcccctcattattacaaagcaaaggagctcgaggatccccacgcgaagaagatgccaaaaaaaattggtaaaactagggaagaattggggtag

SEQ ID NO: 139354 - DNA, 2010 bp, Artificial Sequence
  derived and/or modified sequence
atggccactcctgccggtcttgaacgatgggtccaggacgaacttcatagcgtgctgggcttgtctgaaagacatgtggcccagtttctgattgggaccgcgcaacggtgtactagcgccgaggagttcgtgcagcgtctccgggataccgacaccctggacctcagcggacccgcacgagattttgcgctgcggctctggaacaaagtgcctcgcaaggccgtggttgaaaagcccgctcgcgcagctgagcgggaggccagggcccttctggaaaaaaatagatcttatcgtctcctggaggacagcgaggaatccagtgaagagaccgtgagtcgagccggatcctctctgcagaaaaagcgcaaaaaaagaaaacatctgaggaagaagagagaggaagaagaggaagaggaagcgagtgagaagggaaagaaaaagactggcggatcgaaacagcagacagaaaagcctgaatctgaagacgagtgggaacgcaccgaacgcgagaggctgcaggatctggaagaaagagacgcattcgctgagagagttcgccagagggacaaagatagaacccggaacgtcctggaacgtagtgataagaaggcatacgaagaagcccagaagcgactgaaaatggcagaggaggatcgtaaagctatggtacctgagctgaggaagaaaagtcggagggagtaccttgccaaacgcgaaagagaaaaactagaagatttggaggctgagctggccgacgaggagtttttgttcggagacgttgagcttagtcggcatgagcgtcaggaattgaagtataaacgcagggttagggacctcgccagagagtaccgggcagccggagagcaggagaagctagaggcaacaaataggtaccatatgccgaaggagaccaggggtcagccagccagggccgtcgatttagtcgaggaagagagcggagccccaggagaagagcagaggcgctgggaagaggctagattaggcgctgcctccctcaaatttggcgctcgagacgcggcttctcaagaacccaagtatcagctagtgctcgaggaggaagaaaccattgagtttgtcagggctacacagttgcagggcgatgaggagcccagcgcaccgcctacatccacccaagcccagcagaaggaatccattcaggcagtcagacgcagtctccctgtgttcccatttagagaagagctactcgcagccatcgctaatcaccaggttctgataattgaaggggaaaccgggtctggcaaaaccacacagatcccccagtacctgttcgaagagggatataccaacaagggtatgaaaattgcctgtactcagcctagaagagttgcagcaatgagtgttgccgcacgggtcgctcgtgagatgggagtgaagctgggaaacgaggtcggatactctatccgctttgaggactgtacatctgaacggactgtgttgaggtatatgacggatggcatgctgcttcgcgagtttctgtcagaaccggatctcgcctcctacagcgtggtgatggtggacgaagcccacgagaggactctgcacacagatatcctctttggactgatcaaagacgtcgcgcgatttaggcccgagctcaaagtgttggtcgcttcggcgaccatggacactgcaagattttccacttttttcgatgacgcccctgtttttcgcatacccggtcgcaggtttcctgtggatattttttacactaaagcccctgaagcagattatctagaagcttgcgtggtcagtgtgttgcagatccacgtgacacaaccaccaggggatattctggtgtttctcaccggacaggaggagatagaggccgcttgcgagatgttacaggataggtgccgtcgtctgggctccaagattagggaacttttagtgctgcccatctacgctaacctacccagcgacatgcaggctcgcatatttcagcctactcctcctggtgcacgaaagtag

SEQ ID NO: 139355 - DNA, 3126 bp, Artificial Sequence
  derived and/or modified sequence
atggctacccccgcaggattagagcgctgggtgcaggatgagcttcacagcgttctgggactgtcagagcgccacgtggcgcaattcctcataggcacggcgcagcggtgcaccagcgctgaggagtttgtgcaaaggttacgcgataccgatacccttgatttgagcggccctgccagggattttgctttgaggctgtggaacaaagtcccccgaaaagccgtcgtggaaaaaccagcacgcgcagctgagcgcgaggccagagctctgctggaaaaaaaccgctcttaccgcctgctggaggattcagaggagagctccgaggaaacagtgagcagggctggcagtagcctacaaaaaaagcgcaagaaacgaaaacacctcaggaagaaacgcgaggaggaggaggaggaggaggcctccgagaagggaaagaagaagaccggcggttccaagcaacagactgagaagccggaatccgaggatgaatgggagcgcaccgaacgggagcgccttcaggatctggaagaacgcgacgcctttgcagagagagtgcgccagcgggacaaggacaggacaaggaacgtgcttgaaagatctgataagaaggcatacgaggaggcacagaagcggctgaaaatggccgaggaggaccgtaaagctatggtaccagagttaagaaagaaatctcgcagggagtatctagcaaaacgcgagcgcgagaaactggaagacttggaagctgaactggctgacgaggaattcttgtttggagacgtcgagctaagtcgccatgaacggcaggaactgaagtacaaaagaagggtaagagacctggccagggagtacagagcagccggtgaacaggagaagctggaggccaccaacaggtatcatatgccgaaagagacacggggacaacccgcaagagcagtggatctggtggaggaggagtcaggggctcccggagaagaacagcgcaggtgggaggaggctcgcctgggggctgccagcttgaagttcggcgctagagacgctgctagccaagaaccaaaataccagctcgtcctggaagaagaggagaccatcgagttcgtcagggcaacccagcttcagggcgatgaggaaccttcagctcctcccacatccactcaggctcagcagaaggagtctattcaggccgtgcgtcggtccctgcccgtattcccctttagagaagagctgctcgccgctattgccaatcaccaagttttaattatcgagggagagactggctcgggtaagacgacacaaatccctcaatacctgttcgaagaaggatacaccaacaagggtatgaaaatagcttgtacccaaccgaggcgtgttgcagccatgagtgttgctgctagagttgccagagagatgggcgtgaagctggggaacgaagtgggttattctatacgttttgaggattgtacctccgagcggactgtgctcagatatatgacagatggcatgctgttgcgcgaattcttgtccgagcccgacctggcctcatacagcgttgtcatggtagatgaggcccacgagcggaccctgcacaccgacattttgtttgggctgatcaaagacgtggctagattccggcctgaactgaaagtgctggtagcaagcgccactatggataccgcaaggttctccaccttcttcgacgacgccccagtgtttaggatccccggacgcagatttccagtggacattttctacaccaaggctcccgaggcagactatcttgaggcctgcgtggtgtccgttctacagatccatgtgacacaaccaccaggggatattctggtcttcctgacagggcaggaagagatcgaggccgcatgtgagatgctccaagacaggtgcaggaggctggggtctaagattagagagctgctcgttctaccgatttacgccaaccttccttcagatatgcaggctaggatcttccagccaacacctcccggagcccgtaaggtggtcgttgccaccaatatcgccgagacttccctgaccatagaagggattatctacgtcctcgatccgggtttttgtaagcagaagagctataatccccgtactggcatggaatccctaacagttaccccctgttccaaagcttctgccaaccaacgcgctggacgcgctggtagggtagcagccggtaagtgcttccgcctctacacagcctgggcttaccagcatgaacttgaagagaccactgtccccgagattcagcgcaccagcctggggaacgttgtcctgctgctaaagtctctggggatccacgatttgatgcacttcgattttcttgacccaccaccctatgaaacccttcttcttgctctcgagcagctatatgccttgggtgcactaaaccacctcggagaactgacaaccagcggtagaaagatggccgagctgcccgtcgatcccatgctctctaagatgatcctcgcttctgagaagtactcctgttcagaggaaattctgacagtcgctgctatgctgtcagtgaataatagcattttctaccgcccaaaggacaaagtggtgcacgccgataatgcgagagttaacttctttctccccggaggggaccacctggtgctgctgaacgtctatacccaatgggcagaatcggggtattcttcccagtggtgctacgaaaatttcgtgcagtttcggtccatgagaagagctcgtgacgtaagagaacagctcgagggattgctggaacgggtggaagtcgggttgtcctcgtgtcagggcgactacatacgggtccgcaaggcaataactgccggatacttctaccatacagcacggttgacacgttcgggctacaggaccgtcaaacagcaacaaacagtgttcatacacccaaactcttccctcttcgaacagcagcccaggtggctcctgtaccacgaactggtgctgaccacaaaggaattcatgcggcaggttctcgagatagaaagctcgtggctgcttgaggtcgccccacactattacaaggccaaagagctggaagatcctcacgctaaaaaaatgccgaaaaagattggtaaaacacgtgaagagctaggctag

SEQ ID NO: 139356 - DNA, 3126 bp, Artificial Sequence
  derived and/or modified sequence
atggcaacaccggctgggctcgagagatgggtgcaggatgaactccacagtgtcctaggactgagcgagcgtcatgttgcccagttcttgatcggtacagctcagaggtgtacaagcgccgaggaatttgtgcagcggctgagagatacagacacactggatctgtccggccctgccagggatttcgccttgaggctatggaataaagtgcctcgtaaggcagtcgtcgagaaacctgctcgagcggctgagcgcgaggccagagccctcctcgagaagaacaggagctaccgcctactggaggatagcgaagagagctccgaggagactgtcagccgcgcagggtcgagcctgcaaaagaaaagaaagaagcggaagcacctgcgcaagaagcgcgaagaagaagaagaagaggaagcctctgaaaagggcaaaaagaaaactgggggatcgaagcagcagacggaaaaacctgaaagcgaagatgaatgggaacggactgaaagggaaagactccaagatttggaggaacgtgacgccttcgccgaaagggtacgacaacgagataaggatagaacgaggaacgtgttagagaggagtgacaagaaggcctacgaggaggcgcaaaaaaggctgaaaatggctgaggaagatcgcaaggccatggtccccgagttaaggaagaaaagcaggagggaatacctggctaagagagaacgagagaaactggaggatctggaggccgagcttgccgacgaagaatttctgttcggcgacgttgaactgtcccggcacgagaggcaggagctcaagtacaaacgacgggtgcgagatctagcgcgagagtaccgagccgctggcgaacaagagaaactagaggcaacaaaccgctatcatatgcctaaggaaacacgcggacagccagccagagcggtagacctggtcgaagaagaaagcggagcaccaggcgaggaacaaagaaggtgggaggaggctcgactcggtgctgcttccctcaaattcggcgcacgcgatgcagccagtcaggaacccaagtaccagcttgtgctcgaggaggaggagacaattgaatttgtgcgcgctacacagctacaaggtgacgaggagccaagtgcacccccaacaagtacccaggcccagcagaaggagtccatccaagccgtacgcagatccctcccggtgttcccctttcgtgaggaactgctcgctgccattgccaatcatcaagttctcatcatagaaggagagactgggagtgggaagaccacccagattccccagtacttgtttgaggagggctacaccaacaagggtatgaaaattgcctgtactcagccaagaagggtcgcagccatgtccgtagctgcaagagtggccagggagatgggggtgaaattgggcaacgaagtcggttattccattcggttcgaagactgtaccagtgagcggactgtccttcggtatatgacggatgggatgcttctcagggaattcctctcagagcccgacttagccagttatagcgtggttatggtggacgaggctcacgaacgaacactccataccgatattcttttcggactgatcaaggacgttgcccgattcaggccagagctgaaggtgttggtcgcctccgcaactatggatacagccaggtttagcacgttcttcgatgacgcacctgtatttcggatccctggcagacgattccccgtggacatcttttacaccaaagctcccgaggccgattatctcgaagcttgtgtggtgtcagtgctccagattcacgtgacccagcctcctggagatatcctagtctttctaaccgggcaagaagaaatcgaggctgcttgcgaaatgctccaggatcgctgccgaagactcggtagcaaaattcgggagctcttggtactaccgatttatgctaacttgccctccgacatgcaagcaaggatcttccagcccacacctcctggtgctcgcaaggtggtagtggctacaaatatcgcagagacttcgctgactatcgagggaattatctacgtcctggaccccggattttgcaaacagaagtcctataaccctagaaccggcatggaatccctcaccgtgaccccttgtagtaaagcctccgccaaccaacgggcaggtagagctggccgagtggcagccggaaaatgctttcgcctgtataccgcctgggcgtaccaacacgaactcgaggagacgactgtccccgaaatccagcggacaagtctcggcaatgtggtgctgcttctgaaaagcctgggaattcacgatttaatgcatttcgactttctggatcctcctccctacgaaacactactgctggcactagagcagctttacgcgctcggggctctgaaccatctgggagaactgacgacaagcggacggaaaatggccgagttgcccgtagaccccatgctgtcaaaaatgattctggcaagtgaaaaatactcttgctccgaagaaattctgacggtcgccgctatgttgtccgtgaacaattctatcttttataggcccaaggacaaggtcgtccacgctgataatgctagagtgaatttctttctccctggaggcgaccacctggtgctcctcaacgtgtacacccaatgggcggaatccggctactcgtctcagtggtgctacgaaaattttgttcagttccgcagtatgcgcagagcacgcgacgtccgtgagcagctcgaggggctgctggagagggtggaggtgggcttgagctcttgccagggggattacatccgcgtgcggaaggccatcacggccggatacttttatcataccgctcgtttaacccggtccgggtacagaacggttaagcagcagcagaccgtgtttattcacccaaactctagcctgttcgaacagcaacccagatggctgctttatcacgagttagttctgaccaccaaggagtttatgcgccaggtgcttgaaatcgaatcttcatggctcctggaggtggctccccactactataaggccaaggagttggaagacccacacgccaaaaagatgccgaagaaaattggcaagacacgggaggagctcggctag

SEQ ID NO: 139357 - DNA, 444 bp, Artificial Sequence
  derived and/or modified sequence
atggcgactcctgcgggtctcgagcgttgggttcaagacgaactccacagtgtcctggggctgagcgaaaggcacgttgcacaatttttgattgggactgcccaaagatgtacatccgctgaggaattcgttcaacgtctgagggacaccgacacgctggacctgtcaggcccagcccgagattttgccctgagactttggaataaagtgccccgaaaagcagtcgtggaaaagcccgctcgcgcagccgagcgggaagcccgagcactcttggaaaaaaatcggtcgtacaggttactcgaagacagtgaggagtcatctgaagagactgtgagccgggctgggagtagccttcagaaaaagagaaaaaaacgaaagcacctacgaaaaaagcgtgaggaggaggaagaggaggaggcttcagaaaaggggaagaagaagtag

SEQ ID NO: 139358 - DNA, 3126 bp, Artificial Sequence
  derived and/or modified sequence
atggccacccccgccggcctggagagatgggtgcaggacgagctgcacagcgtgctgggcctgagcgagagacacgtggcccagttcctgatcggcaccgcccagagatgcaccagcgccgaggagttcgtgcagagactgagagacaccgacaccctggacctgagcggccccgccagagacttcgccctgagactgtggaacaaggtgcccagaaaggccgtggtggagaagcccgccagagccgccgagagagaggccagagccctgctggagaagaacagaagctacagactgctggaggacagcgaggagagcagcgaggagaccgtgagcagagccggcagcagcctgcagaagaagagaaagaagagaaagcacctgagaaagaagagagaggaggaggaggaggaggaggccagcgagaagggcaagaagaagaccggcggcagcaagcagcagaccgagaagcccgagagcgaggacgagtgggagagaaccgagagagagagactgcaggacctggaggagagagacgccttcgccgagagagtgagacagagagacaaggacagaaccagaaacgtgctggagagaagcgacaagaaggcctacgaggaggcccagaagagactgaagatggccgaggaggacagaaaggccatggtgcccgagctgagaaagaagagcagaagagagtacctggccaagagagagagagagaagctggaggacctggaggccgagctggccgacgaggagttcctgttcggcgacgtggagctgagcagacacgagagacaggagctgaagtacaagagaagagtgagagacctggccagagagtacagagccgccggcgagcaggagaagctggaggccaccaacagataccacatgcccaaggagaccagaggccagcccgccagagccgtggacctggtggaggaggagagcggcgcccccggcgaggagcagagaagatgggaggaggccagactgggcgccgccagcctgaagttcggcgccagagacgccgccagccaggagcccaagtaccagctggtgctggaggaggaggagaccatcgagttcgtgagagccacccagctgcagggcgacgaggagcccagcgccccccccaccagcacccaggcccagcagaaggagagcatccaggccgtgagaagaagcctgcccgtgttccccttcagagaggagctgctggccgccatcgccaaccaccaggtgctgatcatcgagggcgagaccggcagcggcaagaccacccagatcccccagtacctgttcgaggagggctacaccaacaagggcatgaagatcgcctgcacccagcccagaagagtggccgccatgagcgtggccgccagagtggccagagagatgggcgtgaagctgggcaacgaggtgggctacagcatcagattcgaggactgcaccagcgagagaaccgtgctgagatacatgaccgacggcatgctgctgagagagttcctgagcgagcccgacctggccagctacagcgtggtgatggtggacgaggcccacgagagaaccctgcacaccgacatcctgttcggcctgatcaaggacgtggccagattcagacccgagctgaaggtgctggtggccagcgccaccatggacaccgccagattcagcaccttcttcgacgacgcccccgtgttcagaatccccggcagaagattccccgtggacatcttctacaccaaggcccccgaggccgactacctggaggcctgcgtggtgagcgtgctgcagatccacgtgacccagccccccggcgacatcctggtgttcctgaccggccaggaggagatcgaggccgcctgcgagatgctgcaggacagatgcagaagactgggcagcaagatcagagagctgctggtgctgcccatctacgccaacctgcccagcgacatgcaggccagaatcttccagcccaccccccccggcgccagaaaggtggtggtggccaccaacatcgccgagaccagcctgaccatcgagggcatcatctacgtgctggaccccggcttctgcaagcagaagagctacaaccccagaaccggcatggagagcctgaccgtgaccccctgcagcaaggccagcgccaaccagagagccggcagagccggcagagtggccgccggcaagtgcttcagactgtacaccgcctgggcctaccagcacgagctggaggagaccaccgtgcccgagatccagagaaccagcctgggcaacgtggtgctgctgctgaagagcctgggcatccacgacctgatgcacttcgacttcctggacccccccccctacgagaccctgctgctggccctggagcagctgtacgccctgggcgccctgaaccacctgggcgagctgaccaccagcggcagaaagatggccgagctgcccgtggaccccatgctgagcaagatgatcctggccagcgagaagtacagctgcagcgaggagatcctgaccgtggccgccatgctgagcgtgaacaacagcatcttctacagacccaaggacaaggtggtgcacgccgacaacgccagagtgaacttcttcctgcccggcggcgaccacctggtgctgctgaacgtgtacacccagtgggccgagagcggctacagcagccagtggtgctacgagaacttcgtgcagttcagaagcatgagaagagccagagacgtgagagagcagctggagggcctgctggagagagtggaggtgggcctgagcagctgccagggcgactacatcagagtgagaaaggccatcaccgccggctacttctaccacaccgccagactgaccagaagcggctacagaaccgtgaagcagcagcagaccgtgttcatccaccccaacagcagcctgttcgagcagcagcccagatggctgctgtaccacgagctggtgctgaccaccaaggagttcatgagacaggtgctggagatcgagagcagctggctgctggaggtggccccccactactacaaggccaaggagctggaggacccccacgccaagaagatgcccaagaagatcggcaagaccagagaggagctgggctag

SEQ ID NO: 139359 - DNA, 3126 bp, Artificial Sequence
  derived and/or modified sequence
atggccacccccgccggcctggagagatgggtgcaggacgagctgcacagcgtgctgggcctgagcgagagacacgtggcccagttcctgatcggcaccgcccagagatgcaccagcgccgaggagttcgtgcagagactgagagacaccgacaccctggacctgagcggccccgccagagacttcgccctgagactgtggaacaaggtgcccagaaaggccgtggtggagaagcccgccagagccgccgagagagaggccagagccctgctggagaagaacagaagctacagactgctggaggacagcgaggagagcagcgaggagaccgtgagcagagccggcagcagcctgcagaagaagagaaagaagagaaagcacctgagaaagaagagagaggaggaggaggaggaggaggccagcgagaagggcaagaagaagaccggcggcagcaagcagcagaccgagaagcccgagagcgaggacgagtgggagagaaccgagagagagagactgcaggacctggaggagagagacgccttcgccgagagagtgagacagagagacaaggacagaaccagaaacgtgctggagagaagcgacaagaaggcctacgaggaggcccagaagagactgaagatggccgaggaggacagaaaggccatggtgcccgagctgagaaagaagagcagaagagagtacctggccaagagagagagagagaagctggaggacctggaggccgagctggccgacgaggagttcctgttcggcgacgtggagctgagcagacacgagagacaggagctgaagtacaagagaagagtgagagacctggccagagagtacagagccgccggcgagcaggagaagctggaggccaccaacagataccacatgcccaaggagaccagaggccagcccgccagagccgtggacctggtggaggaggagagcggcgcccccggcgaggagcagagaagatgggaggaggccagactgggcgccgccagcctgaagttcggcgccagagacgccgccagccaggagcccaagtaccagctggtgctggaggaggaggagaccatcgagttcgtgagagccacccagctgcagggcgacgaggagcccagcgccccccccaccagcacccaggcccagcagaaggagagcatccaggccgtgagaagaagcctgcccgtgttccccttcagagaggagctgctggccgccatcgccaaccaccaggtgctgatcatcgagggcgagaccggcagcggcaagaccacccagatcccccagtacctgttcgaggagggctacaccaacaagggcatgaagatcgcctgcacccagcccagaagagtggccgccatgagcgtggccgccagagtggccagagagatgggcgtgaagctgggcaacgaggtgggctacagcatcagattcgaggactgcaccagcgagagaaccgtgctgagatacatgaccgacggcatgctgctgagagagttcctgagcgagcccgacctggccagctacagcgtggtgatggtggacgaggcccacgagagaaccctgcacaccgacatcctgttcggcctgatcaaggacgtggccagattcagacccgagctgaaggtgctggtggccagcgccaccatggacaccgccagattcagcaccttcttcgacggcgcccccgtgttcagaatccccggcagaagattccccgtggacatcttctacaccaaggcccccgaggccgactacctggaggcctgcgtggtgagcgtgctgcagatccacgtgacccagccccccggcgacatcctggtgttcctgaccggccaggaggagatcgaggccgcctgcgagatgctgcaggacagatgcagaagactgggcagcaagatcagagagctgctggtgctgcccatctacgccaacctgcccagcgacatgcaggccagaatcttccagcccaccccccccggcgccagaaaggtggtggtggccaccaacatcgccgagaccagcctgaccatcgagggcatcatctacgtgctggaccccggcttctgcaagcagaagagctacaaccccagaaccggcatggagagcctgaccgtgaccccctgcagcaaggccagcgccaaccagagagccggcagagccggcagagtggccgccggcaagtgcttcagactgtacaccgcctgggcctaccagcacgagctggaggagaccaccgtgcccgagatccagagaaccagcctgggcaacgtggtgctgctgctgaagagcctgggcatccacgacctgatgcacttcgacttcctggacccccccccctacgagaccctgctgctggccctggagcagctgtacgccctgggcgccctgaaccacctgggcgagctgaccaccagcggcagaaagatggccgagctgcccgtggaccccatgctgagcaagatgatcctggccagcgagaagtacagctgcagcgaggagatcctgaccgtggccgccatgctgagcgtgaacaacagcatcttctacagacccaaggacaaggtggtgcacgccgacaacgccagagtgaacttcttcctgcccggcggcgaccacctggtgctgctgaacgtgtacacccagtgggccgagagcggctacagcagccagtggtgctacgagaacttcgtgcagttcagaagcatgagaagagccagagacgtgagagagcagctggagggcctgctggagagagtggaggtgggcctgagcagctgccagggcgactacatcagagtgagaaaggccatcaccgccggctacttctaccacaccgccagactgaccagaagcggctacagaaccgtgaagcagcagcagaccgtgttcatccaccccaacagcagcctgttcgagcagcagcccagatggctgctgtaccacgagctggtgctgaccaccaaggagttcatgagacaggtgctggagatcgagagcagctggctgctggaggtggccccccactactacaaggccaaggagctggaggacccccacgccaagaagatgcccaagaagatcggcaagaccagagaggagctgggctag

SEQ ID NO: 139360 - DNA, 2010 bp, Artificial Sequence
  derived and/or modified sequence
atggccacccccgccggcctggagagatgggtgcaggacgagctgcacagcgtgctgggcctgagcgagagacacgtggcccagttcctgatcggcaccgcccagagatgcaccagcgccgaggagttcgtgcagagactgagagacaccgacaccctggacctgagcggccccgccagagacttcgccctgagactgtggaacaaggtgcccagaaaggccgtggtggagaagcccgccagagccgccgagagagaggccagagccctgctggagaagaacagaagctacagactgctggaggacagcgaggagagcagcgaggagaccgtgagcagagccggcagcagcctgcagaagaagagaaagaagagaaagcacctgagaaagaagagagaggaggaggaggaggaggaggccagcgagaagggcaagaagaagaccggcggcagcaagcagcagaccgagaagcccgagagcgaggacgagtgggagagaaccgagagagagagactgcaggacctggaggagagagacgccttcgccgagagagtgagacagagagacaaggacagaaccagaaacgtgctggagagaagcgacaagaaggcctacgaggaggcccagaagagactgaagatggccgaggaggacagaaaggccatggtgcccgagctgagaaagaagagcagaagagagtacctggccaagagagagagagagaagctggaggacctggaggccgagctggccgacgaggagttcctgttcggcgacgtggagctgagcagacacgagagacaggagctgaagtacaagagaagagtgagagacctggccagagagtacagagccgccggcgagcaggagaagctggaggccaccaacagataccacatgcccaaggagaccagaggccagcccgccagagccgtggacctggtggaggaggagagcggcgcccccggcgaggagcagagaagatgggaggaggccagactgggcgccgccagcctgaagttcggcgccagagacgccgccagccaggagcccaagtaccagctggtgctggaggaggaggagaccatcgagttcgtgagagccacccagctgcagggcgacgaggagcccagcgccccccccaccagcacccaggcccagcagaaggagagcatccaggccgtgagaagaagcctgcccgtgttccccttcagagaggagctgctggccgccatcgccaaccaccaggtgctgatcatcgagggcgagaccggcagcggcaagaccacccagatcccccagtacctgttcgaggagggctacaccaacaagggcatgaagatcgcctgcacccagcccagaagagtggccgccatgagcgtggccgccagagtggccagagagatgggcgtgaagctgggcaacgaggtgggctacagcatcagattcgaggactgcaccagcgagagaaccgtgctgagatacatgaccgacggcatgctgctgagagagttcctgagcgagcccgacctggccagctacagcgtggtgatggtggacgaggcccacgagagaaccctgcacaccgacatcctgttcggcctgatcaaggacgtggccagattcagacccgagctgaaggtgctggtggccagcgccaccatggacaccgccagattcagcaccttcttcgacgacgcccccgtgttcagaatccccggcagaagattccccgtggacatcttctacaccaaggcccccgaggccgactacctggaggcctgcgtggtgagcgtgctgcagatccacgtgacccagccccccggcgacatcctggtgttcctgaccggccaggaggagatcgaggccgcctgcgagatgctgcaggacagatgcagaagactgggcagcaagatcagagagctgctggtgctgcccatctacgccaacctgcccagcgacatgcaggccagaatcttccagcccaccccccccggcgccagaaagtag

SEQ ID NO: 139361 - DNA, 444 bp, Artificial Sequence
  derived and/or modified sequence
atggccacccccgccggcctggagagatgggtgcaggacgagctgcacagcgtgctgggcctgagcgagagacacgtggcccagttcctgatcggcaccgcccagagatgcaccagcgccgaggagttcgtgcagagactgagagacaccgacaccctggacctgagcggccccgccagagacttcgccctgagactgtggaacaaggtgcccagaaaggccgtggtggagaagcccgccagagccgccgagagagaggccagagccctgctggagaagaacagaagctacagactgctggaggacagcgaggagagcagcgaggagaccgtgagcagagccggcagcagcctgcagaagaagagaaagaagagaaagcacctgagaaagaagagagaggaggaggaggaggaggaggccagcgagaagggcaagaagaagtag

SEQ ID NO: 139362 - DNA, 3445 bp, Artificial Sequence
  derived and/or modified sequence
ggccgaaaaagtacagccccttccgggctccgcggtacgggaagacagctttgggatgtcggaagatcctagaggtcccaaggtagctgacttgcgaagctgaggctccagccgagggctccaggcctctgaccggcccagcagtgagcgcggctgcccgacgcttcagggccgggagcagggagcgtgagtcgccatggcgacgccggcgggtctggagcgctgggttcaggacgagctgcactcggtgttggggctgagcgagcggcacgtcgcccagtttctgatcggtaccgcacagcgctgcacctctgccgaggagttcgtgcagcgcctacgagacactgataccttggatctcagtgggccggcccgggacttcgccctgagactctggaacaaggtaccacgaaaggcagtggtagaaaagccagctcgggcagcagagcgagaggcccgggccctgctggagaagaaccgatcttataggttactggaagacagtgaagagagcagtgaggagactgtgagtagggctggaagcagcctccagaagaaacgtaaaaagcggaaacacctcaggaagaagcgtgaggaagaagaggaggaagaggcttctgagaaagggaagaagaaaacaggggggagtaaacagcagacagagaagccagagtcggaagatgagtgggaacggacagagcgtgaacgccttcaggacctggaggagcgtgatgcctttgctgagcgggttcgacagcgggacaaggatcggactcgaaatgtcctggaacggtcagacaagaaggcttatgaagaggctcagaagcgcctcaagatggccgaggaagaccggaaggccatggtccctgagctgcggaagaaatctcgccgagagtacctggctaagcgggagcgagagaagcttgaggacctggaggcggagctggctgatgaggagttcctttttggggacgtggagctgagccggcacgagcggcaggagctcaaatataagcggcgagtgcgggatctcgcccgggagtaccgggcagctggggagcaggagaagctggaggccaccaatcgctaccacatgcccaaggaaacccgaggacagccagcccgagctgtggatctagtggaggaggaatcaggagcccctggggaggagcagcggcgctgggaggaggcgcggcttggggcagcgtccctgaagtttggggcccgagatgctgcctctcaggagcccaagtatcaactggtgctggaggaggaggagaccattgagtttgtccgggccactcagctccagggtgatgaggagccgtcagctccacccacttcaactcaggcccagcagaaagagtccatccaggccgtccgccgcagcctcccggtgttcccatttcgagaggagctcctggctgctattgcaaatcaccaagtcctcatcattgaaggcgagacaggctcagggaagaccacccagatcccgcagtatctctttgaggagggttatacaaacaagggtatgaagattgcctgcacccaaccccggagagtggctgccatgagtgtggccgcccgagtggcccgggagatgggtgtgaagcttgggaatgaggttggctacagcatccgctttgaggactgcacatcagagcgaactgtcctccgctacatgacagatgggatgcttctccgggagttcctctctgagcctgacctggcgagttacagcgtggtgatggtggatgaggcacacgaaaggaccctacacacagacattctctttggattgatcaaggatgttgctcgcttccgacctgagctcaaggtcctggtggcttcagccacaatggacactgcccgtttttccaccttctttgatgacgcccctgtgtttcgaatccccggacgcaggtttcctgtggacatcttctacaccaaggctccagaggctgactacttggaagcttgtgtagtatctgtgttgcagatccatgtgacccagccccctggggatatcctggtgttcctgacaggacaggaggagattgaggctgcctgtgagatgctccaggatcgctgccgccgcctgggctccaaaatccgggagctcctggtgctgcccatttatgccaatctgccctctgacatgcaggcccgtatcttccagcccacaccacctggggcacgaaaggtggttgtggcaacgaacattgctgagacatcactcaccattgagggcatcatttatgtgctggatccagggttctgtaagcagaagagctacaacccccgcacaggcatggaatcgctcactgtcacaccctgcagcaaggcctcagccaatcagcgagctggcagggcaggtcgggtggctgcagggaagtgcttccgcctgtataccgcctgggcctatcagcacgagcttgaggaaaccacagtgcctgagatccagaggaccagcttgggcaatgtcgtgttgctgctcaagagcttagggatccatgacctaatgcactttgatttcctggaccctccaccatatgagacactgctgctggctttggagcagctgtatgctctgggagccctcaaccaccttggggagctcaccacgtctggtcgaaagatggcagagctgccggtggaccccatgctgtccaaaatgatcttagcctctgagaagtacagctgttcagaggagatcctgacagtggctgccatgctctctgtcaacaactccatcttctaccgaccaaaggacaaggtcgtccatgctgacaatgcccgtgtcaacttctttctccctggcggtgaccacctggttctgctaaatgtttacacacagtgggctgagagtggttactcttcccagtggtgctatgagaactttgtacagttcagatcgatgcgccgagcccgggatgtgcgggaacagctggaagggctcttggaacgtgtggaagttggtctcagttcctgccagggggactatatccgtgtacgcaaggccatcactgctggttacttttaccacacggcacggttgactcggagtggctaccgcacagtgaaacagcagcagacagtcttcattcatcccaactcctccctctttgagcaacagccacgctggctgctctaccacgaacttgtcttgaccaccaaagagttcatgagacaggtactggagattgagagcagttggcttctggaggtggctccccattattataaggccaaggagctagaagatccccatgctaagaaaatgcccaaaaaaataggcaaaacacgagaagagctagggtaagagaaggacgtaaacagaacctgacaccagctccttttccttctatacattatttaatacctattaaataaaattatttttggaataaagcttgtgggaacatttgggatctagagaaagtga

SEQ ID NO: 139363 - DNA, 3445 bp, Artificial Sequence
  derived and/or modified sequence
ggccgaaaaagtacagccccttccgggctccgcggtacgggaagacagctttgggatgtcggaagatcctagaggtcccaaggtagctgacttgcgaagctgaggctccagccgagggctccaggcctctgaccggcccagcagtgagcgcggctgcccgacgcttcagggccgggagcagggagcgtgagtcgccatggcgacgccggcgggtctggagcgctgggttcaggacgagctgcactcggtgttggggctgagcgagcggcacgtcgcccagtttctgatcggtaccgcacagcgctgcacctctgccgaggagttcgtgcagcgcctacgagacactgataccttggatctcagtgggccggcccgggacttcgccctgagactctggaacaaggtaccacgaaaggcagtggtagaaaagccagctcgggcagcagagcgagaggcccgggccctgctggagaagaaccgatcttataggttactggaagacagtgaagagagcagtgaggagactgtgagtagggctggaagcagcctccagaagaaacgtaaaaagcggaaacacctcaggaagaagcgtgaggaagaagaggaggaagaggcttctgagaaagggaagaagaaaacaggggggagtaaacagcagacagagaagccagagtcggaagatgagtgggaacggacagagcgtgaacgccttcaggacctggaggagcgtgatgcctttgctgagcgggttcgacagcgggacaaggatcggactcgaaatgtcctggaacggtcagacaagaaggcttatgaagaggctcagaagcgcctcaagatggccgaggaagaccggaaggccatggtccctgagctgcggaagaaatctcgccgagagtacctggctaagcgggagcgagagaagcttgaggacctggaggcggagctggctgatgaggagttcctttttggggacgtggagctgagccggcacgagcggcaggagctcaaatataagcggcgagtgcgggatctcgcccgggagtaccgggcagctggggagcaggagaagctggaggccaccaatcgctaccacatgcccaaggaaacccgaggacagccagcccgagctgtggatctagtggaggaggaatcaggagcccctggggaggagcagcggcgctgggaggaggcgcggcttggggcagcgtccctgaagtttggggcccgagatgctgcctctcaggagcccaagtatcaactggtgctggaggaggaggagaccattgagtttgtccgggccactcagctccagggtgatgaggagccgtcagctccacccacttcaactcaggcccagcagaaagagtccatccaggccgtccgccgcagcctcccggtgttcccatttcgagaggagctcctggctgctattgcaaatcaccaagtcctcatcattgaaggcgagacaggctcagggaagaccacccagatcccgcagtatctctttgaggagggttatacaaacaagggtatgaagattgcctgcacccaaccccggagagtggctgccatgagtgtggccgcccgagtggcccgggagatgggtgtgaagcttgggaatgaggttggctacagcatccgctttgaggactgcacatcagagcgaactgtcctccgctacatgacagatgggatgcttctccgggagttcctctctgagcctgacctggcgagttacagcgtggtgatggtggatgaggcacacgaaaggaccctacacacagacattctctttggattgatcaaggatgttgctcgcttccgacctgagctcaaggtcctggtggcttcagccacaatggacactgcccgtttttccaccttctttgatggcgcccctgtgtttcgaatccccggacgcaggtttcctgtggacatcttctacaccaaggctccagaggctgactacttggaagcttgtgtagtatctgtgttgcagatccatgtgacccagccccctggggatatcctggtgttcctgacaggacaggaggagattgaggctgcctgtgagatgctccaggatcgctgccgccgcctgggctccaaaatccgggagctcctggtgctgcccatttatgccaatctgccctctgacatgcaggcccgtatcttccagcccacaccacctggggcacgaaaggtggttgtggcaacgaacattgctgagacatcactcaccattgagggcatcatttatgtgctggatccagggttctgtaagcagaagagctacaacccccgcacaggcatggaatcgctcactgtcacaccctgcagcaaggcctcagccaatcagcgagctggcagggcaggtcgggtggctgcagggaagtgcttccgcctgtataccgcctgggcctatcagcacgagcttgaggaaaccacagtgcctgagatccagaggaccagcttgggcaatgtcgtgttgctgctcaagagcttagggatccatgacctaatgcactttgatttcctggaccctccaccatatgagacactgctgctggctttggagcagctgtatgctctgggagccctcaaccaccttggggagctcaccacgtctggtcgaaagatggcagagctgccggtggaccccatgctgtccaaaatgatcttagcctctgagaagtacagctgttcagaggagatcctgacagtggctgccatgctctctgtcaacaactccatcttctaccgaccaaaggacaaggtcgtccatgctgacaatgcccgtgtcaacttctttctccctggcggtgaccacctggttctgctaaatgtttacacacagtgggctgagagtggttactcttcccagtggtgctatgagaactttgtacagttcagatcgatgcgccgagcccgggatgtgcgggaacagctggaagggctcttggaacgtgtggaagttggtctcagttcctgccagggggactatatccgtgtacgcaaggccatcactgctggttacttttaccacacggcacggttgactcggagtggctaccgcacagtgaaacagcagcagacagtcttcattcatcccaactcctccctctttgagcaacagccacgctggctgctctaccacgaacttgtcttgaccaccaaagagttcatgagacaggtactggagattgagagcagttggcttctggaggtggctccccattattataaggccaaggagctagaagatccccatgctaagaaaatgcccaaaaaaataggcaaaacacgagaagagctagggtaagagaaggacgtaaacagaacctgacaccagctccttttccttctatacattatttaatacctattaaataaaattatttttggaataaagcttgtgggaacatttgggatctagagaaagtga

SEQ ID NO: 139364 - DNA, 2203 bp, Artificial Sequence
  derived and/or modified sequence
ggccgaaaaagtacagccccttccgggctccgcggtacgggaagacagctttgggatgtcggaagatcctagaggtcccaaggtagctgacttgcgaagctgaggctccagccgagggctccaggcctctgaccggcccagcagtgagcgcggctgcccgacgcttcagggccgggagcagggagcgtgagtcgccatggcgacgccggcgggtctggagcgctgggttcaggacgagctgcactcggtgttggggctgagcgagcggcacgtcgcccagtttctgatcggtaccgcacagcgctgcacctctgccgaggagttcgtgcagcgcctacgagacactgataccttggatctcagtgggccggcccgggacttcgccctgagactctggaacaaggtaccacgaaaggcagtggtagaaaagccagctcgggcagcagagcgagaggcccgggccctgctggagaagaaccgatcttataggttactggaagacagtgaagagagcagtgaggagactgtgagtagggctggaagcagcctccagaagaaacgtaaaaagcggaaacacctcaggaagaagcgtgaggaagaagaggaggaagaggcttctgagaaagggaagaagaaaacaggggggagtaaacagcagacagagaagccagagtcggaagatgagtgggaacggacagagcgtgaacgccttcaggacctggaggagcgtgatgcctttgctgagcgggttcgacagcgggacaaggatcggactcgaaatgtcctggaacggtcagacaagaaggcttatgaagaggctcagaagcgcctcaagatggccgaggaagaccggaaggccatggtccctgagctgcggaagaaatctcgccgagagtacctggctaagcgggagcgagagaagcttgaggacctggaggcggagctggctgatgaggagttcctttttggggacgtggagctgagccggcacgagcggcaggagctcaaatataagcggcgagtgcgggatctcgcccgggagtaccgggcagctggggagcaggagaagctggaggccaccaatcgctaccacatgcccaaggaaacccgaggacagccagcccgagctgtggatctagtggaggaggaatcaggagcccctggggaggagcagcggcgctgggaggaggcgcggcttggggcagcgtccctgaagtttggggcccgagatgctgcctctcaggagcccaagtatcaactggtgctggaggaggaggagaccattgagtttgtccgggccactcagctccagggtgatgaggagccgtcagctccacccacttcaactcaggcccagcagaaagagtccatccaggccgtccgccgcagcctcccggtgttcccatttcgagaggagctcctggctgctattgcaaatcaccaagtcctcatcattgaaggcgagacaggctcagggaagaccacccagatcccgcagtatctctttgaggagggttatacaaacaagggtatgaagattgcctgcacccaaccccggagagtggctgccatgagtgtggccgcccgagtggcccgggagatgggtgtgaagcttgggaatgaggttggctacagcatccgctttgaggactgcacatcagagcgaactgtcctccgctacatgacagatgggatgcttctccgggagttcctctctgagcctgacctggcgagttacagcgtggtgatggtggatgaggcacacgaaaggaccctacacacagacattctctttggattgatcaaggatgttgctcgcttccgacctgagctcaaggtcctggtggcttcagccacaatggacactgcccgtttttccaccttctttgatgacgcccctgtgtttcgaatccccggacgcaggtttcctgtggacatcttctacaccaaggctccagaggctgactacttggaagcttgtgtagtatctgtgttgcagatccatgtgacccagccccctggggatatcctggtgttcctgacaggacaggaggagattgaggctgcctgtgagatgctccaggatcgctgccgccgcctgggctccaaaatccgggagctcctggtgctgcccatttatgccaatctgccctctgacatgcaggcccgtatcttccagcccacaccacctggggcacgaaag

SEQ ID NO: 139365 - DNA, 576 bp, Artificial Sequence
  derived and/or modified sequence
gaagatcctagaggtcccaaggtagctgacttgcgaagctgaggctccagccgagggctccaggcctctgaccggcccagcagtgagcgcggctgcccgacgcttcagggccgggagcagggagcgtgagtcgccatggcgacgccggcgggtctggagcgctgggttcaggacgagctgcactcggtgttggggctgagcgagcggcacgtcgcccagtttctgatcggtaccgcacagcgctgcacctctgccgaggagttcgtgcagcgcctacgagacactgataccttggatctcagtgggccggcccgggacttcgccctgagactctggaacaaggtaccacgaaaggcagtggtagaaaagccagctcgggcagcagagcgagaggcccgggccctgctggagaagaaccgatcttataggttactggaagacagtgaagagagcagtgaggagactgtgagtagggctggaagcagcctccagaagaaacgtaaaaagcggaaacacctcaggaagaagcgtgaggaagaagaggaggaagaggcttctgagaaagggaagaagaaa

SEQ ID NO: 139366 - protein, 913 aa, Artificial Sequence
  derived and/or modified sequence
MMSQSSGSGDGNDDEATTSKDGGFSSPSPSAAAAAQEVRSATDGNTSTTPPTSAKKRKLNSSSSSSSNSSNEREDFDSTSSSSSTPPLQPRDSASPSTSSFCLGVSVAASSHVPIQKKLRFEDTLEFVGFDAKMAEESSSSSSSSSPTAATSQQQQLKNKSILISSVASVHHANGLAKSSTTVSSFANSKPGSAKKLVIKNFKDKPKLPENYTDETWQKLKEAVEAIQNSTSIKYNLEELYQAVENLCSYKISANLYKQLRQICEDHIKAQIHQFREDSLDSVLFLKKIDRCWQNHCRQMIMIRSIFLFLDRTYVLQNSMLPSIWDMGLELFRAHIISDQKVQNKTIDGILLLIERERNGEAIDRSLLRSLLSMLSDLQIYQDSFEQRFLEETNRLYAAEGQKLMQEREVPEYLHHVNKRLEEEADRLITYLDQTTQKSLIATVEKQLLGEHLTAILQKGLNNLLDENRIQDLSLLYQLFSRVRGGVQVLLQQWIEYIKAFGSTIVINPEKDKTMVQELLDFKDKVDHIIDICFLKNEKFINAMKEAFETFINKRPNKPAELIAKYVDSKLRAGNKEATDEELEKMLDKIMIIFRFIYGKDVFEAFYKKDLAKRLLVGKSASVDAEKSMLSKLKHECGAAFTSKLEGMFKDMELSKDIMIQFKQYMQNQNVPGNIELTVNILTMGYWPTYVPMEVHLPPEMVKLQEIFKTFYLGKHSGRKLQWQSTLGHCVLKAEFKEGKKELQVSLFQTLVLLMFNEGEEFSLEEIKQATGIEDGELRRTLQSLACGKARVLAKNPKGKDIEDGDKFICNDDFKHKLFRIKINQIQMKETVEEQASTTERVFQDRQYQIDAAIVRIMKMRKTLSHNLLVSEVYNQLKFPVKPADLKKRIESLIDRDYMERDKENPNQYNYIA

SEQ ID NO: 139367 - DNA, 2742 bp, Artificial Sequence
  derived and/or modified sequence
atgatgtcacagagcagcgggtccggcgatggaaacgatgatgaagccacaacttccaaagacgggggcttctcctcccctagtcccagcgccgctgcagccgcgcaggaagtcagaagcgccactgatggaaacacgtctaccactccccctactagtgctaaaaagaggaaacttaattcctccagcagcagcagtagcaactcgagtaacgagcgagaggatttcgactctacctccagttcatcttccactccacctctacaacctcgtgacagtgcctctccaagcacgtcctccttctgcctgggagtgagtgtggccgcgtcttcccacgtccctatccagaagaagctgagattcgaggacacgctggagtttgtgggcttcgacgccaaaatggcggaggaaagttcgagctcctcaagcagctcttcccccacggcggctacttcacagcagcagcaactaaaaaacaagtctatactgatttcgagcgttgcatcggtgcatcacgcgaatgggttagcaaaatcatcgaccacagtgtctagcttcgccaacagtaaaccaggaagcgccaaaaaactcgttatcaaaaattttaaggataaaccaaagctgccggaaaattataccgacgagacctggcagaagctcaaggaggctgtcgaagccatacagaattccacaagcatcaagtacaacttggaggagctgtaccaagcagtggaaaacctgtgttcttataaaatttccgccaatctttacaaacagctgagacagatctgcgaggaccacatcaaggcgcagatccaccaatttcgggaggacagcctggattcagtgttattcttgaagaagattgaccgatgctggcaaaaccactgccgccagatgattatgatccggtccatattcttgtttctagacaggacatatgtgctgcagaatagcatgctcccatccatctgggatatggggctggagctgttccgggcccatattatcagcgaccaaaaggtgcagaataagaccattgacggcattcttctgctgattgagagggagagaaatggtgaggccattgataggagcctacttagaagcctcttgagcatgctgtcagatctacagatataccaggactcgttcgagcaacgcttcctggaagagactaatcgactgtacgccgcggagggccaaaagctcatgcaagagcgtgaggtgccagagtacctgcaccatgtgaataaacgcctggaggaagaggccgatcggttaatcacatatctggaccaaaccactcagaaatccctcattgctacggtggagaagcagctcctgggggaacatcttacagccattctccagaaaggcttgaacaatctgttggatgagaaccggatccaggacctgtccttgctttatcaattgttcagcagggtgcgtgggggtgtacaggttctgctacagcagtggatcgagtacattaaggcttttggatctacgatcgtcattaacccagagaaagataagaccatggtccaggaattgctggatttcaaggacaaggtggaccacattattgatatttgtttcctgaagaacgagaaattcataaatgcaatgaaggaagcttttgaaacttttataaacaaacgcccgaataagcccgccgaactgattgctaagtatgtcgactcaaaactcagggccggaaacaaggaagcaaccgacgaggaacttgaaaaaatgttggacaaaatcatgatcatctttcggttcatctatggtaaggatgtatttgaggccttctataaaaaggatttggctaaaagactgttagtgggcaaatcagctagcgttgacgcagaaaagtccatgctaagtaaactcaaacatgagtgcggcgctgcctttacaagtaagctggagggcatgttcaaagacatggaattaagtaaggacattatgatccaatttaaacaatacatgcagaaccagaatgtccccggcaatatcgagctaactgtcaacatcttgactatgggatattggcctacctatgtacccatggaagtgcacctgccaccagagatggtcaaattgcaggaaatcttcaagactttttacttgggaaagcactccgggcgcaaacttcaatggcagtccacactgggccattgcgtactgaaggcggagttcaaggaagggaaaaaagaactgcaggtcagcctatttcagactctggtgctcctgatgttcaacgaaggagaagaattcagcttggaagagattaaacaggcaaccggtattgaggatggggagctgcgaaggactcttcagtcactggcctgtggaaaagcccgggtcctggcgaaaaaccccaaggggaaggacatagaagatggggataagtttatctgcaatgatgactttaagcataaactctttcgaataaaaataaaccaaattcagatgaaggagaccgtagaggagcaggctagcacaaccgagcgagtctttcaagaccgacagtaccagatagacgccgccattgtcagaattatgaagatgaggaaaacattgtcgcacaatctgcttgtcagtgaggtgtataatcaactgaagtttcctgtcaagccagccgacctcaaaaagagaattgagagccttattgacagggattacatggaaagggacaaggagaatccaaaccagtataactatatagcttag

SEQ ID NO: 139368 - DNA, 2742 bp, Artificial Sequence
  derived and/or modified sequence
atgatgagccagagcagcggcagcggagatggaaatgatgatgaggccaccaccagcaaggatggcggcttcagcagccccagccccagcgctgctgctgctgcccaggaggtgcgcagcgccacagatggcaacaccagcaccaccccacccaccagcgccaagaagaggaagctgaacagcagcagcagcagcagcagcaacagcagcaatgaaagagaggactttgacagcaccagcagcagcagcagcaccccacccctgcagccccgggacagcgccagccccagcaccagcagcttctgcctgggcgtgtctgtggccgccagcagccacgtgcccatccagaagaagctgcgctttgaggacaccctggagtttgtgggctttgatgccaagatggccgaggagagcagcagcagcagcagcagcagcagccccacagctgccaccagccagcagcagcagctgaagaacaagagcatcctgatcagctctgtggcctctgtgcaccacgccaacggcctggccaagagcagcaccaccgtgtcctcctttgccaacagcaagccaggcagcgccaagaagctggtgatcaagaacttcaaggacaagcccaagctgcctgagaactacacagatgagacctggcagaagctgaaggaggccgtggaggccatccagaacagcaccagcatcaagtacaacctggaggagctgtaccaggccgtggagaacctgtgcagctacaagatcagcgccaacctgtacaagcagctgcggcagatctgtgaggaccacatcaaggcccagatccaccagttccgggaggacagcctggacagcgtgctcttcctgaagaagattgaccgctgctggcagaaccactgccggcagatgatcatgatccgcagcatcttcctgttcctggacaggacctacgtgctgcagaacagcatgctgcccagcatctgggacatgggcctggagctgttccgggcccacatcatcagtgaccagaaggtgcagaacaagaccattgatggcatcctgctgctgattgaaagagaaagaaatggagaggccatcgacaggagcctgctgcggagcctgctgtccatgctgagtgacctgcagatctaccaggacagctttgagcagcgcttcctggaggagaccaaccggctgtatgctgctgagggccagaagctgatgcaggagcgggaggtgcctgagtacctgcaccacgtgaacaagaggctggaggaggaggccgacaggctcatcacctacctggaccagaccacccagaagagcctgattgccaccgtggagaagcagctgctgggggagcacctgacagccatcctgcagaagggcctgaacaacctgctggatgaaaatcgcatccaggacctgagcctgctgtaccagctgttcagccgggtgcggggcggcgtgcaggtgctgctgcagcagtggattgagtacatcaaggccttcggcagcaccatcgtcatcaaccctgagaaggacaagaccatggtgcaggagctgctggacttcaaggacaaggtggaccacatcatcgacatctgcttcctgaagaatgagaagttcatcaatgccatgaaggaggcctttgagaccttcatcaacaagaggcccaacaagccagctgagctgattgccaagtatgtggacagcaagctgcgggccggcaacaaggaggccacagatgaggagctggagaagatgctggacaagatcatgatcatcttccgcttcatctacggcaaggatgtgtttgaggccttctacaagaaggacctggccaagaggctgctggtgggcaagagcgcctctgtggatgctgagaagtccatgctgagcaagctgaagcatgaatgtggggccgccttcaccagcaagctggagggcatgttcaaggacatggagctgagcaaggacatcatgatccagttcaagcagtacatgcagaaccagaatgtgcccggcaacatcgagctgactgtgaacatcctgaccatgggctactggcccacctacgtgcccatggaggtgcacctgcccccagagatggtgaagctgcaggagatcttcaagaccttctacctgggcaagcacagcggcaggaagctgcagtggcagagcaccctgggccactgtgtgctgaaggccgagttcaaggagggcaagaaggagctgcaggtgtccctcttccagaccctggtgctgctgatgtttaatgaaggagaggagttcagcctggaggagatcaagcaggccactggaattgaagatggagagctgcggaggaccctgcagagcctggcctgtgggaaggcccgggtgctggccaagaaccccaagggcaaggacattgaagatggagacaagttcatctgcaatgatgacttcaagcacaagctgttccgcatcaagatcaaccagatccagatgaaggagaccgtggaggagcaggccagcaccacagagagggtcttccaggaccggcagtaccagattgatgctgccatcgtgcgcatcatgaagatgaggaagaccctgagccacaacctgctggtgtctgaggtgtacaaccagctgaagtttcctgtgaagccagctgacctgaagaagagaattgagagcctgattgaccgggactacatggagcgggacaaggagaaccccaaccagtacaactacatcgcctag

SEQ ID NO: 139369 - DNA, 2742 bp, Artificial Sequence
  derived and/or modified sequence
atgatgagccagagcagcggcagcggcgacggcaacgacgacgaggcaaccacctccaaagacgggggattttcaagtcccagtccttccgccgctgccgctgcccaagaagtgaggtcagctacggatgggaacacatccaccacaccccccacttccgccaagaaacgcaagctcaattcctcttcgtcctcatcttccaacagttccaatgagcgggaggacttcgattctaccagttcgtcctcatcaacgcctcccttgcagccaagggacagcgcttctcccagcaccagcagcttctgtttgggtgtgtcagtcgccgctagtagccacgttcctattcaaaaaaagctgagatttgaggacaccctcgaattcgtcggttttgatgctaaaatggccgaagagtccagttcctcaagtagcagtagcagtcctaccgccgctaccagccaacagcaacagttgaaaaataaaagtatcctgatttccagcgtggcttcagtgcaccacgccaatggcctggcaaaatcgtctacgacagtatctagtttcgcaaacagtaaaccaggctctgcgaaaaaactggtaataaaaaactttaaggacaaaccaaagctgcccgaaaactacactgacgagacgtggcaaaagcttaaagaggccgtggaggcaatccagaatagcacttcaataaagtacaatctcgaagagctatatcaggccgtcgaaaacctatgtagctacaaaatctccgctaacctctataagcagcttcgtcaaatttgtgaagaccacatcaaagctcagatccatcaatttcgcgaggatagcttggattccgtgctgttcctcaagaaaattgatcggtgctggcagaaccactgtcggcagatgattatgatacgttccatctttctctttcttgatcgaacgtatgtgctgcaaaatagtatgctaccttcaatatgggacatgggtctcgagctgtttagagcccatattatctctgaccaaaaagttcagaacaaaactatcgatggaatccttctactgatagagagggagagaaacggagaagccatagaccggagcctcttacggagcctgctgagtatgctgtccgacctacagatctatcaggactcttttgagcaacgattcctggaagagactaatcgcctgtacgctgccgaggggcagaagctaatgcaggagagagaagttccagagtatctccatcacgtgaacaagcggctcgaagaggaagctgatagactgatcacatacctggaccagaccactcaaaagtcattgattgcgacagtggagaagcagctacttggcgaacatctaacagcgatcttgcagaaggggctgaacaatctgctggacgaaaatagaatccaggacctcagtctactctaccaattattcagcagggtccgcggtggcgtccaggtattgctgcaacaatggatcgagtatattaaagctttcggctcaaccattgttatcaatcccgaaaaggacaagactatggtccaggaacttctagacttcaaggataaggttgaccatattatcgatatttgcttcctaaagaacgagaagttcataaacgccatgaaagaagcctttgagaccttcatcaacaagaggcctaacaagccggctgaattgatcgcaaaatatgtggatagcaagcttcgggcaggaaataaagaggcaacagatgaagagctagaaaaaatgctggacaaaattatgataatatttcggttcatctatggaaaggatgtcttcgaggcattctataagaaggaccttgcgaaacgtcttctggttgggaaatctgctagcgtggatgctgagaaatccatgctgtccaagctgaagcatgagtgcggggcggccttcacatccaaacttgaggggatgttcaaggatatggagctgtcaaaagatattatgatccaattcaagcagtacatgcagaaccagaacgtcccaggcaacatcgagttaaccgtgaacattctgaccatgggctattggccgacctatgtccccatggaagtccatctgccacctgaaatggtgaagctccaggaaatctttaagaccttctacctggggaagcattctggccgaaaactccaatggcagtcaactctcggccactgtgtgttaaaggccgaattcaaagaaggtaagaaggaactgcaagtgagcctgttccagaccctcgtgcttttaatgtttaacgagggagaggagttcagtctggaagagattaagcaggcaaccggtattgaggacggcgaactcaggcgcacactgcaatccttggcatgcggaaaggcgcgcgtgttggccaagaaccctaagggcaaggatatagaagatggagataaattcatatgtaacgatgacttcaaacataaattgtttcggattaagatcaatcagattcagatgaaggagactgtggaagaacaggcttctacaaccgaacgggtatttcaggataggcagtaccaaattgacgccgccatcgtgcgcattatgaaaatgcgcaagacactgtctcacaatctcttggtcagcgaagtgtataatcaactgaagttccccgtaaagcccgcagacctaaaaaagcgaatcgaaagcctaatcgacagggactatatggagagggataaagagaaccctaaccagtacaattacatagcctag

SEQ ID NO: 139370 - DNA, 2742 bp, Artificial Sequence
  derived and/or modified sequence
atgatgagccaatcctccggctcaggtgacggaaatgatgatgaggcaacgactagcaaagatggtggcttttcctccccttctccctcggctgccgcagcggctcaggaggtgcggtctgccactgacgggaacacctctacaactccgcctacttccgccaagaaaaggaaactcaattcttcctcatcaagttcctccaatagcagcaatgagagagaggactttgattctacatctagcagtagcagtacccccccacttcagccaagggatagcgccagtccctccacctcctccttttgcttgggagtcagcgtcgccgcttcctcgcatgtgccaatccagaagaaacttcggttcgaagatactctcgaattcgtggggtttgacgctaaaatggccgaggagagtagttcatctagttcttcctcttcacctaccgccgcaacgtcccagcagcagcagttgaaaaataagtcaatactgatttcctccgtcgcctccgttcaccatgcaaacggtctcgccaagtcgtcgacgaccgtgagcagttttgcaaactcaaagcctgggagcgcaaagaaattggttatcaagaacttcaaggataagccaaaactgccagagaattatacagatgaaacatggcagaaattaaaagaggcggtagaggctatccaaaatagcacttctatcaagtataacctagaggaactttaccaggctgttgagaatttatgttcctacaagatctccgccaatttgtataagcagctgcgtcagatctgcgaggaccacattaaagcacagatccatcagtttagagaggatagcttggatagcgttctgtttctcaagaaaatcgaccgatgttggcaaaatcactgtcgacagatgatcatgatccggtcaatttttctcttcctggacaggacttacgtgctgcagaattctatgctgccttcaatctgggacatgggactggaactttttagagcgcacattatatctgaccagaaggttcaaaacaagacaatagatggtattctgttgctcatcgagagagagcggaatggagaggccattgataggagtctactgcggtcgcttctctctatgctatcagacctgcagatttaccaggattcatttgagcagcggtttctagaggaaaccaacagactatatgccgcagaagggcagaagcttatgcaggagcgggaagtacctgagtatttgcaccacgtgaataagcggttagaggaagaagccgacaggttaattacgtatctcgatcaaaccacccagaaatctttgatcgccaccgtggagaaacaactcttgggagagcacctcacagctatcttacagaaagggctcaacaatcttttggacgagaaccgcatccaggacctcagcctcttgtaccaactcttttctcgtgtccgaggcggagttcaggttctgttgcagcagtggatcgaatacatcaaagcctttggtagcacgattgtcatcaacccagagaaggataagaccatggttcaggaacttctggatttcaaggataaagtcgatcacattattgacatatgtttccttaaaaacgagaaatttattaatgccatgaaagaggcgtttgaaacatttatcaataagcgtccgaacaagcctgccgaactgattgctaagtacgtggacagtaagctccgcgctggaaacaaggaagctactgacgaggaactcgaaaagatgctggacaagattatgataattttccggttcatttatggcaaggacgtgtttgaagctttctacaaaaaagaccttgcaaaaaggctgctggtgggaaagtcagcttctgtcgacgccgaaaagagtatgctgtccaaattgaagcacgaatgtggagccgcattcacctcaaagctagaagggatgtttaaagatatggaactctccaaggacattatgattcagtttaaacagtacatgcaaaatcagaacgtgcccggtaatatcgagttaacagttaacatcctgactatgggttactggcctacatacgtgcctatggaggtacacttgcccccagagatggttaagcttcaggaaatcttcaaaaccttttaccttgggaagcactccggacgtaagctgcaatggcagtctactctgggccattgtgtgctcaaggctgagtttaaggaaggtaaaaaagaactgcaggtgagtctgtttcagaccttggtgctgctgatgttcaatgagggggaggaattcagcctagaggaaatcaaacaggcaaccgggatcgaagacggcgagctcagacgcacactgcaatctctggcttgtgggaaggctcgggttctggctaagaatccgaagggcaaggacattgaggacggagataaattcatttgcaatgacgacttcaagcacaagcttttccgaatcaagatcaaccagatccagatgaaagagactgttgaggagcaggctagcaccaccgagcgcgtgtttcaggaccgacagtatcagatagacgctgccatagtgaggattatgaagatgcgcaagaccctctctcataatttacttgttagcgaggtgtacaatcagctcaagttcccggtcaagcctgctgaccttaagaagcgaatcgagtctttgattgacagagactacatggagcgagataaagaaaatcccaatcagtacaattacatcgcgtag

SEQ ID NO: 139371 - DNA, 3264 bp, Artificial Sequence
  derived and/or modified sequence
agttcagtttagaaactgccagtcttggtatagaacaacctaggcttatctgtttaagtcccataggtagtattattagagaataacccaggctttgggaactgtataactctgagatcgtttgaaattttcgttttgtttttcttttggctccaaccaggcctctgttgttagactaatggggtttcccctgcagagattggtcagccctgcagtctatcatcccggaaggtgttaaatacacatgaaagccagcctcggcgggcagaacctagcccgccgaaagggcgggcattgctaaagtgttttcaaaaggtcttcccaatcctctgctttagacagctcggaccttagatagaagaacacaacggatcctccagtgactgacgacccaaaggacggatgatgtcacagtcatctggatcaggagatgggaatgatgatgaggctactacctctaaagacggtggtttttcttcccccagtccctcagctgctgctgctgctcaggaggtcagatctgccactgatggtaataccagcaccactccgcccacctctgccaagaagagaaagttaaacagcagcagcagtagcagcagtaacagtagtaacgagagagaagactttgattccacctcttcctcctcttccactcctcctttacaacccagggattcggcatccccttcaacctcgtccttctgcctgggggtttcagtggctgcttccagccacgtaccgatacagaagaagctgcgttttgaagacaccctggagtttgtagggtttgatgcgaagatggctgaggaatcctcctcctcctcctcctcatcttcaccaactgctgcaacatctcagcagcagcaacttaaaaataagagtatattaatctcttctgtggcttcggtgcatcatgcaaacggcctagccaaatcttctaccaccgtctctagctttgctaacagcaaacctggctctgctaagaagttagtgatcaagaactttaaagataagcctaaattaccagaaaactacacagatgaaacctggcaaaaactgaaagaagcagtggaagctattcagaatagtacttcaattaagtacaatttagaagaactctaccaggctgtagaaaatctctgttcttacaagatttctgcaaacttgtacaaacagctgagacagatctgcgaagatcacatcaaagcacagattcatcaattcagagaggattcattggatagcgttctttttttaaagaagattgatagatgctggcaaaaccattgcagacaaatgatcatgatcaggagcatttttttgtttctggatagaacttacgttcttcagaattcaatgctaccctccatttgggacatgggactggagttatttagggctcatattataagtgatcagaaagtgcagaataagacaattgatggcattcttctcttgattgagagggaaaggaatggtgaagcaattgatagaagtttacttcgaagccttttaagcatgctgtctgatttgcaaatttatcaagattcttttgaacaacgatttttggaagaaactaaccggctctatgcagctgaaggccaaaaattaatgcaagaaagagaggttcctgaatatctacatcatgttaacaaacgtctagaagaagaagcagacagacttattacttacttagatcagaccacccagaagtcattaattgctactgtagaaaaacaacttctaggtgaacacttaacagcaattcttcagaaaggtttaaataacctccttgatgaaaaccgaattcaagatttgtctcttctgtatcagctcttcagtagagttcgaggtggagttcaggttcttttgcagcagtggatcgaatatatcaaggcatttggcagcactattgtaattaatcctgaaaaagataaaaccatggttcaagaattgctggattttaaagataaggttgaccatataattgatatctgctttctgaagaatgagaaatttatcaatgccatgaaagaagcatttgaaacgttcattaacaaaagaccaaataaaccagctgaacttatagctaagtatgtagattcaaaacttcgtgcaggcaacaaagaagctacagatgaagaacttgagaaaatgttggataaaattatgatcatatttagatttatctatggcaaggatgtttttgaggccttctataagaaagatttagccaagcgcctgttagtcggaaagagtgcatctgtagatgctgaaaaatcaatgctgtccaaacttaaacatgaatgcggagctgctttcaccagcaaacttgaaggaatgtttaaagacatggaactttctaaagacatcatgattcagttcaaacagtatatgcagaatcagaatgttccgggaaatattgagttaactgtgaatatcctgacaatgggctattggccgacatatgtgcctatggaagttcatttaccaccagagatggtaaaacttcaggagattttcaagacattttacctaggcaaacatagtggcaggaaacttcagtggcagtcaaccctaggacactgtgtgttaaaagcagaatttaaagagggtaaaaaggaactccaggtctctctttttcaaacactggtgctgctaatgtttaatgagggagaggagttcagtttagaagagatcaagcaggcaactggaatagaggatggagagttaaggagaacactgcagtcattagcctgtggcaaagctagagttctggcgaaaaatccaaagggcaaagacattgaagatggtgacaagttcatttgtaatgatgatttcaaacataaacttttcaggataaagatcaatcaaatccagatgaaagaaacggttgaagaacaagcaagcactacagaaagagtatttcaagacagacagtatcaaattgatgctgcaattgttcgaattatgaagatgagaaagacacttagccacaatctccttgtttcagaagtgtacaaccagttgaaatttccagtaaagcctgctgatcttaagaagagaatagaatctttaattgaccgggactacatggaaagagataaagaaaatccaaaccagtacaactatattgcatagaatgttggccttgcagcatttggtgtcatatgcagtagccagtggataaactaacctgttgattcaatattatttgactccttttttactaccgatgaccaaatgaagcagtgtaattaa

SEQ ID NO: 139372 - DNA, 2742 bp, Artificial Sequence
  derived and/or modified sequence
atgatgagccagagcagcggcagcggcgacggcaacgacgacgaggccaccaccagcaaggacggcggcttcagcagccccagccccagcgccgccgccgccgcccaggaggtgagaagcgccaccgacggcaacaccagcaccaccccccccaccagcgccaagaagagaaagctgaacagcagcagcagcagcagcagcaacagcagcaacgagagagaggacttcgacagcaccagcagcagcagcagcaccccccccctgcagcccagagacagcgccagccccagcaccagcagcttctgcctgggcgtgagcgtggccgccagcagccacgtgcccatccagaagaagctgagattcgaggacaccctggagttcgtgggcttcgacgccaagatggccgaggagagcagcagcagcagcagcagcagcagccccaccgccgccaccagccagcagcagcagctgaagaacaagagcatcctgatcagcagcgtggccagcgtgcaccacgccaacggcctggccaagagcagcaccaccgtgagcagcttcgccaacagcaagcccggcagcgccaagaagctggtgatcaagaacttcaaggacaagcccaagctgcccgagaactacaccgacgagacctggcagaagctgaaggaggccgtggaggccatccagaacagcaccagcatcaagtacaacctggaggagctgtaccaggccgtggagaacctgtgcagctacaagatcagcgccaacctgtacaagcagctgagacagatctgcgaggaccacatcaaggcccagatccaccagttcagagaggacagcctggacagcgtgctgttcctgaagaagatcgacagatgctggcagaaccactgcagacagatgatcatgatcagaagcatcttcctgttcctggacagaacctacgtgctgcagaacagcatgctgcccagcatctgggacatgggcctggagctgttcagagcccacatcatcagcgaccagaaggtgcagaacaagaccatcgacggcatcctgctgctgatcgagagagagagaaacggcgaggccatcgacagaagcctgctgagaagcctgctgagcatgctgagcgacctgcagatctaccaggacagcttcgagcagagattcctggaggagaccaacagactgtacgccgccgagggccagaagctgatgcaggagagagaggtgcccgagtacctgcaccacgtgaacaagagactggaggaggaggccgacagactgatcacctacctggaccagaccacccagaagagcctgatcgccaccgtggagaagcagctgctgggcgagcacctgaccgccatcctgcagaagggcctgaacaacctgctggacgagaacagaatccaggacctgagcctgctgtaccagctgttcagcagagtgagaggcggcgtgcaggtgctgctgcagcagtggatcgagtacatcaaggccttcggcagcaccatcgtgatcaaccccgagaaggacaagaccatggtgcaggagctgctggacttcaaggacaaggtggaccacatcatcgacatctgcttcctgaagaacgagaagttcatcaacgccatgaaggaggccttcgagaccttcatcaacaagagacccaacaagcccgccgagctgatcgccaagtacgtggacagcaagctgagagccggcaacaaggaggccaccgacgaggagctggagaagatgctggacaagatcatgatcatcttcagattcatctacggcaaggacgtgttcgaggccttctacaagaaggacctggccaagagactgctggtgggcaagagcgccagcgtggacgccgagaagagcatgctgagcaagctgaagcacgagtgcggcgccgccttcaccagcaagctggagggcatgttcaaggacatggagctgagcaaggacatcatgatccagttcaagcagtacatgcagaaccagaacgtgcccggcaacatcgagctgaccgtgaacatcctgaccatgggctactggcccacctacgtgcccatggaggtgcacctgccccccgagatggtgaagctgcaggagatcttcaagaccttctacctgggcaagcacagcggcagaaagctgcagtggcagagcaccctgggccactgcgtgctgaaggccgagttcaaggagggcaagaaggagctgcaggtgagcctgttccagaccctggtgctgctgatgttcaacgagggcgaggagttcagcctggaggagatcaagcaggccaccggcatcgaggacggcgagctgagaagaaccctgcagagcctggcctgcggcaaggccagagtgctggccaagaaccccaagggcaaggacatcgaggacggcgacaagttcatctgcaacgacgacttcaagcacaagctgttcagaatcaagatcaaccagatccagatgaaggagaccgtggaggagcaggccagcaccaccgagagagtgttccaggacagacagtaccagatcgacgccgccatcgtgagaatcatgaagatgagaaagaccctgagccacaacctgctggtgagcgaggtgtacaaccagctgaagttccccgtgaagcccgccgacctgaagaagagaatcgagagcctgatcgacagagactacatggagagagacaaggagaaccccaaccagtacaactacatcgcctag

SEQ ID NO: 139373 - protein, 768 aa, Artificial Sequence
  derived and/or modified sequence
MSNLSKGTGSRKDTKMRIRAFPMTMDEKYVNSIWDLLKNAIQEIQRKNNSGLSFEELYRNAYTMVLHKHGEKLYTGLREVVTEHLINKVREDVLNSLNNNFLQTLNQAWNDHQTAMVMIRDILMYMDRVYVQQNNVENVYNLGLIIFRDQVVRYGCIRDHLRQTLLDMIARERKGEVVDRGAIRNACQMLMILGLEGRSVYEEDFEAPFLEMSAEFFQMESQKFLAENSASVYIKKVEARINEEIERVMHCLDKSTEEPIVKVVERELISKHMKTIVEMENSGLVHMLKNGKTEDLGCMYKLFSRVPNGLKTMCECMSSYLREQGKALVSEEGEGKNPVDYIQGLLDLKSRFDRFLLESFNNDRLFKQTIAGDFEYFLNLNSRSPEYLSLFIDDKLKKGVKGLTEQEVETILDKAMVLFRFMQEKDVFERYYKQHLARRLLTNKSVSDDSEKNMISKLKTECGCQFTSKLEGMFRDMSISNTTMDEFRQHLQATGVSLGGVDLTVRVLTTGYWPTQSATPKCNIPPAPRHAFEIFRRFYLAKHSGRQLTLQHHMGSADLNATFYGPVKKEDGSEVGVGGAQVTGSNTRKHILQVSTFQMTILMLFNNREKYTFEEIQQETDIPERELVRALQSLACGKPTQRVLTKEPKSKEIENGHIFTVNDQFTSKLHRVKIQTVAAKQGESDPERKETRQKVDDDRKHEIEAAIVRIMKSRKKMQHNVLVAEVTQQLKARFLPSPVVIKKRIEGLIEREYLARTPEDRKVYTYVA

SEQ ID NO: 139374 - protein, 744 aa, Artificial Sequence
  derived and/or modified sequence
MDEKYVNSIWDLLKNAIQEIQRKNNSGLSFEELYRNAYTMVLHKHGEKLYTGLREVVTEHLINKVREDVLNSLNNNFLQTLNQAWNDHQTAMVMIRDILMYMDRVYVQQNNVENVYNLGLIIFRDQVVRYGCIRDHLRQTLLDMIARERKGEVVDRGAIRNACQMLMILGLEGRSVYEEDFEAPFLEMSAEFFQMESQKFLAENSASVYIKKVEARINEEIERVMHCLDKSTEEPIVKVVERELISKHMKTIVEMENSGLVHMLKNGKTEDLGCMYKLFSRVPNGLKTMCECMSSYLREQGKALVSEEGEGKNPVDYIQGLLDLKSRFDRFLLESFNNDRLFKQTIAGDFEYFLNLNSRSPEYLSLFIDDKLKKGVKGLTEQEVETILDKAMVLFRFMQEKDVFERYYKQHLARRLLTNKSVSDDSEKNMISKLKTECGCQFTSKLEGMFRDMSISNTTMDEFRQHLQATGVSLGGVDLTVRVLTTGYWPTQSATPKCNIPPAPRHAFEIFRRFYLAKHSGRQLTLQHHMGSADLNATFYGPVKKEDGSEVGVGGAQVTGSNTRKHILQVSTFQMTILMLFNNREKYTFEEIQQETDIPERELVRALQSLACGKPTQRVLTKEPKSKEIENGHIFTVNDQFTSKLHRVKIQTVAAKQGESDPERKETRQKVDDDRKHEIEAAIVRIMKSRKKMQHNVLVAEVTQQLKARFLPSPVVIKKRIEGLIEREYLARTPEDRKVYTYVA

SEQ ID NO: 139375 - DNA, 2307 bp, Artificial Sequence
  derived and/or modified sequence
atgagcaacctgagcaagggcaccggcagcagaaaggacaccaagatgagaatcagagccttccccatgaccatggacgagaagtacgtgaacagcatctgggacctgctgaagaacgccatccaggagatccagagaaagaacaacagcggcctgagcttcgaggagctgtacagaaacgcctacaccatggtgctgcacaagcacggcgagaagctgtacaccggcctgagagaggtggtgaccgagcacctgatcaacaaggtgagagaggacgtgctgaacagcctgaacaacaacttcctgcagaccctgaaccaggcctggaacgaccaccagaccgccatggtgatgatcagagacatcctgatgtacatggacagagtgtacgtgcagcagaacaacgtggagaacgtgtacaacctgggcctgatcatcttcagagaccaggtggtgagatacggctgcatcagagaccacctgagacagaccctgctggacatgatcgccagagagagaaagggcgaggtggtggacagaggcgccatcagaaacgcctgccagatgctgatgatcctgggcctggagggcagaagcgtgtacgaggaggacttcgaggcccccttcctggagatgagcgccgagttcttccagatggagagccagaagttcctggccgagaacagcgccagcgtgtacatcaagaaggtggaggccagaatcaacgaggagatcgagagagtgatgcactgcctggacaagagcaccgaggagcccatcgtgaaggtggtggagagagagctgatcagcaagcacatgaagaccatcgtggagatggagaacagcggcctggtgcacatgctgaagaacggcaagaccgaggacctgggctgcatgtacaagctgttcagcagagtgcccaacggcctgaagaccatgtgcgagtgcatgagcagctacctgagagagcagggcaaggccctggtgagcgaggagggcgagggcaagaaccccgtggactacatccagggcctgctggacctgaagagcagattcgacagattcctgctggagagcttcaacaacgacagactgttcaagcagaccatcgccggcgacttcgagtacttcctgaacctgaacagcagaagccccgagtacctgagcctgttcatcgacgacaagctgaagaagggcgtgaagggcctgaccgagcaggaggtggagaccatcctggacaaggccatggtgctgttcagattcatgcaggagaaggacgtgttcgagagatactacaagcagcacctggccagaagactgctgaccaacaagagcgtgagcgacgacagcgagaagaacatgatcagcaagctgaagaccgagtgcggctgccagttcaccagcaagctggagggcatgttcagagacatgagcatcagcaacaccaccatggacgagttcagacagcacctgcaggccaccggcgtgagcctgggcggcgtggacctgaccgtgagagtgctgaccaccggctactggcccacccagagcgccacccccaagtgcaacatcccccccgcccccagacacgccttcgagatcttcagaagattctacctggccaagcacagcggcagacagctgaccctgcagcaccacatgggcagcgccgacctgaacgccaccttctacggccccgtgaagaaggaggacggcagcgaggtgggcgtgggcggcgcccaggtgaccggcagcaacaccagaaagcacatcctgcaggtgagcaccttccagatgaccatcctgatgctgttcaacaacagagagaagtacaccttcgaggagatccagcaggagaccgacatccccgagagagagctggtgagagccctgcagagcctggcctgcggcaagcccacccagagagtgctgaccaaggagcccaagagcaaggagatcgagaacggccacatcttcaccgtgaacgaccagttcaccagcaagctgcacagagtgaagatccagaccgtggccgccaagcagggcgagagcgaccccgagagaaaggagaccagacagaaggtggacgacgacagaaagcacgagatcgaggccgccatcgtgagaatcatgaagagcagaaagaagatgcagcacaacgtgctggtggccgaggtgacccagcagctgaaggccagattcctgcccagccccgtggtgatcaagaagagaatcgagggcctgatcgagagagagtacctggccagaacccccgaggacagaaaggtgtacacctacgtggcctag

SEQ ID NO: 139376 - DNA, 6741 bp, Artificial Sequence
  derived and/or modified sequence
cctgcgcagtgagatgtttgtccgtcgccgccgccgccgccatcgcggaggagcgcgataaagggagccgagccggacgtgagggggaccccgcggagccgccgcgccagcgcagccccccagccgcatcggagtcgccagagtccgagccgccgccgccgccgccgccgcccccgccgccgccgcggctgcccaggggccggccagctccccagccctgcccgggggtcgcgccgccgccgcccccagcgtcgcccctagcctgcctgcccgccttaaatgtgacaccggcgtcgcggagcgcgacctgaagccgccgccggggaggggacgagcaccatgtcgaatctgagcaaaggcacgggcagccggaaggacaccaagatgcggatccgggcctttccgatgaccatggatgaaaaatatgtaaacagcatttgggaccttctgaaaaatgcaattcaagaaatccagcgtaagaataacagtggtcttagttttgaggagctctatagaaatgcatatacaatggttttgcataaacatggagaaaagctctacactggactaagagaagttgttaccgaacatctcataaataaggtgcgagaagatgtactaaattcattgaataacaactttcttcaaacgctaaatcaagcttggaatgatcatcaaacagctatggtgatgattagagacatactaatgtacatggaccgtgtgtatgtacaacaaaataatgtggagaacgtctacaatttgggattaattatttttcgagatcaagttgtacgttatgggtgtattagggatcatctacggcaaactctattggatatgattgcaagagagcggaaaggagaagtcgtagacagaggcgcaataagaaatgcttgccagatgttaatgattttaggtctcgaaggaagatcagtctatgaagaagattttgaggctccttttttggaaatgtctgcagaattttttcagatggaaagccagaaatttttagcagaaaatagtgcttcagtatatataaagaaagtagaagctagaattaatgaagaaatagaacgagtgatgcactgccttgacaaatcaacggaagaaccaattgtaaaggtggttgaaagggaactcatttccaagcacatgaagactatagtagaaatggagaattctgggctagtacatatgttgaaaaatggaaagacagaagaccttggttgcatgtacaagttatttagtcgtgtgccaaatggtttgaaaacaatgtgtgagtgtatgagttcctatttgagggagcaaggtaaagctcttgtttctgaagaaggagaaggaaagaatcctgttgactatatccagggcttattggatctgaagagtaggttcgatcgcttcctcctggaatcattcaacaatgaccgtctctttaaacaaactattgcgggtgactttgagtattttctcaacctcaactccaggtctcctgaatacctctcattatttattgatgataagctgaaaaagggagtcaaagggctaacagaacaagaagtagaaacaatattggataaagcaatggtcctttttaggtttatgcaagaaaaagatgtatttgaacgttattataaacaacacttggcaaggagacttctcacaaataaaagtgtttctgatgactctgaaaaaaacatgatatctaagttaaagactgaatgtggatgtcagttcacgtcaaaactggaaggaatgtttagggatatgagcatctcaaacacaacgatggatgaattcaggcaacatctacaggcaactggtgtatctttaggtggtgttgatcttacagtccgggtgctcacgacaggatattggcccactcagtcagccacaccaaagtgcaacatcccaccagcaccaagacatgcttttgagatattcagaaggttctacttagccaaacacagtggtcgacagctcacactccagcatcatatgggttctgcagatctcaatgccacattttatggaccagttaaaaaggaagatggatctgaagttggtgttggaggtgcacaagtaactggctctaatacacggaagcacatattgcaagtttccactttccagatgaccatattaatgctctttaataatagagaaaaatacacatttgaggaaattcagcaagagacagatatccctgaaagagagcttgttagagccctacagtccctcgcctgtggtaaaccaacacagcgggttcttacaaaagaacccaaatcaaaggaaatagaaaatggtcatatatttacagttaatgatcaattcacatccaaactacacagagtcaagattcaaacagttgctgccaaacaaggtgaatccgacccagagaggaaagaaacaaggcagaaagtagacgacgacagaaaacatgagatagaagctgctatagtgcggataatgaaatctagaaagaagatgcagcacaatgttctagtagcggaggtaactcagcagttgaaggcgcgattcttaccaagtccagttgttattaagaaacgtattgaaggacttattgagagagaatatttggcacgaacacctgaggatcgcaaagtatacacatatgtagcataaaatgcgttcagaaatttgatttattcttggactgtactcttcgcatggactgggaagttcttttaaatcattaaatattaagacgaccatctcttctattaaattacagtacatgttctagaccattgagatcaagcctttactccctttgagagtttccaacatcagttgattgagcttcaggctttacaacgtttatccctgtagagatcatctttacagttcctcgggaaaatgtgaatgtgctgcgttttgttttctttactgtatgaaaacaggaaaataaaagagaaatttagaaaatacagctcattacaataaaattgttggatttcatttccccaggtcttcagtgttgatgtaaatgtgttttgtagtgttgcttagcactttgcgcattgtgtaagttgggtaacaaaaatggcaaaagaaatgcagatttcccagttatcttgctctgaagacatttctttagctagtcttatttaattttaaaggtttgataaatatacaaagacccaagcatacaatttgagcatgctgtattctaccacttgcacttactcatcttctagccttatgaccaggaacctttgttttgggctcaagtacacatcctgatttggtttctccctgttgtaatttgagatttcccaaattaagtcttataatgattaggttttgttctgagttatttctagagaaagaaagtattttagtatgtgtaaattgtacaataatttttttgctgttgtactcactgctaatagtggattgtatagggtggtgtttttatttcatttattgtagacaaaaataatgaatttagtatacacatacccactaattcaagtatgtcagagcacaaagttggcagctggttatatttaattcagcccctctgaaaagcacatacagtctatactttgtttataaataccctaggtcctccctgcccctaaatatatattttggtgaagctgtggtgcactattaattttctgtttcaaaatgcaatctaaagatgcaataaatatgatgaccttgatagttttaatgaaatcttcaattcttgcagctgtgttttggaaagtgattaagcaatatttctcaaacctgatgattcttggatatttagctattgtcctccaaagagtcatcgtttcacgttttcaaacatgtgctttgtgctgaagattcttgtcagatatcctgtgcttccagagtatttttatcttcaattttatttaattttgtttcattttgttttcataagacaatgtttcagatatgtaatggggcaaaccactatagatttctgttggatagaaaaatgaaatgttactaataagtttaaattgacccttcgttgactatcagtactgttgatacatttattagaatgtatgtctcagaagatggtttctgtttaaatttatggtcaagttacaacaactgaattctaatatggattaaaaactccacataaatatttttccccatgcgtcttgggttataattttccttttagacttgcaaatatgcttttattgcaattttgtctccatctgtactgtagaattacaagccttgtgctctttatctctacattttccacttctacatgatgcaattaagatgccaatgaaaagtattgtgaacattattctcaggacacttttaccatacttgagtagtactaagtcaggtgtaacatggaaagctaagggtttcaccttctgattttgacataattggaaattttctataatggtaagatgtttataggaaagtaatggtagttcatgtttgagaatttttttattgctttcatttcccagttaaatgatatttaacacctgggaaaacaggacagctcagattgtcgagttagtaaacatgagcgatgtaaaaactttatttgaaatctcctaagtgagacattaaacattttagtgctagtttaagccattaaaagtaaagtttaagtttacgtcattgtctcaagtgtggctgtaaaaatcagatctagagtttagagacatacttgttaactttggagcacaggtttgatatttatgcttctaaatacattaaaacatttctgaattgcagttgaatggttggagattgctggcgatgtgatgctgcactgaaaaaactggtcacacaaaatgtttatatgtttgactgcataagtattattttaggtcataaaggttataacaaaatacatttaacattgctttctttttagcaagaggtcacagatgctattttttctcagtttttaatgctttaatttgaaagaaaaatgcatcctaaccattccatcctgttggtgcagagaaattttggtgatttattagaagacttttaaggagggtggatacatagtttttcaactgcaaaaatcatgtcatctcttcagtaactgttaaagtgtaattctctgccttcattatcaagtccaggacagtgtttattttgaatcgttaacattatttaaagactgaaaattcattgcaattagggaacgcacagcctcacaaaaagtggttgtgattgcaaggattctttatgtcagtgaacttaaaaagggaatgggggaagagatgcatgcctttctaaaggtatgctagagtcacctgtgtagcattgtaattatgtactatcaaacccccaagatgctgatgataggccttctctgtaagaatccttctcatagtgaagcactgttgatgttttgttcaccggatatgttgggtagcagaaaaggcctagaaccagttttaagattatgcctacatctctagaagactagtacactggcatcatcttaggtttctaaatattatttaattccttaatttggaaagcagttttaatgtttacagtttaagatactcattttcagtaactagtgttaaagatttttatctttgcctgtctactgtaacttaagactttcatagaataattttttatagagtatatggtatattgtgtcaatcttggaaggaaagctgttgcatatcaattgtaggtcatgtattttactatatgttgcatagtattttgcattctgtaaatacgaatgttaaaacatttcaggtcagcaaaattagaagtcatttctagtcctcaaagcagaaataattagaaatgttaacatttaagtgcttatcatatgccagatactattctgaatattttatgtatattcattcatttagttgtcatattggctttatgtgacataactgtcattataccagtgttgtccaaggttgctagcaggaaatggcagagccaggagttggacctaggtttaatcctatccatattccatgttacaaattgacatgattttccatattaaaaaattttcatttattttgtacctcattcacatgaatagtaatgtgacaaactaaagttaatacatgaagcattgcaatatggaattttgcacatttttgttagctttacattatttgctgataccaacttttggtaggaaggaaaacagggaaggtgattgctgctattctggaatgtgtccattgaaaagaaaataggcgctttgtctcctacaatcttagagaaagttttacatacttaagtgggtaccacagataggcatgtaccttaaattcaaatctacagttttacaaaatgttttcctttgtgtgcctttcctatgtcaaattagccagaaggaagaagagacgttaagaatggcagataaatttaacaggtaatgatacagagattggccattacgccagctctcaggagaaaaacaactaggatgtcttgaaacccgtgcatttaattttagaaatggcaaatttgtaagcgtgtcatttaagtaatttgatgctcagttttagggtctaagttgacctcgagtgagccatgcaaaaatagctttaaaattatacatgagcagctcaaagtaaacgtgtattttttagtaacaatgaaattgtcaaatttcaagattttaataacaggacagttcaactaataaactttattgcatacaagatttattgcaatgtgggaaaattaaaattctcagtctcagaa

SEQ ID NO: 139377 - DNA, 3147 bp, Artificial Sequence
  derived and/or modified sequence
aggacagagttctcagggtgaaaatgatttaaatggctctggaaaagtagtatacaagagatgtaggggaataatgttttctaaaagaaagctacgttatactgaggtgcatttatcatagtgttattcttaaggtgcctttgttttagctcatatctgtatatttgctaagcttgaaaaagctatatttctttctgacatttatttgatgactgtcgatgagcgttcaagagattctatcattgggcactttcctttgttgatgcatgagggattatactgtgctctgggctgtgttaaatctactgacgttctcatttaatcttcatgacagccctttgagatagatgctgttattgaacccaggacttaattttctcaaggtcacatggcttgtgagtaacaaagctgtggcacaaacctaaggctgtctgacagcaaaacccatgttctctaccagtatactaactatgtttaccaagataatcagtgactgtgatgttactttaccatattagcacaatggaatgtgacattagtccactgatttggactaggttttgggatatataagttctaatcccagctctatgattttggatgaccatggatgaaaaatatgtaaacagcatttgggaccttctgaaaaatgcaattcaagaaatccagcgtaagaataacagtggtcttagttttgaggagctctatagaaatgcatatacaatggttttgcataaacatggagaaaagctctacactggactaagagaagttgttaccgaacatctcataaataaggtgcgagaagatgtactaaattcattgaataacaactttcttcaaacgctaaatcaagcttggaatgatcatcaaacagctatggtgatgattagagacatactaatgtacatggaccgtgtgtatgtacaacaaaataatgtggagaacgtctacaatttgggattaattatttttcgagatcaagttgtacgttatgggtgtattagggatcatctacggcaaactctattggatatgattgcaagagagcggaaaggagaagtcgtagacagaggcgcaataagaaatgcttgccagatgttaatgattttaggtctcgaaggaagatcagtctatgaagaagattttgaggctccttttttggaaatgtctgcagaattttttcagatggaaagccagaaatttttagcagaaaatagtgcttcagtatatataaagaaagtagaagctagaattaatgaagaaatagaacgagtgatgcactgccttgacaaatcaacggaagaaccaattgtaaaggtggttgaaagggaactcatttccaagcacatgaagactatagtagaaatggagaattctgggctagtacatatgttgaaaaatggaaagacagaagaccttggttgcatgtacaagttatttagtcgtgtgccaaatggtttgaaaacaatgtgtgagtgtatgagttcctatttgagggagcaaggtaaagctcttgtttctgaagaaggagaaggaaagaatcctgttgactatatccagggcttattggatctgaagagtaggttcgatcgcttcctcctggaatcattcaacaatgaccgtctctttaaacaaactattgcgggtgactttgagtattttctcaacctcaactccaggtctcctgaatacctctcattatttattgatgataagctgaaaaagggagtcaaagggctaacagaacaagaagtagaaacaatattggataaagcaatggtcctttttaggtttatgcaagaaaaagatgtatttgaacgttattataaacaacacttggcaaggagacttctcacaaataaaagtgtttctgatgactctgaaaaaaacatgatatctaagttaaagactgaatgtggatgtcagttcacgtcaaaactggaaggaatgtttagggatatgagcatctcaaacacaacgatggatgaattcaggcaacatctacaggcaactggtgtatctttaggtggtgttgatcttacagtccgggtgctcacgacaggatattggcccactcagtcagccacaccaaagtgcaacatcccaccagcaccaagacatgcttttgagatattcagaaggttctacttagccaaacacagtggtcgacagctcacactccagcatcatatgggttctgcagatctcaatgccacattttatggaccagttaaaaaggaagatggatctgaagttggtgttggaggtgcacaagtaactggctctaatacacggaagcacatattgcaagtttccactttccagatgaccatattaatgctctttaataatagagaaaaatacacatttgaggaaattcagcaagagacagatatccctgaaagagagcttgttagagccctacagtccctcgcctgtggtaaaccaacacagcgggttcttacaaaagaacccaaatcaaaggaaatagaaaatggtcatatatttacagttaatgatcaattcacatccaaactacacagagtcaagattcaaacagttgctgccaaacaaggtgaatccgacccagagaggaaagaaacaaggcagaaagtagacgacgacagaaaacatgagatagaagctgctatagtgcggataatgaaatctagaaagaagatgcagcacaatgttctagtagcggaggtaactcagcagttgaaggcgcgattcttaccaagtccagttgttattaagaaacgtattgaaggacttattgagagagaatatttggcacgaacacctgaggatcgcaaagtatacacatatgtagcataaaatgcgttcagaaatttgatttattcttggactgtactcttcgcatggactgggaagttcttttaaatcattaaatattaagacgaccatctcttctattaaattacagtacatgttctagaccattgagatcaagcctttactccctttgagagtttccaacatcagttgattgagcttcaggctttacaacgtttatccctgtagagatcatctttacagttcctcgggaaaatgtgaatgtgctgcgttttgttttctttactgtatgaaaacaggaaaataaaagagaaatttagaaaatac

SEQ ID NO: 139378 - DNA, 2307 bp, Artificial Sequence
  derived and/or modified sequence
atgtctaacctgtcaaagggcaccgggtctagaaaggacacaaaaatgcgcattcgtgcattcccgatgaccatggatgaaaaatacgtcaactccatctgggatttgctaaaaaatgccattcaggaaatccagcggaaaaacaactccggactgagcttcgaagagctttaccgtaacgcgtacacaatggtcctgcataaacacggagagaagctctatactggtctgagggaagtggtgaccgagcacctcatcaacaaagttcgggaagatgtactgaactctctgaacaataatttcctgcaaacgttgaaccaagcttggaatgaccaccagaccgcaatggtcatgattagggatatcctcatgtacatggatcgggtgtatgtgcaacagaacaacgtcgagaacgtgtacaatctgggcctcattatcttcagggatcaggtagtgagatacggctgcatccgagatcacctgagacagaccttgttagatatgattgctagggagcgtaaaggggaagtggtagaccgcggggcgatccgtaatgcctgtcagatgctaatgattctgggacttgagggccgatccgtctacgaagaggactttgaggccccctttctggagatgtcagcagaattttttcagatggaatctcagaagttcctcgctgaaaattccgcctccgtttatatcaagaaggtggaggcgcggatcaatgaggaaattgagcgagtcatgcactgcctggataaatcaacagaagaaccaattgtgaaagttgtcgagcgggagcttatcagtaagcatatgaaaacaatcgtcgagatggaaaactccggccttgtccatatgttaaagaacggcaaaaccgaggatcttggttgcatgtacaagctgttctctagggtgcccaacggccttaaaactatgtgcgagtgcatgtcgagttatcttcgagaacagggcaaggcccttgtcagtgaggagggcgagggcaagaatccagtggattatattcagggtcttttggatttgaaatctcgattcgatcgtttcctactcgagtcctttaacaacgatcggcttttcaaacagacaattgctggcgatttcgagtatttcctgaatctgaactcaagatctccagaatacctgtctttgtttatagacgacaaattgaaaaaaggtgtgaaaggactgacggagcaggaggtagagacaatccttgataaggccatggttctgttccgcttcatgcaggagaaagacgtgttcgaacgctactataaacagcacctggcaaggcggctgctgaccaacaagtcagtaagtgacgactcagagaaaaacatgatcagcaagctgaaaactgagtgtggttgtcagttcacttcgaagttagaagggatgttcagagatatgtctatcagcaatacaacaatggatgaattcagacagcatctgcaagccacaggggttagcttaggcggagtggacctcaccgtaagggttttgaccaccggctattggcctacgcaaagcgcgactcccaagtgcaacatacctcccgcacctagacacgctttcgaaatctttagaagattctatttagcaaaacattcgggccggcagctcactcttcagcatcacatgggatcagcagatttaaatgcaacattctatggccccgtcaaaaaggaggacggtagtgaagttggggtcggaggagcccaagtcacaggatccaacacacgtaaacacatactacaagtttctacattccagatgacaatactgatgctcttcaataaccgcgagaaatatacgttcgaagagatccagcaggagacagacattcctgagcgcgagttggtgcgggctctccaaagcctggcctgtggtaagcccacccagagagtgctaacaaaagaaccaaagtcaaaggaaatcgaaaacggacatatcttcacagtgaatgatcaatttacctctaaactgcatagggtgaagattcaaacagtggccgctaagcagggcgaaagcgatcccgagcggaaagagacaaggcagaaagttgatgacgataggaaacacgaaattgaggccgctatagtccgaataatgaaaagtcggaagaaaatgcagcacaatgtgctggttgcagaagttacccagcagttaaaagcccggttcttgccaagccccgtggtgattaagaagcgaatcgaggggcttatagaacgcgagtacttggcccgaactcctgaagatagaaaggtatatacatacgtagcttag

SEQ ID NO: 139379 - DNA, 2307 bp, Artificial Sequence
  derived and/or modified sequence
atgagcaacctgagcaagggcaccggcagcaggaaggacaccaagatgaggatccgggccttccccatgaccatggatgagaagtatgtgaacagcatctgggacctgctgaagaatgccatccaggagatccagaggaagaacaacagcggcctgagctttgaggagctgtacagaaatgcctacaccatggtgctgcacaagcatggagagaagctgtacacaggcctgcgggaggtggtgacagagcacctgatcaacaaggtgagagaagatgtgctgaacagcctgaacaacaacttcctgcagaccctgaaccaggcctggaatgaccaccagacagccatggtgatgatccgggacatcctgatgtacatggacagagtgtatgtgcagcagaacaacgtggagaatgtgtacaacctgggcctcatcatcttccgggaccaggtggtgcgctatggctgcatccgggaccacctgcggcagaccctgctggacatgattgcccgggagaggaagggggaggtggtggacagaggagccatcagaaatgcctgccagatgctgatgatcctgggcctggagggccgctctgtgtatgaagaagattttgaggcccccttcctggagatgtctgctgagttcttccagatggagagccagaagttcctggctgaaaattctgcctctgtgtacatcaagaaggtggaggcccgcatcaatgaggagattgagcgggtgatgcactgcctggacaagagcacagaggagcccatcgtgaaggtggtggagcgggagctgatcagcaagcacatgaagaccatcgtggagatggagaacagcggcctggtgcacatgctgaagaatggcaagacagaggacctgggctgcatgtacaagctgttcagccgggtgcccaacggcctgaagaccatgtgtgagtgcatgagcagctacctgcgggagcagggcaaggccctggtgtctgaggagggggagggcaagaaccctgtggactacatccagggcctgctggacctgaagagcagatttgaccgcttcctgctggagagcttcaacaatgacaggctcttcaagcagaccatcgccggggactttgagtacttcctgaacctgaacagccgcagccctgagtacctgagcctcttcattgatgacaagctgaagaagggcgtgaagggcctgacagagcaggaggtggagaccatcctggacaaggccatggtgctcttccgcttcatgcaggagaaggatgtgtttgagcgctactacaagcagcacctggcccggcggctgctgaccaacaagtctgtgtctgatgacagcgagaagaacatgatcagcaagctgaagacagaatgtggctgccagttcaccagcaagctggagggcatgttccgggacatgagcatcagcaacaccaccatggatgagttccggcagcacctgcaggccaccggggtgtccctgggcggcgtggacctgactgtgcgggtgctgaccaccggctactggcccacccagagcgccacccccaagtgcaacatccccccagcccccaggcatgcctttgagatcttccgccgcttctacctggccaagcacagcggccggcagctgaccctgcagcaccacatgggcagcgctgacctgaatgccaccttctacggccctgtgaagaaggaggatggcagcgaggtgggcgtgggcggggcccaggtgacaggcagcaacaccaggaagcacatcctgcaggtgtccaccttccagatgaccatcctgatgctgttcaacaaccgggagaagtacacctttgaggagatccagcaggagacagacatccctgagcgggagctggtgcgggccctgcagagcctggcctgtgggaagcccacccagagggtgctgaccaaggagcccaagagcaaggagattgaaaatggccacatcttcaccgtgaatgaccagttcaccagcaagctgcaccgggtgaagatccagacagtggccgccaagcagggcgagagtgaccctgagaggaaggagacccggcagaaggtggatgatgacaggaagcatgaaattgaagctgccatcgtgcgcatcatgaagagcaggaagaagatgcagcacaacgtgctggtggccgaggtgacccagcagctgaaggcccgcttcctgcccagccctgtggtgatcaagaagagaattgagggcctgattgagcgggagtacctggcccggaccccagaggacaggaaggtgtacacctacgtggcctag

SEQ ID NO: 139380 - DNA, 2307 bp, Artificial Sequence
  derived and/or modified sequence
atgagcaacctgagcaagggcaccggcagccggaaggacaccaagatgcgcattcgtgcattccctatgacaatggatgagaagtatgttaattctatttgggacctccttaagaacgctattcaagagatccagagaaagaataacagcggactgtccttcgaagagctgtacagaaacgcctacaccatggttttgcacaaacacggtgaaaagctgtatactgggctacgtgaggtcgtaactgagcacttgattaacaaagttcgggaggatgtcctcaattctctgaacaataatttccttcagaccctgaatcaggcctggaatgaccatcagaccgcaatggtcatgatccgcgacattctcatgtacatggaccgtgtgtacgtccagcagaataacgtggagaacgtgtacaatctcgggctgatcatcttccgggatcaggttgtgagatatggctgtatccgagaccatctccggcagacattactcgacatgattgctcgcgaacgcaagggggaggtggtagaccgcggcgcaatccgaaatgcctgccagatgttgatgattctcgggttggaaggcagaagtgtgtacgaggaggatttcgaagctcccttcctggagatgtccgccgaatttttccaaatggaaagtcagaaatttctcgccgagaacagcgcttccgtctacatcaaaaaagtcgaagccagaattaacgaagagattgaaagggttatgcactgtcttgataaaagtacagaagagcctatagtgaaagtggtggagagggagcttatcagcaagcatatgaagaccatcgtggagatggagaatagcggtttggtgcatatgctgaaaaacggcaaaaccgaggacttgggttgcatgtacaagctattttctcgcgttcccaatggattgaaaacgatgtgcgagtgcatgtcaagctatctgcgggaacaggggaaagccctggtctctgaggaaggcgagggaaaaaatcctgttgactacattcagggcctattggacctgaagagcaggtttgaccggttcctcctggagagtttcaacaatgataggcttttcaaacagaccatcgcgggggatttcgagtacttccttaacctgaatagccggtcccctgagtatcttagtctctttatcgacgacaagctgaaaaagggagtgaagggtctgaccgagcaagaggttgagacaatacttgacaaagccatggttttgtttcgttttatgcaagagaaagatgtgttcgaacggtactataagcagcatctggctagacgcctccttacaaacaaatcagtttcggacgactccgaaaaaaatatgatttctaaactgaagaccgaatgcgggtgccagtttaccagtaaacttgaagggatgtttcgtgatatgtcgattagcaacaccactatggatgaattcaggcagcacctgcaggcaactggcgtttcactggggggggtggacctcacagttagagtgttaaccactggttattggcctacccagtctgctacacccaagtgcaatataccccccgcaccacgccatgcctttgaaattttcagaagattttacctcgcaaaacactctgggcgacagcttacactgcagcaccacatggggtctgcagatctcaacgcaactttctacggtcccgtaaaaaaggaggatgggagcgaggtcggcgtgggcggagcccaggtaaccggatctaatacacgtaagcatattctgcaggtgtccacgtttcagatgacgatcttgatgctgtttaacaaccgggaaaagtacacattcgaggagatccagcaggagacggacataccagagcgggaactggtcagggcccttcagtctctggcctgcggaaaaccaacacagagagtgctcacaaaagagcctaagagcaaggagatcgagaacggccatatattcactgttaatgatcaatttacatcaaaattacacagggttaagattcagaccgtggccgctaaacagggggaaagcgatcccgagagaaaggagactcggcagaaagttgatgatgacaggaagcatgaaatagaggccgcgatcgttaggatcatgaagtccaggaagaagatgcagcacaacgttcttgttgctgaagtcacacaacaactgaaagcacgttttctgccttcgccggtggtgattaaaaaacgtatagaggggttaatcgagagagaatacctggctcggaccccagaagaccgcaaggtgtacacatacgtggcctag

SEQ ID NO: 139381 - DNA, 2307 bp, Artificial Sequence
  derived and/or modified sequence
atgtcaaacctttcgaaaggaaccggttcccggaaggacacgaagatgaggatcagagcctttcctatgacgatggatgaaaagtatgtcaattcgatttgggatctgctcaagaacgccatacaagagattcaaagaaagaacaactccggcttgtcattcgaagaactataccgaaatgcatacaccatggtgctacataagcatggggagaagctatataccgggttaagagaggtcgtaaccgaacatttgattaacaaagtgcgggaggacgtgttaaacagccttaacaataactttcttcagacgcttaaccaggcctggaatgaccaccagactgccatggtgatgattagggacatcctgatgtacatggacagggtctacgttcagcagaacaacgttgaaaatgtctacaatctcggtttaattatctttcgggatcaggtagtacgctatggctgtatccgcgaccatctgcggcagaccctcttggacatgatcgccagggagcgcaaaggtgaggtggtcgaccgaggagcgatccgcaatgcttgccagatgctgatgatactgggccttgaaggcaggagcgtatatgaagaggactttgaagcaccatttctcgaaatgtcggccgaattctttcagatggagtcgcagaagtttttagccgagaattctgccagcgtgtatatcaaaaaggtggaagctcgtatcaatgaggaaatagagcgggtcatgcattgtctcgacaagtcgaccgaagaaccgatcgttaaggtcgtggagcgtgagctcatttctaaacacatgaaaacgatcgtcgagatggagaacagcggcctagtccacatgctcaagaacggaaaaactgaagatctgggctgtatgtacaagctcttctcacgagtccctaatgggctgaaaactatgtgtgaatgcatgtcctcatacctgagggagcagggaaaggccctggtgtctgaggagggggaagggaagaatcctgtcgattatatacagggacttttggacctcaagtctcgtttcgaccgattcctgttggaatcctttaacaatgaccgcttgtttaaacagacgatcgccggagactttgagtactttcttaatctgaacagccgttcgcctgaatacctgtctcttttcattgatgacaagttaaaaaagggcgtaaagggacttacggagcaagaggttgagacaatactcgacaaggctatggtgctgttcaggtttatgcaagagaaggatgtgtttgaaagatactataagcagcatctggctcggagactcttaaccaataagtctgtgtctgatgacagcgaaaaaaacatgatctcaaaactgaagacagaatgtggctgccaattcacctccaagctggaaggaatgttcagagacatgagcatctctaacaccaccatggatgagtttcgccagcatttgcaggccaccggggtgagcctggggggagtggacctgactgtccgtgtattgacaaccggatattggcctacacagagcgctactccaaaatgtaacatcccacccgctcctagacatgcctttgagattttcagaagattttatctagcaaagcacagcgggcgacagctcactctgcagcatcatatgggcagcgcagatctgaatgcaacgttttatggcccagtgaagaaggaggatgggtctgaggtgggggtcggaggcgcacaagtaaccggttccaacaccaggaagcacattctgcaagtgtccactttccaaatgaccatcttgatgctgtttaataacagggagaagtataccttcgaggaaattcagcaggagacagatatcccagaacgggagcttgtaagggcacttcagtcacttgcctgtgggaagccaacacaaagggtcctcacgaaagaacccaagtcgaaggaaatagagaacggtcatattttcactgtcaatgatcaatttacttctaaattgcatcgggtgaagattcagaccgtggcagccaagcagggagaatcagatccagaaagaaaggaaacgagacagaaggtggacgatgatagaaagcacgagattgaggccgctatcgttcgtataatgaaatcccgaaaaaagatgcaacataatgtgctcgtggccgaagttacgcagcagttgaaggccagattcttaccctctccagttgtcataaaaaagaggatcgaggggcttatcgagcgggagtatcttgccagaactcccgaggacaggaaagtctacacctacgttgcatag

SEQ ID NO: 139382 - protein, 512 aa, Artificial Sequence
  derived and/or modified sequence
MHTPDFAGPDDARAVDIMDICESILERKRHDSERSTCSILEQTDMEAVEALVCMSSWGQRSQKGDLLRIRPLTPVSDSGDVTTTVHMDAATPELPKDFHSLSTLCITPPQSPDLVEPSTRTPVSPQVTDSKACTATDVLQSSAVVARALSGGAERGLLGLEPVPSSPCRAKGTSVIRHTGESPAACFPTIQTPDCRLSDSREGEEQLLGHFETLQDTHLTDSLLSTNLVSCQPCLHKSGGLLLTDKGQQAGWPGAVQTCSPKNYENDLPRKTTPLISVSVPAPPVLCQMIPVTGQSSMLPAFLKPPPQLSVGTVRPILAQAAPAPQPVFVGPAVPQGAVMLVLPQGALPPPAPCAANVMAAGNTKLLPLAPAPVFITSSQNCVPQVDFSRRRNYVCSFPGCRKTYFKSSHLKAHLRTHTGEKPFNCSWDGCDKKFARSDELSRHRRTHTGEKKFVCPVCDRRFMRSDHLTKHARRHMTTKKIPGWQAEVGKLNRIASAESPGSPLVSMPASA

SEQ ID NO: 139383 - protein, 495 aa, Artificial Sequence
  derived and/or modified sequence
MDICESILERKRHDSERSTCSILEQTDMEAVEALVCMSSWGQRSQKGDLLRIRPLTPVSDSGDVTTTVHMDAATPELPKDFHSLSTLCITPPQSPDLVEPSTRTPVSPQVTDSKACTATDVLQSSAVVARALSGGAERGLLGLEPVPSSPCRAKGTSVIRHTGESPAACFPTIQTPDCRLSDSREGEEQLLGHFETLQDTHLTDSLLSTNLVSCQPCLHKSGGLLLTDKGQQAGWPGAVQTCSPKNYENDLPRKTTPLISVSVPAPPVLCQMIPVTGQSSMLPAFLKPPPQLSVGTVRPILAQAAPAPQPVFVGPAVPQGAVMLVLPQGALPPPAPCAANVMAAGNTKLLPLAPAPVFITSSQNCVPQVDFSRRRNYVCSFPGCRKTYFKSSHLKAHLRTHTGEKPFNCSWDGCDKKFARSDELSRHRRTHTGEKKFVCPVCDRRFMRSDHLTKHARRHMTTKKIPGWQAEVGKLNRIASAESPGSPLVSMPASA

SEQ ID NO: 139384 - DNA, 4051 bp, Artificial Sequence
  derived and/or modified sequence
gagggccgcgccggggcagagccgcgcgggcgggcgaggcgcgtgccggccgcaggagctccgggttgccgccgccgccgccgcccgcagcccacgtgcggccgctgctgcgcccgagctcacgccccgcggccgctttgttgctcccggccggcctgcacgatgcacacgccggacttcgcaggcccagacgacgcgcgcgcagttgacatcatggacatatgtgagtccatcctggagaggaagcggcatgacagcgaaaggtctacttgcagcatcttggagcagacagacatggaagctgtcgaggctcttgtttgtatgagctcctggggtcaaagatcccagaaaggtgacctgttgcggataagacccctcacgcctgtctctgactctggggatgtcaccaccactgtgcatatggatgcagccacacctgaactaccaaaagacttccattctttatcgactctgtgcataactcctcctcagagccctgatctcgtggagccatcgacaaggacacctgtttctccccaagtaacagattccaaagcatgtacagccacggatgttctccagtcctctgccgtagtggccagagctctgagcgggggcgcggagaggggcttgctgggtttggagccagtgcccagctctccctgcagggccaaggggactagcgtgatccgacacactggggagagccctgctgcctgctttcccaccatccagactccagattgccggctttctgacagcagagaaggagaagagcagcttctgggacactttgaaactttgcaggacacacacctcacggacagtttactcagcactaacttggtgtcctgtcagccctgcttgcacaagtctggtggcctgctgctcactgacaaaggccagcaggcagggtggcctggtgcagttcagacttgctcaccaaagaattatgaaaatgacctgcccaggaaaaccacccctctgatttctgtctctgtccctgctccccctgtcctttgccagatgatccctgtgactggacaaagtagcatgttaccagcttttttgaagccccctccccagttgtctgtggggactgtgagacccatcctagctcaggctgctccagcgcctcaacctgtgttcgtgggacctgctgtgcctcagggagctgtgatgttggtcctgccccagggagccctccctccgcctgccccctgtgcagccaatgtcatggctgccgggaataccaagttgttgccccttgcccctgctccagtgttcatcacctctagccaaaactgtgtccctcaggtagacttttcccgaaggaggaactatgtttgcagcttcccaggttgccggaagacctacttcaaaagttcccaccttaaggcccatcttcgcactcacacaggggagaagcctttcaactgcagctgggatggctgtgataaaaagtttgctcgttcggatgagctgtcacgccaccgcagaactcacacaggggagaagaagtttgtgtgcccggtgtgtgaccgacgtttcatgcgcagtgaccacctgacgaagcatgcccggcgccacatgacgaccaagaagatcccaggctggcaggcagaggttggcaagctgaacagaatcgcctctgcagagagcccggggagcccactggtgagcatgccagcctctgcctgaaaggtccattaggacatcactcatgggatttttaaaaagcctctttccaggaatggaactgatggattcctctcccactgcctcacccaaaaaaaacggtcttggcggcctaggggaagatcggggagctggttttgatgaaagtatgttaacttttcttttccacttgggaccctgttcagtatcttttgtagtttcagaagtttttttgttttggttttttttttaaagaaatggtagaaaatttgataatctgaatcaccagcattcaaacaaatatttcggcaataaagtttacaaaatctggatttttacaaccttttctattgatgttttgtagaaataagacagggtactaatttttatactggtttttagaaaaatatttatattgttggtgctcaaatcaccaatttctagctagatcattttgcagccttcttttcagtgtttaataacaaagtttttcctaatggcccttcttttagtaaactggacatgttattccactacaaaaaccacaagttatctggccttttagatctttttggaatcggacctggttgagtaaggacctcttaaaagggaaaaataaattttgccgtcagcttcttcataacgttttcaaggaaattctaggcaatcattcctgtcaccaaagaactaaaattttggttgactggaactagtgagctgtgtccatggtgtgtcatgaaggatgtaccccagagagtaacatgagccactgggcagatcccagggaccagtacttgctgcaggatctagtctgtaatagtcttggccatggctctgctgaaagcaagccattcagtttcttgtttgtacctaaaacaccaaaaaagaaacactcaaatccagctgctttgtcaattgtcagttctgactccttttgctgtggccttatccgtactatattgtgggtagagtaacttctcagaaaaaaaggaaatgtctgtattggttggatgaaactccaccagagcacagcttagctggggcgagatgcatgtgaaggcaggcagtgccaagattccgcttcctttgtttgccaaatactagaaacacaaggaaatgcaagttacgctaaatggcagtaatactacccaactgcctttctgttcattttgtttgaaggaaattgttttgaccaaacagaaaattacttggaatggtgtgttttacagtctacctagaaaatagatggacaatatttttcaactgtatgagcacgtagataaccgagagaatgtggccacctgtgttcaagaagccactgatactggtttttgttaaacattggaagttcaggcaatggaataaatgtaggaacatacagaatgttgcactaatttggtagcctgggaattttttttattgtgcagtatgtatttaaattttgtctatgttaattaccagcatttacctttatttaaatgatggtaaggtggaatattgaataaaattaggttttgtgttttgttctttgtagtctgataaaatctccacctggtcattcattgtgtgtgacttgatacctgttaacttgccccttagtatcagctgttacttgacacaaatgtgtgtgttattcagaggttttcagtctggacactccataggtgagtgtcgtgtcttcgtgagacagcacagttgtctcatgttgtgcatagttcatgtttcctcaccacccagtcctttctcctgctcatcaaaatcagcatacacatttttgactgtacacactataaatggcatcaaatttggatatttttcttaattatgacatgcaaagtaatgtgagtcctgccagtattctggtggataaggtcttttgagtatttggttgcttgtcacaacattctccaagcagtgatatttctaaagaggagatacatgttgaaaacggttttaatttacacttccatttcctgattacatttggaaatactttgtgtaaaccatcccccttccacctccatttgtctgttgaaagattttaagttggaaacagttcctgtctgaaaactcttctgagaaccacaaaccttgtgtatggattcggcatggagccctcagctggcggctctgggtgctgacggccgctggagaggtgggctcccctcgtgcactttattgcctgggcagttttgcttgatcttttgtgactttgagccttttaagtagtttgaatgataagacttaaaatgtttcataattatgttttatgtaacagactttgacattatttaaacgagcatgtgtaatgtaacttttctctttgaatcatataaaacttgattttacattgaaaaaaaaaaaaaaaaaaaaa

SEQ ID NO: 139385 - DNA, 1539 bp, Artificial Sequence
  derived and/or modified sequence
atgcacaccccagatttcgcgggccccgatgacgccagagcagtcgatataatggatatttgtgagtctatccttgagcgcaagagacacgactcagaacgttctacatgtagcattctagaacagaccgacatggaggcagttgaagccctcgtctgcatgtccagctggggccagcgctcccaaaagggcgacttgctgaggattcgcccgcttactcctgtgtctgattccggcgatgtgaccaccaccgtccatatggacgcagccaccccagagctacccaaagattttcatagcttgagcacactgtgcatcacaccaccacaatcaccagacttggtggagccttctacacggacccccgtatcaccgcaagtgactgactccaaggcctgtaccgcgacagacgtcctacagagcagtgcagtggttgctcgggctctctctgggggagcagaacggggattgctcggcctggaacccgtgcctagttcaccttgcagagccaaaggcaccagtgtgattcgccataccggagagtctcctgccgcctgcttccccacaattcagacacccgattgtaggctctcagatagtcgcgaaggggaggagcagcttctgggacattttgagacactacaagatacgcacctgactgactccctgctgtccactaatctggtcagctgccagccttgcctccacaagtcaggaggcctgctgctgacggataagggacagcaggctggctggccaggggccgtgcagacctgctcccctaagaactatgagaacgatcttccaagaaagacgaccccacttatttccgtgagcgtgcccgcaccacctgtcctatgccagatgatccctgtcactggccagagcagcatgctccccgcattcttaaagccgcctccacaactgtcagttggaactgtgcgccccatcctggctcaggccgccccggctccacagccagtatttgttggcccagcagtcccccagggggcagtcatgctggttcttccccagggggcgctacctcctccggcaccgtgcgcagctaacgtcatggccgccgggaacactaaactgcttccacttgccccagctccagtattcattacctcttcgcagaattgtgtgccccaggtggacttctctcgccgtcggaactatgtgtgctcttttcctggatgtcgcaagacctattttaaaagttcacatctaaaggcacacctgaggactcacacaggcgagaaacccttcaactgtagctgggatgggtgtgacaaaaaattcgcacgcagcgatgaactaagccgacatcgcaggacccacacgggggagaaaaagtttgtttgtccagtctgtgatagaaggtttatgaggagtgaccacttgacaaaacatgccagaaggcacatgacgacaaaaaaaatccctggatggcaagctgaggtcggaaagcttaaccgcattgcctccgctgagagcccaggcagtccgttggtaagcatgccggccagtgcctag

SEQ ID NO: 139386 - DNA, 4030 bp, Artificial Sequence
  derived and/or modified sequence
gagggccgcgccggggcagagccgcgcgggcgggcgaggcgcgtgccggccgcaggagctccgggttgccgccgccgccgccgcccgcagcccacgtgcggccgctgctgcgcccgagctcacgccccgcggccgctttgttgctcccggccggcctgcacgatgcacacgccggacttcgcaggcccagacgacgcgcgcgcagttgacatcatggacatatgtgagtccatcctggagaggaagcggcatgacagcgaaaggtctacttgcagcatcttggagcagacagacatggaagctgtcgaggctcttgtttgtatgagctcctggggtcaaagatcccagaaaggtgacctgttgcggataagacccctcacgcctgtctctgactctggggatgtcaccaccactgtgcatatggatgcagccacacctgaactaccaaaagacttccattctttatcgactctgtgcataactcctcctcagagccctgatctcgtggagccatcgacaaggacacctgtttctccccaagtaacagattccaaagcatgtacagccacggatgttctccagtcctctgccgtagtggccagagctctgagcgggggcgcggagaggggcttgctgggtttggagccagtgcccagctctccctgcagggccaaggggactagcgtgatccgacacactggggagagccctgctgcctgctttcccaccatccagactccagattgccggctttctgacagcagagaaggagaagagcagcttctgggacactttgaaactttgcaggacacacacctcacggacagtttactcagcactaacttggtgtcctgtcagccctgcttgcacaagtctggtggcctgctgctcactgacaaaggccagcaggcagggtggcctggtgcagttcagacttgctcaccaaagaattatgaaaatgacctgcccaggaaaaccacccctctgatttctgtctctgtccctgctccccctgtcctttgccagatgatccctgtgactggacaaagtagcatgttaccagcttttttgaagccccctccccagttgtctgtggggactgtgagacccatcctagctcaggctgctccagcgcctcaacctgtgttcgtgggacctgctgtgcctcagggagctgtgatgttggtcctgccccagggagccctccctccgcctgccccctgtgcagccaatgtcatggctgccgggaataccaagttgttgccccttgcccctgctccagtgttcatcacctctagccaaaactgtgtccctcaggtagacttttcccgaaggaggaactatgtatgcagcttcccaggttgccggaagacctacttcaaaagttcccaccttaaggcccatcttcgcactcacacaggggagaagcctttcaactgcagctgggatggctgtgataaaaagtttgctcgttcggatgagctgtcacgccaccgcagaactcacacaggggagaagaagtttgtgtgcccggtgtgtgaccgacgtttcatgcgcagtgaccacctgacgaagcatgcccggcgccacatgacgaccaagaagatcccaggctggcaggcagaggttggcaagctgaacagaatcgcctctgcagagagcccggggagcccactggtgagcatgccagcctctgcctgaaaggtccattaggacatcactcatgggatttttaaaaagcctctttccaggaatggaactgatggattcctctcccactgcctcacccaaaaaaaacggtcttggcggcctaggggaagatcggggagctggttttgatgaaagtatgttaacttttcttttccacttgggaccctgttcagtatcttttgtagtttcagaagtttttttgttttggttttttttttaaagaaatggtagaaaatttgataatctgaatcaccagcattcaaacaaatatttcggcaataaagtttacaaaatctggatttttacaaccttttctattgatgttttgtagaaataagacagggtactaatttttatactggtttttagaaaaatatttatattgttggtgctcaaatcaccaatttctagctagatcattttgcagccttcttttcagtgtttaataacaaagtttttcctaatggcccttcttttagtaaactggacatgttattccactacaaaaaccacaagttatctggccttttagatctttttggaatcggacctggttgagtaaggacctcttaaaagggaaaaataaattttgccgtcagcttcttcataacgttttcaaggaaattctaggcaatcattcctgtcaccaaagaactaaaattttggttgactggaactagtgagctgtgtccatggtgtgtcatgaaggatgtaccccagagagtaacatgagccactgggcagatcccagggaccagtacttgctgcaggatctagtctgtaatagtcttggccatggctctgctgaaagcaagccattcagtttcttgtttgtacctaaaacaccaaaaaagaaacactcaaatccagctgctttgtcaattgtcagttctgactccttttgctgtggccttatccgtactatattgtgggtagagtaacttctcagaaaaaaaggaaatgtctgtattggttggatgaaactccaccagagcacagcttagctggggcgagatgcatgtgaaggcaggcagtgccaagattccgcttcctttgtttgccaaatactagaaacacaaggaaatgcaagttacgctaaatggcagtaatactacccaactgcctttctgttcattttgtttgaaggaaattgttttgaccaaacagaaaattacttggaatggtgtgttttacagtctacctagaaaatagatggacaatatttttcaactgtatgagcacgtagataaccgagagaatgtggccacctgtgttcaagaagccactgatactggtttttgttaaacattggaagttcaggcaatggaataaatgtaggaacatacagaatgttgcactaatttggtagcctgggaattttttttattgtgcagtatgtatttaaattttgtctatgttaattaccagcatttacctttatttaaatgatggtaaggtggaatattgaataaaattaggttttgtgttttgttctttgtagtctgataaaatctccacctggtcattcattgtgtgtgacttgatacctgttaacttgccccttagtatcagctgttacttgacacaaatgtgtgtgttattcagaggttttcagtctggacactccataggtgagtgtcgtgtcttcgtgagacagcacagttgtctcatgttgtgcatagttcatgtttcctcaccacccagtcctttctcctgctcatcaaaatcagcatacacatttttgactgtacacactataaatggcatcaaatttggatatttttcttaattatgacatgcaaagtaatgtgagtcctgccagtattctggtggataaggtcttttgagtatttggttgcttgtcacaacattctccaagcagtgatatttctaaagaggagatacatgttgaaaacggttttaatttacacttccatttcctgattacatttggaaatactttgtgtaaaccatcccccttccacctccatttgtctgttgaaagattttaagttggaaacagttcctgtctgaaaactcttctgagaaccacaaaccttgtgtatggattcggcatggagccctcagctggcggctctgggtgctgacggccgctggagaggtgggctcccctcgtgcactttattgcctgggcagttttgcttgatcttttgtgactttgagccttttaagtagtttgaatgataagacttaaaatgtttcataattatgttttatgtaacagactttgacattatttaaacgagcatgtgtaatgtaacttttctctttgaatcatataaaacttgattttacattg

SEQ ID NO: 139387 - DNA, 4033 bp, Artificial Sequence
  derived and/or modified sequence
ggggccggggcaacgacgggaggcgggagcgccgcactgccttggaggcggggcaacgcttggaggcgggaacgcggcacgcgagcgttgggggccctaagcgtcgcgacctgggggcttcggggaggtagccgtggacgtgggcagagcgcgggcctcgtggtgtgcgggcactgtgggccgggcgagccccttcccgcccgtgtggttgacatcatggacatatgtgagtccatcctggagaggaagcggcatgacagcgaaaggtctacttgcagcatcttggagcagacagacatggaagctgtcgaggctcttgtttgtatgagctcctggggtcaaagatcccagaaaggtgacctgttgcggataagacccctcacgcctgtctctgactctggggatgtcaccaccactgtgcatatggatgcagccacacctgaactaccaaaagacttccattctttatcgactctgtgcataactcctcctcagagccctgatctcgtggagccatcgacaaggacacctgtttctccccaagtaacagattccaaagcatgtacagccacggatgttctccagtcctctgccgtagtggccagagctctgagcgggggcgcggagaggggcttgctgggtttggagccagtgcccagctctccctgcagggccaaggggactagcgtgatccgacacactggggagagccctgctgcctgctttcccaccatccagactccagattgccggctttctgacagcagagaaggagaagagcagcttctgggacactttgaaactttgcaggacacacacctcacggacagtttactcagcactaacttggtgtcctgtcagccctgcttgcacaagtctggtggcctgctgctcactgacaaaggccagcaggcagggtggcctggtgcagttcagacttgctcaccaaagaattatgaaaatgacctgcccaggaaaaccacccctctgatttctgtctctgtccctgctccccctgtcctttgccagatgatccctgtgactggacaaagtagcatgttaccagcttttttgaagccccctccccagttgtctgtggggactgtgagacccatcctagctcaggctgctccagcgcctcaacctgtgttcgtgggacctgctgtgcctcagggagctgtgatgttggtcctgccccagggagccctccctccgcctgccccctgtgcagccaatgtcatggctgccgggaataccaagttgttgccccttgcccctgctccagtgttcatcacctctagccaaaactgtgtccctcaggtagacttttcccgaaggaggaactatgtatgcagcttcccaggttgccggaagacctacttcaaaagttcccaccttaaggcccatcttcgcactcacacaggggagaagcctttcaactgcagctgggatggctgtgataaaaagtttgctcgttcggatgagctgtcacgccaccgcagaactcacacaggggagaagaagtttgtgtgcccggtgtgtgaccgacgtttcatgcgcagtgaccacctgacgaagcatgcccggcgccacatgacgaccaagaagatcccaggctggcaggcagaggttggcaagctgaacagaatcgcctctgcagagagcccggggagcccactggtgagcatgccagcctctgcctgaaaggtccattaggacatcactcatgggatttttaaaaagcctctttccaggaatggaactgatggattcctctcccactgcctcacccaaaaaaaacggtcttggcggcctaggggaagatcggggagctggttttgatgaaagtatgttaacttttcttttccacttgggaccctgttcagtatcttttgtagtttcagaagtttttttgttttggttttttttttaaagaaatggtagaaaatttgataatctgaatcaccagcattcaaacaaatatttcggcaataaagtttacaaaatctggatttttacaaccttttctattgatgttttgtagaaataagacagggtactaatttttatactggtttttagaaaaatatttatattgttggtgctcaaatcaccaatttctagctagatcattttgcagccttcttttcagtgtttaataacaaagtttttcctaatggcccttcttttagtaaactggacatgttattccactacaaaaaccacaagttatctggccttttagatctttttggaatcggacctggttgagtaaggacctcttaaaagggaaaaataaattttgccgtcagcttcttcataacgttttcaaggaaattctaggcaatcattcctgtcaccaaagaactaaaattttggttgactggaactagtgagctgtgtccatggtgtgtcatgaaggatgtaccccagagagtaacatgagccactgggcagatcccagggaccagtacttgctgcaggatctagtctgtaatagtcttggccatggctctgctgaaagcaagccattcagtttcttgtttgtacctaaaacaccaaaaaagaaacactcaaatccagctgctttgtcaattgtcagttctgactccttttgctgtggccttatccgtactatattgtgggtagagtaacttctcagaaaaaaaggaaatgtctgtattggttggatgaaactccaccagagcacagcttagctggggcgagatgcatgtgaaggcaggcagtgccaagattccgcttcctttgtttgccaaatactagaaacacaaggaaatgcaagttacgctaaatggcagtaatactacccaactgcctttctgttcattttgtttgaaggaaattgttttgaccaaacagaaaattacttggaatggtgtgttttacagtctacctagaaaatagatggacaatatttttcaactgtatgagcacgtagataaccgagagaatgtggccacctgtgttcaagaagccactgatactggtttttgttaaacattggaagttcaggcaatggaataaatgtaggaacatacagaatgttgcactaatttggtagcctgggaattttttttattgtgcagtatgtatttaaattttgtctatgttaattaccagcatttacctttatttaaatgatggtaaggtggaatattgaataaaattaggttttgtgttttgttctttgtagtctgataaaatctccacctggtcattcattgtgtgtgacttgatacctgttaacttgccccttagtatcagctgttacttgacacaaatgtgtgtgttattcagaggttttcagtctggacactccataggtgagtgtcgtgtcttcgtgagacagcacagttgtctcatgttgtgcatagttcatgtttcctcaccacccagtcctttctcctgctcatcaaaatcagcatacacatttttgactgtacacactataaatggcatcaaatttggatatttttcttaattatgacatgcaaagtaatgtgagtcctgccagtattctggtggataaggtcttttgagtatttggttgcttgtcacaacattctccaagcagtgatatttctaaagaggagatacatgttgaaaacggttttaatttacacttccatttcctgattacatttggaaatactttgtgtaaaccatcccccttccacctccatttgtctgttgaaagattttaagttggaaacagttcctgtctgaaaactcttctgagaaccacaaaccttgtgtatggattcggcatggagccctcagctggcggctctgggtgctgacggccgctggagaggtgggctcccctcgtgcactttattgcctgggcagttttgcttgatcttttgtgactttgagccttttaagtagtttgaatgataagacttaaaatgtttcataattatgttttatgtaacagactttgacattatttaaacgagcatgtgtaatgtaacttttctctttgaatcatataaaacttgattttacattg

SEQ ID NO: 139388 - DNA, 3885 bp, Artificial Sequence
  derived and/or modified sequence
actcgcgcgcctgtaaatgcgggaggtggggcgtgcagggcttcgctgcggccgcgccggttgacatcatggacatatgtgagtccatcctggagaggaagcggcatgacagcgaaaggtctacttgcagcatcttggagcagacagacatggaagctgtcgaggctcttgtttgtatgagctcctggggtcaaagatcccagaaaggtgacctgttgcggataagacccctcacgcctgtctctgactctggggatgtcaccaccactgtgcatatggatgcagccacacctgaactaccaaaagacttccattctttatcgactctgtgcataactcctcctcagagccctgatctcgtggagccatcgacaaggacacctgtttctccccaagtaacagattccaaagcatgtacagccacggatgttctccagtcctctgccgtagtggccagagctctgagcgggggcgcggagaggggcttgctgggtttggagccagtgcccagctctccctgcagggccaaggggactagcgtgatccgacacactggggagagccctgctgcctgctttcccaccatccagactccagattgccggctttctgacagcagagaaggagaagagcagcttctgggacactttgaaactttgcaggacacacacctcacggacagtttactcagcactaacttggtgtcctgtcagccctgcttgcacaagtctggtggcctgctgctcactgacaaaggccagcaggcagggtggcctggtgcagttcagacttgctcaccaaagaattatgaaaatgacctgcccaggaaaaccacccctctgatttctgtctctgtccctgctccccctgtcctttgccagatgatccctgtgactggacaaagtagcatgttaccagcttttttgaagccccctccccagttgtctgtggggactgtgagacccatcctagctcaggctgctccagcgcctcaacctgtgttcgtgggacctgctgtgcctcagggagctgtgatgttggtcctgccccagggagccctccctccgcctgccccctgtgcagccaatgtcatggctgccgggaataccaagttgttgccccttgcccctgctccagtgttcatcacctctagccaaaactgtgtccctcaggtagacttttcccgaaggaggaactatgtatgcagcttcccaggttgccggaagacctacttcaaaagttcccaccttaaggcccatcttcgcactcacacaggggagaagcctttcaactgcagctgggatggctgtgataaaaagtttgctcgttcggatgagctgtcacgccaccgcagaactcacacaggggagaagaagtttgtgtgcccggtgtgtgaccgacgtttcatgcgcagtgaccacctgacgaagcatgcccggcgccacatgacgaccaagaagatcccaggctggcaggcagaggttggcaagctgaacagaatcgcctctgcagagagcccggggagcccactggtgagcatgccagcctctgcctgaaaggtccattaggacatcactcatgggatttttaaaaagcctctttccaggaatggaactgatggattcctctcccactgcctcacccaaaaaaaacggtcttggcggcctaggggaagatcggggagctggttttgatgaaagtatgttaacttttcttttccacttgggaccctgttcagtatcttttgtagtttcagaagtttttttgttttggttttttttttaaagaaatggtagaaaatttgataatctgaatcaccagcattcaaacaaatatttcggcaataaagtttacaaaatctggatttttacaaccttttctattgatgttttgtagaaataagacagggtactaatttttatactggtttttagaaaaatatttatattgttggtgctcaaatcaccaatttctagctagatcattttgcagccttcttttcagtgtttaataacaaagtttttcctaatggcccttcttttagtaaactggacatgttattccactacaaaaaccacaagttatctggccttttagatctttttggaatcggacctggttgagtaaggacctcttaaaagggaaaaataaattttgccgtcagcttcttcataacgttttcaaggaaattctaggcaatcattcctgtcaccaaagaactaaaattttggttgactggaactagtgagctgtgtccatggtgtgtcatgaaggatgtaccccagagagtaacatgagccactgggcagatcccagggaccagtacttgctgcaggatctagtctgtaatagtcttggccatggctctgctgaaagcaagccattcagtttcttgtttgtacctaaaacaccaaaaaagaaacactcaaatccagctgctttgtcaattgtcagttctgactccttttgctgtggccttatccgtactatattgtgggtagagtaacttctcagaaaaaaaggaaatgtctgtattggttggatgaaactccaccagagcacagcttagctggggcgagatgcatgtgaaggcaggcagtgccaagattccgcttcctttgtttgccaaatactagaaacacaaggaaatgcaagttacgctaaatggcagtaatactacccaactgcctttctgttcattttgtttgaaggaaattgttttgaccaaacagaaaattacttggaatggtgtgttttacagtctacctagaaaatagatggacaatatttttcaactgtatgagcacgtagataaccgagagaatgtggccacctgtgttcaagaagccactgatactggtttttgttaaacattggaagttcaggcaatggaataaatgtaggaacatacagaatgttgcactaatttggtagcctgggaattttttttattgtgcagtatgtatttaaattttgtctatgttaattaccagcatttacctttatttaaatgatggtaaggtggaatattgaataaaattaggttttgtgttttgttctttgtagtctgataaaatctccacctggtcattcattgtgtgtgacttgatacctgttaacttgccccttagtatcagctgttacttgacacaaatgtgtgtgttattcagaggttttcagtctggacactccataggtgagtgtcgtgtcttcgtgagacagcacagttgtctcatgttgtgcatagttcatgtttcctcaccacccagtcctttctcctgctcatcaaaatcagcatacacatttttgactgtacacactataaatggcatcaaatttggatatttttcttaattatgacatgcaaagtaatgtgagtcctgccagtattctggtggataaggtcttttgagtatttggttgcttgtcacaacattctccaagcagtgatatttctaaagaggagatacatgttgaaaacggttttaatttacacttccatttcctgattacatttggaaatactttgtgtaaaccatcccccttccacctccatttgtctgttgaaagattttaagttggaaacagttcctgtctgaaaactcttctgagaaccacaaaccttgtgtatggattcggcatggagccctcagctggcggctctgggtgctgacggccgctggagaggtgggctcccctcgtgcactttattgcctgggcagttttgcttgatcttttgtgactttgagccttttaagtagtttgaatgataagacttaaaatgtttcataattatgttttatgtaacagactttgacattatttaaacgagcatgtgtaatgtaacttttctctttgaatcatataaaacttgattttacattg

SEQ ID NO: 139389 - DNA, 1539 bp, Artificial Sequence
  derived and/or modified sequence
atgcacaccccagactttgctggcccagatgatgcccgggctgtggacatcatggacatctgtgagagcatcctggagaggaagagacatgacagcgagaggagcacctgcagcatcctggagcagacagacatggaggccgtggaggccctggtgtgcatgagctcctggggccagaggagccagaagggggacctgctgcgcatccggcccctgacccctgtgtctgacagcggagatgtgaccaccaccgtgcacatggatgctgccaccccagagctgcccaaggacttccacagcctgagcaccctgtgcatcaccccaccccagagcccagacctggtggagcccagcaccaggacccctgtgagcccccaggtgacagacagcaaggcctgcacagccacagatgtgctgcagagcagcgctgtggtggcccgggccctgagcggcggcgctgagcggggcctgctgggcctggagcctgtgcccagcagcccctgccgggccaagggcaccagcgtcatccgccacactggagagagccctgctgcctgcttccccaccatccagaccccagactgccgcctgagtgacagccgggagggggaggagcagctgctgggccactttgagaccctgcaggacacccacctgacagacagcctgctgagcaccaacctggtgtcctgccagccctgcctgcacaagagcggcggcctgctgctgacagacaagggccagcaggccggctggccaggagctgtgcagacctgcagccccaagaactatgaaaatgacctgcccaggaagaccacccccctcatctctgtgtctgtgcctgcccctcctgtgctgtgccagatgatccctgtgacaggccagagctccatgctgcctgccttcctgaagcccccaccccagctgtctgtgggcaccgtgcggcccatcctggcccaggccgccccagccccccagcctgtgtttgtgggccctgctgtgccccagggcgctgtgatgctggtgctgccccagggcgccctgcccccaccagccccctgtgccgccaacgtgatggctgctggcaacaccaagctgctgcccctggccccagcccctgtgttcatcaccagcagccagaactgtgtgccccaggtggacttcagcagaagaagaaactacgtgtgcagcttccctggctgcaggaagacctacttcaagagcagccacctgaaggcccacctgcggacccacactggagagaagcccttcaactgctcctgggatggctgtgacaagaagtttgcccggagtgatgagctgagccgccacaggaggacccacactggagagaagaagtttgtgtgccctgtgtgtgaccggcgcttcatgagaagtgaccacctgaccaagcacgcccggcggcacatgaccaccaagaagatccctggctggcaggccgaggtgggcaagctgaacagaattgccagcgctgagagccctggcagccccctggtgtccatgcctgccagcgcctag

SEQ ID NO: 139390 - DNA, 1539 bp, Artificial Sequence
  derived and/or modified sequence
atgcacacccccgacttcgccggccccgacgacgcccgggccgtggacattatggacatctgtgagagtatcctcgagcggaaacggcatgatagcgaaagatctacctgctccattttggagcagaccgacatggaggctgtcgaggcactcgtgtgcatgtcaagttggggtcaacggtcccaaaagggggatcttctgaggattcgaccactcacccctgtatccgactctggtgacgtgaccaccaccgtgcacatggacgccgcaacccctgagcttcccaaggattttcattccttgtccacactatgcatcacgcctccgcagagccccgatctggtggagccgagcacccgtactcctgtttcacctcaggtcacagatagcaaagcatgcacagccaccgacgtactgcaatctagtgccgtggtggctcgggccttgagtgggggagcagagagagggcttcttggcctcgagcctgtgccgagtagcccctgcagagcgaagggcacctcagtgattcgccacaccggagagtctccagctgcctgcttccccacaatccagaccccggattgtcggctgtccgattcccgtgagggcgaggagcagctgcttggccacttcgaaactctccaggacacccatctgactgatagtctgctgtcaacgaatctcgtgtcttgccagccttgtcttcacaagagtgggggcctgctgctgaccgacaaagggcagcaggccggatggcctggcgcagtacaaacttgtagcccaaagaactatgagaacgatctcccaagaaagacaaccccgctaatcagtgtgtccgtaccagcccctccggttctgtgtcaaatgatcccagtgacgggccaatctagtatgctgcctgcattcctgaaaccacctccacagttaagcgtagggacagtgcggcctatactggctcaggccgcgcctgctccacagcccgtcttcgttggcccggctgtcccccaaggcgcagtgatgctggtgctccctcagggggctctgcctccacccgcaccatgcgccgcgaacgtgatggcagctgggaatacgaaactgctgcccctggcacctgcaccggtgtttattactagcagccagaactgtgtccctcaggtggacttcagccgccgaaggaactacgtttgttccttccccggttgccgaaaaacctattttaagtcgagccacctgaaagcacatctgcgcacacacactggggaaaagccatttaattgcagctgggacggatgcgacaagaaattcgctaggagtgacgagctctcgcggcatcggcgcacgcacaccggagaaaagaaattcgtgtgccccgtgtgtgacagaaggttcatgcggtcggaccacctcaccaaacatgctagaagacacatgacaacaaagaaaattcccggctggcaggctgaagtgggtaagcttaatcggatcgcgtctgccgagtcacccggatctcctctagttagtatgcctgcgagcgcctag

SEQ ID NO: 139391 - DNA, 1539 bp, Artificial Sequence
  derived and/or modified sequence
atgcacacacctgatttcgctggtccggacgacgcccgtgccgtagatatcatggatatctgcgaatcaattctcgagcgcaaaaggcacgattctgagaggagtacgtgctccatactcgaacagaccgacatggaagccgtggaggcacttgtgtgcatgagctcctggggccagcgctcacagaaaggcgacttactaagaattcgcccattaacacccgtctcggacagtggtgatgtgactaccactgtccatatggatgctgccacccccgagctaccgaaggatttccactcactttccacactgtgtatcactcctccacagtccccggatctggtagagccgtctaccaggaccccagtctctcctcaggtgaccgatagcaaagcctgtactgctacggatgtgctgcagtcctccgctgtggtggcacgcgctctgtccgggggagctgagcgaggcttactcggcttggagccagtgcccagcagtccatgcagagctaagggcacaagtgtaatccgccacacgggcgaatcccccgcagcctgctttccaacaatacagactccggactgccgtttgtccgactccagggaaggggaagaacagctgttaggccattttgagacgctccaggacactcacctcactgactcacttctcagcactaacctggtgtcttgccagccttgtcttcacaagagcggaggactcctgttgacagataagggtcagcaggctggttggcctggggctgttcaaacatgttcccccaagaattacgagaacgatctgcctagaaagacaacaccgttgatatctgtgagcgttcccgctccccctgttctgtgccagatgattccagttaccggtcagtcctctatgctgcccgcttttctcaaaccccctcctcagctgtctgtgggcaccgtgagacccatcctcgctcaggcggcacctgctccccaacctgtgttcgtcgggccagcagttccacagggggctgtgatgttagtgctgcctcaaggcgcactcccccctcccgcaccatgtgccgcaaatgtgatggctgcgggaaataccaaactactccctttggcaccagcacctgtctttatcactagctcacagaactgtgtgccgcaagttgatttttcaaggagacgcaattacgtgtgttccttccccggttgtagaaagacctattttaagagttcccatttgaaggcacatctaagaactcacactggggagaagcccttcaactgttcatgggatggttgtgacaagaagttcgctcgatcggacgagctctctcgccaccgcaggacacacacaggcgagaaaaagttcgtttgtcccgtgtgcgatcgcaggttcatgcgttcggaccatttgacaaagcatgcccgaaggcacatgacaacaaagaagatcccgggttggcaggctgaagtgggaaagctaaacaggattgcaagcgccgaaagtcccggttcccccctggtgagtatgccagccagtgcttag

SEQ ID NO: 139392 - DNA, 1539 bp, Artificial Sequence
  derived and/or modified sequence
atgcacacccccgacttcgccggccccgacgacgccagagccgtggacatcatggacatctgcgagagcatcctggagagaaagagacacgacagcgagagaagcacctgcagcatcctggagcagaccgacatggaggccgtggaggccctggtgtgcatgagcagctggggccagagaagccagaagggcgacctgctgagaatcagacccctgacccccgtgagcgacagcggcgacgtgaccaccaccgtgcacatggacgccgccacccccgagctgcccaaggacttccacagcctgagcaccctgtgcatcacccccccccagagccccgacctggtggagcccagcaccagaacccccgtgagcccccaggtgaccgacagcaaggcctgcaccgccaccgacgtgctgcagagcagcgccgtggtggccagagccctgagcggcggcgccgagagaggcctgctgggcctggagcccgtgcccagcagcccctgcagagccaagggcaccagcgtgatcagacacaccggcgagagccccgccgcctgcttccccaccatccagacccccgactgcagactgagcgacagcagagagggcgaggagcagctgctgggccacttcgagaccctgcaggacacccacctgaccgacagcctgctgagcaccaacctggtgagctgccagccctgcctgcacaagagcggcggcctgctgctgaccgacaagggccagcaggccggctggcccggcgccgtgcagacctgcagccccaagaactacgagaacgacctgcccagaaagaccacccccctgatcagcgtgagcgtgcccgccccccccgtgctgtgccagatgatccccgtgaccggccagagcagcatgctgcccgccttcctgaagccccccccccagctgagcgtgggcaccgtgagacccatcctggcccaggccgcccccgccccccagcccgtgttcgtgggccccgccgtgccccagggcgccgtgatgctggtgctgccccagggcgccctgcccccccccgccccctgcgccgccaacgtgatggccgccggcaacaccaagctgctgcccctggcccccgcccccgtgttcatcaccagcagccagaactgcgtgccccaggtggacttcagcagaagaagaaactacgtgtgcagcttccccggctgcagaaagacctacttcaagagcagccacctgaaggcccacctgagaacccacaccggcgagaagcccttcaactgcagctgggacggctgcgacaagaagttcgccagaagcgacgagctgagcagacacagaagaacccacaccggcgagaagaagttcgtgtgccccgtgtgcgacagaagattcatgagaagcgaccacctgaccaagcacgccagaagacacatgaccaccaagaagatccccggctggcaggccgaggtgggcaagctgaacagaatcgccagcgccgagagccccggcagccccctggtgagcatgcccgccagcgcctag

SEQ ID NO: 139393 - protein, 447 aa, Artificial Sequence
  derived and/or modified sequence
MGEPRAGAALDDGSGWTGSEEGSEEGTGGSEGAGGDGGPDAEGVWSPDIEQSFQEALAIYPPCGRRKIILSDEGKMYGRNELIARYIKLRTGKTRTRKQVSSHIQVLARRKSREIQSKLKDQVSKDKAFQTMATMSSAQLISAPSLQAKLGPTGPQASELFQFWSGGSGPPWNVPDVKPFSQTPFTLSLTPPSTDLPGYEPPQALSPLPPPTPSPPAWQARGLGTARLQLVEFSAFVEPPDAVDSYQRHLFVHISQHCPSPGAPPLESVDVRQIYDKFPEKKGGLRELYDRGPPHAFFLVKFWADLNWGPSGEEAGAGGSISSGGFYGVSSQYESLEHMTLTCSSKVCSFGKQVVEKVETERAQLEDGRFVYRLLRSPMCEYLVNFLHKLRQLPERYMMNSVLENFTILQVVTNRDTQELLLCTAYVFEVSTSERGAQHHIYRLVRD

SEQ ID NO: 139394 - DNA, 2220 bp, Artificial Sequence
  derived and/or modified sequence
cccacttttcccaaacaaagctcccggcaactttctccctcgcagcgccccgcccgcccgcggctccccagccccaggccgggaggcccagatgggggaaccccgggctggggccgccctggacgatggcagcggctggacgggcagtgaggaaggcagtgaggagggtaccggcggcagtgagggggctgggggtgacgggggcccggatgcagagggggtgtggagcccagacattgagcagagcttccaggaggccctggccatctatccaccctgcggccgccggaaaataattttgtctgatgaaggcaagatgtatggtcggaatgaactgatcgcccgctacatcaagctgagaacggggaagacccgaactcgaaaacaggtttctagtcacatccaggttttggcccgaaggaaatcaagggaaatccagtccaagttgaaggaccaggtttccaaggacaaggctttccagacaatggcaaccatgtcctctgcccagctcatctccgcgccttctctgcaggccaaactgggtcccactggtcctcaggcctctgagcttttccagttttggtctggaggatctgggcccccctggaatgttccagatgtgaagccattctcacagacaccgttcaccttgtcactgactcccccatctactgacctcccagggtacgagcccccccaagccctctcacccctgcccccacctaccccatcgcccccagcctggcaggctcggggcctgggcaccgcccggttgcagctggtagagttctcagccttcgtggaaccgccagatgcagttgattcttaccagaggcacctgttcgtgcacatcagccagcactgccccagccccggagcgccgccgctcgagagtgtggacgtccggcagatctacgacaaattccctgagaaaaagggtggcctccgagagctatatgatcgtggccccccccatgccttcttcctggtcaagttctgggcggacctgaactggggcccaagtggtgaggaggcaggggccggtggcagcatcagcagtggtggcttctacggagtgagcagccagtatgagagcctggaacacatgaccctcacctgttcctccaaggtctgctcttttggcaagcaggtggtggagaaggtggagacggaacgggcccagctggaggacggcagatttgtgtaccgcctgctgcgctcgcccatgtgcgagtacctggtgaatttcttgcacaagttgcggcagctgcctgagcgatacatgatgaacagcgtcctggaaaacttcaccatcctccaggtggtgacaaacagagacacccaggaactgctgctctgcaccgcctatgtcttcgaggtctccaccagcgagcgtggggcccagcatcacatttaccgcctggtcagggactgaagggggaccccaaaactggctcaccccccagaacaccctcctcccagggagggtcctccagctcacctcatgcttcttatttggggagagggctgtgatgtaaaggggttgacctcagaggcctaagcaactggggccatcccccccattagaggggcccccaaaacttggttggagagctgaacaggctgggactgaggaaaggataaaccccgatattgggacctcacagtgggtgtctgaaaggacagatcactccggagtatcagggattgtggggacaggagtgagacaaccccccaggtacagcactggcttttcttttcagcccctgacaggccacccccactcctctgcatgtcttggagagcgctagttacacattggcttgtcccctttactttttcccagccacccctccccctgaaatttctgcccctctctaccaccctcactccatgacctgtgagatcacaaagtgaagatgaaccctttctgtgcaggagcagagccaggtgggccctggacattttttttttttttaatataacgagatatttataagtgggtgctagggtcttgactttatctccgctgcacaagcagtgtgttgaactttctaatctcatccctctcctaagtgagccctgagctagacggtttccttcctcccctctcaaagtttgtttgtttgtgttctgacagaggataaagctattttaccaaaaaaaaaaaaaaaaaaaaaaaaaaaaaaaaaaaaaaaaaaaaaaaaaaaaaaaaaaaaa

SEQ ID NO: 139395 - DNA, 1344 bp, Artificial Sequence
  derived and/or modified sequence
atgggcgagcccagagccggcgccgccctggacgacggcagcggctggaccggcagcgaggagggcagcgaggagggcaccggcggcagcgagggcgccggcggcgacggcggccccgacgccgagggcgtgtggagccccgacatcgagcagagcttccaggaggccctggccatctaccccccctgcggcagaagaaagatcatcctgagcgacgagggcaagatgtacggcagaaacgagctgatcgccagatacatcaagctgagaaccggcaagaccagaaccagaaagcaggtgagcagccacatccaggtgctggccagaagaaagagcagagagatccagagcaagctgaaggaccaggtgagcaaggacaaggccttccagaccatggccaccatgagcagcgcccagctgatcagcgcccccagcctgcaggccaagctgggccccaccggcccccaggccagcgagctgttccagttctggagcggcggcagcggccccccctggaacgtgcccgacgtgaagcccttcagccagacccccttcaccctgagcctgaccccccccagcaccgacctgcccggctacgagcccccccaggccctgagccccctgcccccccccacccccagcccccccgcctggcaggccagaggcctgggcaccgccagactgcagctggtggagttcagcgccttcgtggagccccccgacgccgtggacagctaccagagacacctgttcgtgcacatcagccagcactgccccagccccggcgccccccccctggagagcgtggacgtgagacagatctacgacaagttccccgagaagaagggcggcctgagagagctgtacgacagaggccccccccacgccttcttcctggtgaagttctgggccgacctgaactggggccccagcggcgaggaggccggcgccggcggcagcatcagcagcggcggcttctacggcgtgagcagccagtacgagagcctggagcacatgaccctgacctgcagcagcaaggtgtgcagcttcggcaagcaggtggtggagaaggtggagaccgagagagcccagctggaggacggcagattcgtgtacagactgctgagaagccccatgtgcgagtacctggtgaacttcctgcacaagctgagacagctgcccgagagatacatgatgaacagcgtgctggagaacttcaccatcctgcaggtggtgaccaacagagacacccaggagctgctgctgtgcaccgcctacgtgttcgaggtgagcaccagcgagagaggcgcccagcaccacatctacagactggtgagagactag

SEQ ID NO: 139396 - DNA, 1344 bp, Artificial Sequence
  derived and/or modified sequence
atgggtgagcccagagccggagcagctctggacgacggaagtggttggaccggtagtgaggaagggtcagaagaaggaacagggggatccgaaggggcaggtggcgatggcgggcccgatgctgaaggggtgtggtcccccgacatcgagcagagctttcaagaggctctagcgatatacccaccatgtggccgaaggaaaatcatcctaagcgacgaggggaagatgtacggaagaaatgagctgatagccagatacataaaacttaggaccggaaagacaaggacccggaaacaggtctcatcccatatacaggtgctggcacgccgaaaatctagggagatccagtctaagttgaaagatcaagtctctaaagataaagcctttcaaacgatggccaccatgtcctcagctcagctcatcagtgccccatcattgcaggccaaactggggcccaccggcccccaagcttccgaactattccagttttggagtggcggatccgggccaccttggaacgtacctgatgtcaaaccgttttcccaaaccccttttacattgtctctgacacctccttccactgatcttcccgggtacgagcctccgcaagccctctcacctttacctccgcccactccaagtcctcctgcttggcaggcccgaggcctagggaccgcaaggttacaacttgttgagttttccgcattcgttgaacctcctgatgctgtcgactcgtaccagaggcatctgtttgttcatatatcccagcattgtcctagtccaggtgccccgccattagagtcagttgacgttcggcaaatctatgataagtttcccgagaagaagggaggccttcgggagctatatgaccgcgggcccccccacgcttttttcctcgtgaagttttgggccgatttaaattggggaccctccggtgaggaggccggagctggggggagtatctcatctggaggcttctacggggtctccagtcagtatgagtcacttgagcacatgactctcacctgcagcagcaaggtgtgcagctttggaaagcaggttgtggaaaaagtagagacggaaagggctcaattagaggacggtaggttcgtctatagactcctacgctcccctatgtgcgaatacctcgttaacttcctgcacaaactgcgccagctgcctgagcggtatatgatgaactctgtactggagaactttaccatcttacaggtggttacgaaccgcgacacacaagagcttcttttgtgcactgcttacgtgtttgaggtgtcaacctcagaacggggcgcccagcaccacatctacagactggtgcgcgactag

SEQ ID NO: 139397 - DNA, 1344 bp, Artificial Sequence
  derived and/or modified sequence
atgggagagccccgggccggggccgccctggatgatggcagcggctggacaggcagcgaggagggcagcgaggagggcactggaggcagcgagggcgctggaggagatggcggcccagatgctgagggcgtgtggagcccagacatcgagcagagcttccaggaggccctggccatctacccaccctgtggccgcaggaagatcatcctgagtgatgagggcaagatgtatggaagaaatgagctgattgcccgctacatcaagctgaggacaggcaagaccaggaccaggaagcaggtgagcagccacatccaggtgctggcccggaggaagagccgggagatccagagcaagctgaaggaccaggtgtccaaggacaaggccttccagaccatggccaccatgagcagcgcccagctgatcagcgcccccagcctgcaggccaagctgggccccaccggcccccaggccagcgagctgttccagttctggagcggcggcagcggccccccctggaatgtgcctgatgtgaagcccttcagccagacccccttcaccctgagcctgaccccacccagcacagacctgcccggctatgagcccccccaggccctgagccccctgcccccacccacccccagccccccagcctggcaggcccggggcctgggcacagcccggctgcagctggtggagttcagcgcctttgtggagcccccagatgctgtggacagctaccagaggcacctgtttgtgcacatcagccagcactgccccagccctggggccccacccctggagagcgtggatgtgcggcagatctatgacaagtttcctgagaagaagggcggcctgcgggagctgtatgaccggggcccccctcatgccttcttcctggtgaagttctgggccgacctgaactggggccccagcggggaggaggccggggccggcggcagcatcagcagcggcggcttctatggagtgagcagccagtatgagagcctggagcacatgaccctgacctgcagcagcaaggtgtgcagctttgggaagcaggtggtggagaaggtggagacagagcgggcccagctggaggatggccgctttgtgtaccgcctgctgcggagccccatgtgtgagtacctggtgaacttcctgcacaagctgcggcagctgcctgagcgctacatgatgaacagcgtgctggagaacttcaccatcctgcaggtggtgaccaacagagacacccaggagctgctgctgtgcacagcctacgtgtttgaggtgtccaccagcgagcggggggcccagcaccacatctaccgcctggtgcgggactag

SEQ ID NO: 139398 - DNA, 1344 bp, Artificial Sequence
  derived and/or modified sequence
atgggcgagccccgggccggcgccgccctggacgacggcagcggctggaccggctccgaggaagggagcgaggaaggcacaggtggctctgaaggggctggcggagacggcggaccagacgccgaaggcgtatggtctccggacattgaacagtcattccaggaagcattagctatataccctccctgtggcagacgtaaaataattctgtctgatgaggggaaaatgtacggcaggaatgagctgatagccagatacatcaaacttaggacaggcaaaactcgaacgaggaaacaggtgtcatcccacatacaagttctggccaggcggaagtctagggagatacagtccaagctgaaagatcaagtgtcaaaagataaagccttccaaaccatggcaaccatgagctccgcgcagttaataagtgccccttctttgcaagccaagctgggacccaccggcccacaggcttctgaactcttccaattctggtccggagggagcggccccccatggaacgtgcccgacgtcaagcctttttctcaaactccattcaccctgtctctgacacctccgtccacagacttacccggatacgaaccccctcaggccctgagccccctgcctcctcccacaccgtcccctccagcctggcaagctcgaggattgggaaccgctcgcctccaactggtggaattttctgcttttgttgagccccccgacgccgtagactcctatcagcggcatctgttcgtgcacatctctcaacattgcccctcccccggcgcgcctccccttgaatcagtcgacgtcaggcagatttacgacaaattcccagaaaaaaaaggcggcctgagggaactttacgaccgcggccccccacacgccttcttcctggtaaaattctgggccgacctcaactgggggccctccggagaggaggccggggccggcggctctattagtagcggcggcttctatggtgtgagctctcagtacgagagccttgagcacatgaccctgacctgttcttccaaggtctgtagcttcggcaaacaagttgttgagaaggtcgaaaccgagcgagctcagcttgaagacggaaggttcgtgtaccggctcctgagatcccctatgtgtgagtaccttgtgaactttctgcacaagctccgtcagcttcccgagagatatatgatgaactccgtgcttgagaatttcacaatcctgcaggttgttacaaatcgtgacacacaggagttgctgctgtgtactgcctatgtgttcgaggtttctacctctgagcgcggcgcacagcatcacatctatcgtctggttagggattag

SEQ ID NO: 139399 - DNA, 1344 bp, Artificial Sequence
  derived and/or modified sequence
atgggtgaacctcgagccggagccgcactagatgatggctccggatggaccggctccgaggagggatccgaagaagggacaggtggcagcgagggagctgggggtgacggcggaccagacgcagagggcgtttggtctcctgatattgagcagtcattccaagaagcgctggccatttaccctccctgcggtcgtagaaagatcatcctttccgacgaaggaaaaatgtatggacggaatgaacttatagcgagatatattaagctaagaactgggaagacgcggacacgcaagcaggtctccagccatatccaggtcctggccaggagaaaatctcgtgagatccaatccaaactgaaggatcaggtttcaaaagacaaagcgttccagacaatggccacgatgagttccgcccagctgatcagcgccccatctctccaggccaagctgggccctacaggccctcaagcctccgagctattccagttttggtcaggaggttctggccctccttggaacgtgcctgacgtgaaacctttcagccagacgccatttacactcagtttgactccaccaagtaccgatcttccgggatacgagccaccccaggctttatccccactcccccctccaaccccatcacccccagcatggcaggctcgtggccttggcaccgccaggttacagctggttgagttctctgctttcgtggaaccgccagacgccgtcgatagttaccagcggcacctgtttgttcatataagccagcactgtccgtctccaggtgcaccgcctctggaatctgtggatgtcaggcaaatatatgacaaatttcccgaaaaaaaggggggtctgcgggaactgtacgatcgcggacctcctcatgctttctttcttgtaaagttttgggcagatctgaattgggggccatctggagaggaggccggtgctggcggaagcatttccagcgggggattctatggcgtgagtagccagtatgagtcattggagcacatgacgttgacatgcagctctaaggtgtgtagttttggtaaacaggtcgtggagaaagttgagacggaacgggcacagttggaagacggtcgctttgtgtatagactgctgagaagcccaatgtgtgaatacctcgtgaacttcttgcataaactaaggcagctaccagagagatatatgatgaacagcgttttggaaaatttcactattctgcaggtagtcacaaatagggatacccaggagctcctgctgtgcaccgcttacgtgtttgaggtttccaccagcgagcggggagcacaacaccacatctacagactagtgcgggactag

SEQ ID NO: 139400 - DNA, 2159 bp, Artificial Sequence
  derived and/or modified sequence
cccacttttcccaaacaaagctcccggcaactttctccctcgcagcgccccgcccgcccgcggctccccagccccaggccgggaggcccagatgggggaaccccgggctggggccgccctggacgatggcagcggctggacgggcagtgaggaaggcagtgaggagggtaccggcggcagtgagggggctgggggtgacgggggcccggatgcagagggggtgtggagcccagacattgagcagagcttccaggaggccctggccatctatccaccctgcggccgccggaaaataattttgtctgatgaaggcaagatgtatggtcggaatgaactgatcgcccgctacatcaagctgagaacggggaagacccgaactcgaaaacaggtttctagtcacatccaggttttggcccgaaggaaatcaagggaaatccagtccaagttgaaggaccaggtttccaaggacaaggctttccagacaatggcaaccatgtcctctgcccagctcatctccgcgccttctctgcaggccaaactgggtcccactggtcctcaggcctctgagcttttccagttttggtctggaggatctgggcccccctggaatgttccagatgtgaagccattctcacagacaccgttcaccttgtcactgactcccccatctactgacctcccagggtacgagcccccccaagccctctcacccctgcccccacctaccccatcgcccccagcctggcaggctcggggcctgggcaccgcccggttgcagctggtagagttctcagccttcgtggaaccgccagatgcagttgattcttaccagaggcacctgttcgtgcacatcagccagcactgccccagccccggagcgccgccgctcgagagtgtggacgtccggcagatctacgacaaattccctgagaaaaagggtggcctccgagagctatatgatcgtggccccccccatgccttcttcctggtcaagttctgggcggacctgaactggggcccaagtggtgaggaggcaggggccggtggcagcatcagcagtggtggcttctacggagtgagcagccagtatgagagcctggaacacatgaccctcacctgttcctccaaggtctgctcttttggcaagcaggtggtggagaaggtggagacggaacgggcccagctggaggacggcagatttgtgtaccgcctgctgcgctcgcccatgtgcgagtacctggtgaatttcttgcacaagttgcggcagctgcctgagcgatacatgatgaacagcgtcctggaaaacttcaccatcctccaggtggtgacaaacagagacacccaggaactgctgctctgcaccgcctatgtcttcgaggtctccaccagcgagcgtggggcccagcatcacatttaccgcctggtcagggactgaagggggaccccaaaactggctcaccccccagaacaccctcctcccagggagggtcctccagctcacctcatgcttcttatttggggagagggctgtgatgtaaaggggttgacctcagaggcctaagcaactggggccatcccccccattagaggggcccccaaaacttggttggagagctgaacaggctgggactgaggaaaggataaaccccgatattgggacctcacagtgggtgtctgaaaggacagatcactccggagtatcagggattgtggggacaggagtgagacaaccccccaggtacagcactggcttttcttttcagcccctgacaggccacccccactcctctgcatgtcttggagagcgctagttacacattggcttgtcccctttactttttcccagccacccctccccctgaaatttctgcccctctctaccaccctcactccatgacctgtgagatcacaaagtgaagatgaaccctttctgtgcaggagcagagccaggtgggccctggacattttttttttttttaatataacgagatatttataagtgggtgctagggtcttgactttatctccgctgcacaagcagtgtgttgaactttctaatctcatccctctcctaagtgagccctgagctagacggtttccttcctcccctctcaaagtttgtttgtttgtgttctgacagaggataaagctattttacc

SEQ ID NO: 139401 - protein, 317 aa, Artificial Sequence
  derived and/or modified sequence
MNNTAASPMSTATSSSGRSTGKSISFATELQSMMYSLGDARRPLHETAVLVEDVVHTQLINLLQQAAEVSQLRGARVITPEDLLFLMRKDKKKLRRLLKYMFIRDYKSKIVKGIDEDDLLEDKLSGSNNANKRQKIAQDFLNSIDQTGELLAMFEDDEIDEVKQERMERAERQTRIMDSAQYAEFCESRQLSFSKKASKFRDWLDCSSMEIKPNVVAMEILAYLAYETVAQLVDLALLVRQDMVTKAGDPFSHAISATFIQYHNSAESTAACGVEAHSDAIQPCHIREAIRRYSHRIGPLSPFTNAYRRNGMAFLAC

SEQ ID NO: 139402 - protein, 108 aa, Artificial Sequence
  derived and/or modified sequence
MEILAYLAYETVAQLVDLALLVRQDMVTKAGDPFSHAISATFIQYHNSAESTAACGVEAHSDAIQPCHIREAIRRYSHRIGPLSPFTISFSLTECLPQEWDGFSSLLM

SEQ ID NO: 139403 - DNA, 1164 bp, Artificial Sequence
  derived and/or modified sequence
cgcaccatctgcacccccacattctcctcgcgggaagcgcagcagtgcctccaagggttcttaaagcagagatgaataatacggcagctagtccaatgtctactgcaacttcaagtagtggaaggagtacagggaagtctataagctttgcaacagaattacagagtatgatgtattctttaggtgatgctagaaggcctcttcatgaaacagcagttttggtagaagatgtggtacacactcagttaattaatctgttacagcaagctgctgaagtttctcagctgcggggagcaagggtaatcactcctgaagatcttctgtttttgatgcgcaaagataagaaaaaacttagaagactgctaaaatacatgtttatccgagactacaaatcaaagattgtcaaaggcatcgatgaggatgatcttctcgaagacaaattgagtggcagcaataatgcgaacaaaagacaaaagattgctcaggacttcctcaactctattgaccagacaggagaacttttagcaatgtttgaagatgacgaaattgatgaagttaaacaagaaagaatggagagagcagaaagacaaactcgaattatggattcagctcaatatgcagaattctgtgaaagtcgacaattaagtttctccaaaaaagcttccaaatttcgagactggttggactgcagcagtatggagataaaacccaatgttgtcgcaatggaaatcttagcatatttagcgtatgaaactgtggcacagttagtggatctggctcttcttgtgaggcaagacatggtaaccaaggcaggggaccccttcagccatgccatttctgcaaccttcattcagtatcacaactctgctgagagcactgcagcctgtggtgttgaggctcacagcgatgccatccagccctgccacatcagagaggccattcgacgctacagccacaggattggcccactttccccattcacaaatgcctaccgcaggaatgggatggcttttctagcctgctgatgtgacaactgtgatgtgcctgcaacaacaggaaaggcaatgttatattaaggtgatttcttgtgaacaaaataaaatacaaatttacctttcttttatctgacaaaaaaaaaaaaaaaaaaaaaaaaaaaaaaaaaaa

SEQ ID NO: 139404 - DNA, 954 bp, Artificial Sequence
  derived and/or modified sequence
atgaataatacagctgcatcgcccatgagtactgctaccagttcttccggccggtctactgggaagagcattagcttcgccactgagctgcagtccatgatgtacagcctcggagacgcgagaagaccgctgcatgaaaccgctgtgctggtggaggacgtggtgcatacacagctgattaatctcctccagcaggctgccgaagtgtcccagctgcggggggcccgcgtgattacgcctgaggatcttctgttcctgatgcgcaaggataagaagaagctgaggcggttgcttaaatacatgttcatcagagactataaatctaagattgtgaagggaatcgacgaggacgacctgcttgaggataagctaagcggcagcaataacgctaacaagcggcagaagatcgcacaagacttcctgaattcgatcgatcagacaggggagttacttgctatgttcgaggatgatgagatcgatgaagtcaaacaggaacgaatggagcgtgccgagaggcagacccgcataatggattccgcgcaatatgccgaattctgcgagtcccggcagctgtcctttagcaagaaggcctccaaattcagggattggctggactgttcatccatggaaatcaagccaaacgtggttgccatggagatccttgcttatctggcatacgagaccgtggcacaactcgtggacctcgcactcctcgtcagacaggatatggtgaccaaggcaggagacccattctcacatgccatctcggcgaccttcatacagtatcataattccgccgagtctacagccgcctgcggagtcgaagcccactcagatgccattcagccttgccacatacgcgaagccattcgccgttatagccatcggatcgggccgttgagcccatttactaacgcttatcggagaaacggcatggcctttctcgcctgctag

SEQ ID NO: 139405 - DNA, 954 bp, Artificial Sequence
  derived and/or modified sequence
atgaataatacggctgcaagtcccatgtcaacagcaacatcctccagtggtaggtcaaccggcaagagcataagtttcgctactgagttgcagtcgatgatgtatagcttgggcgacgctagaaggcccctgcatgaaacagctgtacttgtcgaagatgttgtccatactcagctgattaacttactccagcaagccgctgaggtatcccagctgcggggcgccagggtcattaccccggaggatctgctctttctgatgcgaaaggataaaaagaagctcaggcggttacttaagtacatgtttattcgagattacaagtcaaaaattgtgaaagggatcgatgaagacgacttgctagaggacaagttgtcagggagcaataacgctaataaacgacagaaaatagctcaagatttcctgaacagcatcgatcagactggtgagctcctggctatgttcgaggatgacgagatcgatgaagtgaaacaagaacgcatggaaagggcagagcgtcagacacgcatcatggattccgcccagtacgcggagttttgcgaatctagacagctgagcttcagcaaaaaggccagtaagtttagagattggctggattgcagttcaatggaaatcaagcccaatgttgtcgccatggaaattctggcttatctggcatatgagaccgtagcacagttagtcgatctcgcactcctggtacgccaagacatggtgactaaggccggggatccgttctcccacgctatcagtgccacttttatacagtaccataattccgcggaatctaccgcagcatgcggggttgaagctcattctgacgctattcagccatgccacatcagggaggccatacggagatacagccacagaattggccccctcagcccttttactaacgcatataggcggaatggtatggcatttctcgcatgctag

SEQ ID NO: 139406 - DNA, 954 bp, Artificial Sequence
  derived and/or modified sequence
atgaacaataccgccgcatcccctatgtctaccgctacttcaagctcaggaagatcaacaggaaagtctatttcttttgccaccgagctccagtcgatgatgtacagcctgggagacgctcgaagacctttgcacgaaactgccgtgctagtggaggacgtagtgcatacccagttgattaatttgctgcagcaggctgcggaggtgtcccagctgcgcggcgcgcgcgtcattacaccagaggatctgttgtttctgatgcgcaaagacaagaaaaaactgagacgcctgctgaagtacatgtttatccgcgattataagtccaaaatcgtgaagggcatcgatgaggacgacttattagaggacaagctttcaggatcaaataacgcaaataaacggcaaaaaatagcccaagacttcctgaattctattgaccagactggggagctcctggctatgttcgaggatgacgagatcgatgaggtcaagcaggagcgaatggaacgcgccgagcggcagaccagaatcatggactccgcccagtatgctgagttctgcgaaagcagacagctatccttttctaagaaggcaagcaaatttcgggattggctcgactgcagtagtatggagatcaagcctaacgtggtcgctatggaaatactcgcctacctcgcctatgagacggttgcccaactggtggacctggctctgcttgttaggcaggacatggtcaccaaagcaggagacccgttttctcatgcaatttctgccacgttcatacagtaccacaacagcgcagaatccacggctgcctgtggggtggaagcccatagtgatgccatacagccgtgtcacattcgcgaagccatccgtcgttacagccatagaatagggcctctcagcccatttacaaatgcttataggaggaatggtatggcctttctggcttgctag

SEQ ID NO: 139407 - DNA, 954 bp, Artificial Sequence
  derived and/or modified sequence
atgaacaacacagctgccagccccatgagcacagccaccagcagcagcggccgcagcacaggcaagagcatcagctttgccacagagctgcagagcatgatgtacagcctgggagatgcccggcggcccctgcatgaaacagctgtgctggtggaggatgtggtgcacacccagctgatcaacctgctgcagcaggccgctgaggtgtcccagctgcggggggcccgggtcatcaccccagaggacctgctcttcctgatgaggaaggacaagaagaagctgcggcggctgctgaagtacatgttcatccgggactacaagagcaagatcgtgaagggcattgatgaagatgacctgctggaggacaagctgagcggcagcaacaatgccaacaagaggcagaagatcgcccaggacttcctgaacagcattgaccagacaggagagctgctggccatgtttgaagatgatgaaattgatgaggtgaagcaggagaggatggagcgggcagagcggcagacccgcatcatggattctgcccagtatgcagagttctgtgagagccggcagctgtccttcagcaagaaggccagcaagttccgggactggctggactgcagctccatggagatcaagcccaacgtggtggccatggagatcctggcctacctggcctatgagaccgtggcccagctggtggacctggccctgctggtgcggcaggacatggtgaccaaggccggggaccccttcagccacgccatcagcgccaccttcatccagtaccacaacagcgctgagagcacagctgcctgtggggtggaggcccacagtgatgccatccagccctgccacatccgggaggccatccgccgctacagccacagaattggccccctgagccccttcaccaatgcctacagaagaaatggcatggccttcctggcctgctag

SEQ ID NO: 139408 - DNA, 954 bp, Artificial Sequence
  derived and/or modified sequence
atgaacaacaccgccgccagccccatgagcaccgccaccagcagctctggccgttcaacaggcaagagtatctctttcgctaccgaactccagagcatgatgtactcgcttggcgacgctaggagaccgctacacgagactgcagtgttggtggaggatgtggtgcacacacaattgattaaccttctccagcaggccgccgaggtctcgcaactgcgtggagcgcgcgtcatcacaccagaagacctgctgttcttgatgaggaaggataagaagaaactgcgcaggctgctgaagtacatgtttatccgagattacaaaagcaagatagtcaaaggaatcgacgaagatgacctgctcgaggacaaactctctggctcaaataatgccaataagcggcagaaaatcgcgcaggatttcttgaattccattgatcaaacaggggagctcctggccatgtttgaagatgatgagattgacgaagttaaacaggagcgcatggagagggccgagaggcaaactcgcatcatggacagcgcccagtatgctgaattctgtgagagccgccaattatcattctccaaaaaagcttctaagttcagagactggctggactgtagctcaatggaaattaaacccaatgtggtagctatggaaatcttagcttaccttgcctacgagacagtggcccaattagttgaccttgccctgctggtacgccaggacatggttacaaaggccggggatccattctcccatgccatcagcgccacctttattcaatatcataatagtgctgagtcgacagccgcctgtggcgttgaagcacattcagatgctatccagccatgtcacatccgcgaggcaatcaggcggtacagtcacaggataggtcctctcagtccttttaccaatgcctaccgaagaaatgggatggccttcctggcttgttag

SEQ ID NO: 139409 - DNA, 954 bp, Artificial Sequence
  derived and/or modified sequence
atgaacaacaccgccgccagccccatgagcaccgccaccagcagctcaggccgcagcaccggcaaatcaatctcttttgcgacagagcttcagtcgatgatgtacagcttgggcgacgccaggagacctctccacgaaactgcagtcttagttgaagatgtggtccacacccagctgatcaatctgctgcagcaggctgccgaagtgtcccagcttcgcggcgctagggtcatcacacccgaagatctcctcttcctgatgcgcaaagacaagaagaagctcaggaggctgttaaagtacatgtttattagggattacaagagcaaaatcgtgaaaggcattgacgaggatgatctcttggaagacaagctctccggctctaataacgccaacaagagacagaagattgctcaggattttttgaactccatcgatcagactggcgagttgctggccatgttcgaggatgatgagattgatgaagtgaaacaggagcgcatggaaagagcggagagacagacacgcattatggacagcgcccagtacgcggagttttgcgaatcacgtcaattgagcttttctaagaaagcttcaaagtttagggactggcttgactgcagttctatggaaattaagcctaacgttgtcgcaatggaaatcctggcctacctggcatatgagacggtggcccagctagtggacctggcccttctggtgcgacaggatatggttaccaaggctggcgatcctttcagtcatgctatttctgcgaccttcatccagtaccacaacagcgcagagtcaacggctgcctgcggggtggaggctcactctgatgcaatccagccatgccatattcgtgaggccatcagacgatactcacacagaattggacccctgtcaccttttacgaatgcttaccgccgcaacggtatggcttttcttgcctgctag

SEQ ID NO: 139410 - DNA, 954 bp, Artificial Sequence
  derived and/or modified sequence
atgaacaacaccgccgccagccccatgagcaccgccaccagcagctctggccgctccactggcaagtctatatcctttgccacagagttacagagcatgatgtacagcctgggggatgcaaggcgccccctgcacgaaacggcagtgctggtggaggacgtggtccacacccagctgattaatctcttgcaacaggcagctgaagtctctcaattacggggcgcacgcgtcattacaccagaggatctcttgtttctgatgcgcaaagataagaaaaaacttcggcggctgctgaaatacatgttcattcgggattacaagagcaagatcgtgaagggcatcgatgaggatgatcttcttgaagataaactgagtggctcaaataacgcaaataaacgccagaagatagctcaggacttcttgaattcaatcgatcagaccggcgagctattggcaatgtttgaggatgacgaaatcgacgaagtgaagcaagagcggatggagcgtgcggagcgtcaaaccagaataatggacagcgctcagtatgccgaattctgtgaatcaagacagctcagcttcagcaaaaaggcgagtaaattcagggattggctggattgcagtagcatggagatcaaaccaaacgttgtggccatggagatactggcatacctggcgtacgagactgtagcccaactggttgatttggccctactggttcgccaggatatggtcaccaaggctggtgatccattttcccatgcgatctcagccactttcatccaatatcataacagtgctgagtcgacggctgcctgcggcgtggaggcacacagcgacgctatccagccgtgtcatataagagaagcaatacggaggtactcgcacaggataggacctttaagccctttcaccaatgcgtaccgccgaaatggaatggcttttttagcttgttag

SEQ ID NO: 139411 - DNA, 954 bp, Artificial Sequence
  derived and/or modified sequence
atgaataatacggcagctagtccaatgtctactgcaacttcaagtagtggaaggagtacagggaagtctataagctttgcaacagaattacagagtatgatgtattctttaggtgatgctagaaggcctcttcatgaaacagcagttttggtagaagatgtggtacacactcagttaattaatctgttacagcaagctgctgaagtttctcagctgcggggagcaagggtaatcactcctgaagatcttctgtttttgatgcgcaaagataagaaaaaacttagaagactgctaaaatacatgtttatccgagactacaaatcaaagattgtcaaaggcatcgatgaggatgatcttctcgaagacaaattgagtggcagcaataatgcgaacaaaagacaaaagattgctcaggacttcctcaactctattgaccagacaggagaacttttagcaatgtttgaagatgacgaaattgatgaagttaaacaagaaagaatggagagagcagaaagacaaactcgaattatggattcagctcaatatgcagaattctgtgaaagtcgacaattaagtttctccaaaaaagcttccaaatttcgagactggttggactgcagcagtatggagataaaacccaatgttgtcgcaatggaaatcttagcatatttagcgtatgaaactgtggcacagttagtggatctggctcttcttgtgaggcaagacatggtaaccaaggcaggggaccccttcagccatgccatttctgcaaccttcattcagtatcacaactctgctgagagcactgcagcctgtggtgttgaggctcacagcgatgccatccagccctgccacatcagagaggccattcgacgctacagccacaggattggcccactttccccattcacaaatgcctaccgcaggaatgggatggcttttctagcctgctga

SEQ ID NO: 139412 - DNA, 2091 bp, Artificial Sequence
  derived and/or modified sequence
cacagccgagtcaccttttccctttctacactccacactctcagtcccccaccccgcccctttccaagcgtgtcccgggccgcagcagcagaaaccgcaccatctccacccccacattctcctcgcgggaagcgcagcagtgcctccaagggttcttaaagcagagatgaataatacggcagctagtccaatgtctactgcaacttcaagtagtggaaggagtacagggaagtctataagctttgcaacagaattacagagtatgatgtattctttaggtgatgctagaaggcctcttcatgaaacagcagttttggtagaagatgtggtacacactcagttaattaatctgttacagcaagctgctgaagtttctcagctgcggggagcaagggtaatcactcctgaagatcttctgtttttgatgcgcaaagataagaaaaaacttagaagactgctaaaatacatgtttatccgagactacaaatcaaagattgtcaaaggcatcgatgaggatgatcttctcgaagacaaattgagtggcagcaataatgcgaacaaaagacaaaagattgctcaggacttcctcaactctattgaccagacaggagaacttttagcaatgtttgaagatgacgaaattgatgaagttaaacaagaaagaatggagagagcagaaagacaaactcgaattatggattcagctcaatatgcagaattctgtgaaagtcgacaattaagtttctccaaaaaagcttccaaatttcgagactggttggactgcagcagtatggagataaaacccaatgttgtcgcaatggaaatcttagcatatttagcgtatgaaactgtggcacagttagtggatctggctcttcttgtgaggcaagacatggtaaccaaggcaggggaccccttcagccatgccatttctgcaaccttcattcagtatcacaactctgctgagagcactgcagcctgtggtgttgaggctcacagcgatgccatccagccctgccacatcagagaggccattcgacgctacagccacaggattggcccactttccccattcacaaatgcctaccgcaggaatgggatggcttttctagcctgctgatgtgacaactgtgatgtgcctgcaacaacaggaaaggcaatgttatattaaggtgatttcttgtgaacaaaataaaatacaaatttacctttcttttatctgagggagtgggctggtctgttgtgactttcaacttgctgactcctcctcttttccagcccctcaaccatcggtcttgtttactagatgggctgttcagctaattaatggcaggatgtttaggatagtctgtaggtggacaagaatgcagatcacacagttttgaaattttaatttgagtagatttactgccctcagctcacataccttaaaagcagtggttgcccccgtccagcgttttgtctgcattttatttgatatattttataatccaggtttggaacaaggaaacaaaattaaaaggacagtgagttttcgccttcccttacaccaccaactttactttccaacatttgttgacatgtgttttagtgacagctatccattttataaacttacagtaatcaaagatctaacagacctgataaatcacctgttcccacctcctttccccttcactccacttatagtatgtgtcattttcaatgcctgcttcccaacttcctgccatctgcctttcatgtgtgtttttcctcacacagaacctcttcctccatcttcatttccctccttttcctgttcctccaatccccagatccaccactcctgcacatgccatacacatttagaagccaagtattcagaatcagtagaaggggagcagagtgatttcttgcttcctcccttcaaagcactaccacacctagactggaaatgtgggctgggtaatttcttgctgttagcagccgagctacccttctggcatctatactttctccagtaaatgaggaaccgtaactctttggaacaaaccaaaatatagcagatgtaattgtacagttcctgattaaacttcagttgcaaaaaagaaa

SEQ ID NO: 139413 - DNA, 1377 bp, Artificial Sequence
  derived and/or modified sequence
ccccccccatcgccccgtcacacagccgagtcaccttttccctttctacactccacactctcagtcccccaccccgcccctttccaagcgtgtcccgggccgcagcagcagaaaccgcaccatctccacccccacattctcctcgcgggaagcgcagcagtgcctccaagggttcttaaagcagagatgaataatacggcagctagtccaatgtctactgcaacttcaagtagtggaaggagtacagggaagtctataagctttgcaacagaattacagagtatgatgtattctttaggtgatgctagaaggcctcttcatgaaacagcagttttggtagaagatgtggtacacactcagttaattaatctgttacagcaagctgctgaagtttctcagctgcggggagcaagggtaatcactcctgaagatcttctgtttttgatgcgcaaagataagaaaaaacttagaagactgctaaaatacatgtttatccgagactacaaatcaaagattgtcaaaggcatcgatgaggatgatcttctcgaagacaaattgagtggcagcaataatgcgaacaaaagacaaaagattgctcaggacttcctcaactctattgaccagacaggagaacttttagcaatgtttgaagatgacgaaattgatgaagttaaacaagaaagaatggagagagcagaaagacaaactcgaattatggattcagctcaatatgcagaattctgtgaaagtcgacaattaagtttctccaaaaaagcttccaaatttcgagactggttggactgcagcagtatggagataaaacccaatgttgtcgcaatggaaatcttagcatatttagcgtatgaaactgtggcacagttagtggatctggctcttcttgtgaggcaagacatggtaaccaaggcaggggaccccttcagccatgccatttctgcaaccttcattcagtatcacaactctgctgagagcactgcagcctgtggtgttgaggctcacagcgatgccatccagccctgccacatcagagaggccattcgacgctacagccacaggattggcccactttccccattcacaaatgcctaccgcaggaatgggatggcttttctagcctgctgatgtgacaactgtgatgtgcctgcaacaacaggaaaggcaatgttatattaaggagtaaaccaagccaattcagcacttcctgtttacttccttgtcatatgtaccatagatggtgacagacctgctctcaaaacaagcttccttcgtttaattctgcattttctgcttaggcaaccaccctatcaatatacttgaacaatgaaacaatttggctacggaagcactgtctctgaattc

SEQ ID NO: 139414 - DNA, 954 bp, Artificial Sequence
  derived and/or modified sequence
atgaacaatactgcagccagcccgatgagcactgcgacatcttcgtctggcagaagcactggaaagtcaatctcctttgcaacagagctgcagtctatgatgtactcattgggggatgccaggcgccctctgcacgagactgccgtgctcgtcgaagatgttgtgcacacacaactcatcaacctccttcaacaagctgccgaggtcagtcaactgcgcggagcacgagtcattacacctgaggacctgttgttcctgatgcgaaaagacaaaaagaagttacgcagactgctcaaatatatgtttatccgcgactataaatccaagatcgtgaagggaatcgatgaagatgatttgctggaggacaagctatccggtagcaataatgctaacaaaaggcagaagatcgcccaagattttctgaatagtatagaccagactggcgagttgctggccatgttcgaagacgacgaaatcgatgaagtaaaacaggagcgcatggagagagcagagcggcagaccagaattatggacagtgcccagtacgcggagttttgtgagtctcgccaactgtccttcagcaaaaaggcttccaaattccgggattggctcgactgctcttctatggaaattaagcctaatgtggtggccatggagattctggcatatcttgcgtacgagacagtggctcagttggtcgatctggcactgctcgtgaggcaagatatggtgaccaaagctggagatcctttcagtcatgctatttcagcgacatttatccagtaccacaatagtgctgaaagcacggctgcgtgcggtgtagaagcacactctgacgccatccaaccctgtcatattcgagaggcgattcgcaggtattcccaccggatcggtcctctcagccccttcacaaacgcataccgcaggaacggcatggcttttctggcctgttag

SEQ ID NO: 139415 - DNA, 954 bp, Artificial Sequence
  derived and/or modified sequence
atgaataatacagctgcttcccccatgtccacagcaacgtcatcttcagggcgttccaccggtaaaagtatttcctttgcaacggagcttcagagtatgatgtacagcctgggcgacgccagacggcctctgcatgagacagccgtgctcgtggaagacgtagttcacactcaactcattaacttgctgcagcaggctgctgaggtatcgcagttacgcggtgcccgtgtgatcacgcccgaggaccttctgttcctaatgcggaaagataagaagaaattgagacgtctactaaagtacatgtttattcgcgactataagtccaagatcgtgaagggtattgatgaagatgacctgcttgaggataaactctcaggaagcaataatgccaacaagagacagaagatagcccaggatttcctgaattcaatagaccagaccggcgagttgcttgctatgtttgaggatgatgagattgacgaagtgaagcaagagagaatggagcgtgcagagcgacaaactaggattatggactctgctcaatatgccgagttttgtgagtcacgccaactgtcattctctaagaaagcctccaaatttagggattggctggactgtagctctatggagatcaaacctaatgtcgtggctatggagatactggcttacttggcttatgaaaccgtagcccagctggtggatctggctctgctggtacgccaggacatggttactaaggcgggagaccccttcagccatgcgatatccgcgacctttatccagtatcacaacagcgcggagagtacggccgcttgtggcgtggaggcgcactcggatgcaattcagccatgccacatccgtgaagctatccgcaggtactctcaccgcattgggcctttgtctcccttcaccaacgcataccgacgaaatggcatggcattcctcgcctgctag

SEQ ID NO: 139416 - DNA, 954 bp, Artificial Sequence
  derived and/or modified sequence
atgaacaatactgctgcctcacccatgagtacggctacttcctctagcgggagaagcacgggcaagagcatctctttcgcaacagagcttcagtccatgatgtactccttgggagacgccaggcggcctctccacgagacagcagtgctagtggaggatgtggttcacactcaactcattaacttgctgcagcaggctgcagaagtgagccagctgaggggcgctagggtcatcacccctgaggacctcctttttctgatgaggaaggataagaagaaactgcgccgactcttgaaatacatgtttatcagagactacaagtcaaaaattgtgaagggcatcgatgaggacgacctactggaggacaagctctctggatctaataacgcaaacaaaagacaaaaaattgcccaggactttctgaatagcatcgaccagacgggagagctccttgccatgtttgaagatgatgaaatcgacgaggtgaagcaagagagaatggagagggccgagcgtcagacacgcataatggattctgcgcaatacgcggaattttgtgagagcagacagttgagtttttcaaaaaaagcatccaaattcagggactggctagattgttcaagcatggagattaagcctaacgtggttgccatggagatcctggcctaccttgcgtacgagactgtagcccaattggtcgatttggccctgctcgtacgccaggatatggttacaaaggcaggggacccattctcgcacgccatttcagccacctttatccagtatcacaactccgcagaaagtactgccgcttgcggcgttgaagctcacagtgacgcgatacagccctgtcacatacgggaggctatcaggcgctattctcaccgcatcggcccactctctcccttcacgaacgcctatagaaggaatgggatggcattcttagcatgctag

SEQ ID NO: 139417 - DNA, 954 bp, Artificial Sequence
  derived and/or modified sequence
atgaacaacaccgccgccagccccatgagcaccgccaccagcagcagcggcagaagcaccggcaagagcatcagcttcgccaccgagctgcagagcatgatgtacagcctgggcgacgccagaagacccctgcacgagaccgccgtgctggtggaggacgtggtgcacacccagctgatcaacctgctgcagcaggccgccgaggtgagccagctgagaggcgccagagtgatcacccccgaggacctgctgttcctgatgagaaaggacaagaagaagctgagaagactgctgaagtacatgttcatcagagactacaagagcaagatcgtgaagggcatcgacgaggacgacctgctggaggacaagctgagcggcagcaacaacgccaacaagagacagaagatcgcccaggacttcctgaacagcatcgaccagaccggcgagctgctggccatgttcgaggacgacgagatcgacgaggtgaagcaggagagaatggagagagccgagagacagaccagaatcatggacagcgcccagtacgccgagttctgcgagagcagacagctgagcttcagcaagaaggccagcaagttcagagactggctggactgcagcagcatggagatcaagcccaacgtggtggccatggagatcctggcctacctggcctacgagaccgtggcccagctggtggacctggccctgctggtgagacaggacatggtgaccaaggccggcgaccccttcagccacgccatcagcgccaccttcatccagtaccacaacagcgccgagagcaccgccgcctgcggcgtggaggcccacagcgacgccatccagccctgccacatcagagaggccatcagaagatacagccacagaatcggccccctgagccccttcaccaacgcctacagaagaaacggcatggccttcctggcctgctag

SEQ ID NO: 139418 - protein, 1052 aa, Artificial Sequence
  derived and/or modified sequence
MSSAAEPPPPPPPESAPSKPAASIASGGSNSSNKGGPEGVAAQAVASAASAGPADAEMEEIFDDASPGKQKEIQEPDPTYEEKMQTDRANRFEYLLKQTELFAHFIQPAAQKTPTSPLKMKPGRPRIKKDEKQNLLSVGDYRHRRTEQEEDEELLTESSKATNVCTRFEDSPSYVKWGKLRDYQVRGLNWLISLYENGINGILADEMGLGKTLQTISLLGYMKHYRNIPGPHMVLVPKSTLHNWMSEFKRWVPTLRSVCLIGDKEQRAAFVRDVLLPGEWDVCVTSYEMLIKEKSVFKKFNWRYLVIDEAHRIKNEKSKLSEIVREFKTTNRLLLTGTPLQNNLHELWSLLNFLLPDVFNSADDFDSWFDTNNCLGDQKLVERLHMVLRPFLLRRIKADVEKSLPPKKEVKIYVGLSKMQREWYTRILMKDIDILNSAGKMDKMRLLNILMQLRKCCNHPYLFDGAEPGPPYTTDMHLVTNSGKMVVLDKLLPKLKEQGSRVLIFSQMTRVLDILEDYCMWRNYEYCRLDGQTPHDERQDSINAYNEPNSTKFVFMLSTRAGGLGINLATADVVILYDSDWNPQVDLQAMDRAHRIGQTKTVRVFRFITDNTVEERIVERAEMKLRLDSIVIQQGRLVDQNLNKIGKDEMLQMIRHGATHVFASKESEITDEDIDGILERGAKKTAEMNEKLSKMGESSLRNFTMDTESSVYNFEGEDYREKQKIAFTEWIEPPKRERKANYAVDAYFREALRVSEPKAPKAPRPPKQPNVQDFQFFPPRLFELLEKEILFYRKTIGYKVPRNPELPNAAQAQKEEQLKIDEAESLNDEELEEKEKLLTQGFTNWNKRDFNQFIKANEKWGRDDIENIAREVEGKTPEEVIEYSAVFWERCNELQDIEKIMAQIERGEARIQRRISIKKALDTKIGRYKAPFHQLRISYGTNKGKNYTEEEDRFLICMLHKLGFDKENVYDELRQCIRNSPQFRFDWFLKSRTAMELQRRCNTLITLIERENMELEEKEKAEKKKRGPKPSTQKRKMDGAPDGRGRKKKLKL

SEQ ID NO: 139419 - protein, 995 aa, Artificial Sequence [sequence omitted]

SEQ ID NO: 139420 - DNA, 3159 bp, Artificial Sequence
  derived and/or modified sequence
atgagcagcgccgccgagcccccccccccccccccccccgagagcgcccccagcaagcccgccgccagcatcgccagcggcggcagcaacagcagcaacaagggcggccccgagggcgtggccgcccaggccgtggccagcgccgccagcgccggccccgccgacgccgagatggaggagatcttcgacgacgccagccccggcaagcagaaggagatccaggagcccgaccccacctacgaggagaagatgcagaccgacagagccaacagattcgagtacctgctgaagcagaccgagctgttcgcccacttcatccagcccgccgcccagaagacccccaccagccccctgaagatgaagcccggcagacccagaatcaagaaggacgagaagcagaacctgctgagcgtgggcgactacagacacagaagaaccgagcaggaggaggacgaggagctgctgaccgagagcagcaaggccaccaacgtgtgcaccagattcgaggacagccccagctacgtgaagtggggcaagctgagagactaccaggtgagaggcctgaactggctgatcagcctgtacgagaacggcatcaacggcatcctggccgacgagatgggcctgggcaagaccctgcagaccatcagcctgctgggctacatgaagcactacagaaacatccccggcccccacatggtgctggtgcccaagagcaccctgcacaactggatgagcgagttcaagagatgggtgcccaccctgagaagcgtgtgcctgatcggcgacaaggagcagagagccgccttcgtgagagacgtgctgctgcccggcgagtgggacgtgtgcgtgaccagctacgagatgctgatcaaggagaagagcgtgttcaagaagttcaactggagatacctggtgatcgacgaggcccacagaatcaagaacgagaagagcaagctgagcgagatcgtgagagagttcaagaccaccaacagactgctgctgaccggcacccccctgcagaacaacctgcacgagctgtggagcctgctgaacttcctgctgcccgacgtgttcaacagcgccgacgacttcgacagctggttcgacaccaacaactgcctgggcgaccagaagctggtggagagactgcacatggtgctgagacccttcctgctgagaagaatcaaggccgacgtggagaagagcctgccccccaagaaggaggtgaagatctacgtgggcctgagcaagatgcagagagagtggtacaccagaatcctgatgaaggacatcgacatcctgaacagcgccggcaagatggacaagatgagactgctgaacatcctgatgcagctgagaaagtgctgcaaccacccctacctgttcgacggcgccgagcccggccccccctacaccaccgacatgcacctggtgaccaacagcggcaagatggtggtgctggacaagctgctgcccaagctgaaggagcagggcagcagagtgctgatcttcagccagatgaccagagtgctggacatcctggaggactactgcatgtggagaaactacgagtactgcagactggacggccagaccccccacgacgagagacaggacagcatcaacgcctacaacgagcccaacagcaccaagttcgtgttcatgctgagcaccagagccggcggcctgggcatcaacctggccaccgccgacgtggtgatcctgtacgacagcgactggaacccccaggtggacctgcaggccatggacagagcccacagaatcggccagaccaagaccgtgagagtgttcagattcatcaccgacaacaccgtggaggagagaatcgtggagagagccgagatgaagctgagactggacagcatcgtgatccagcagggcagactggtggaccagaacctgaacaagatcggcaaggacgagatgctgcagatgatcagacacggcgccacccacgtgttcgccagcaaggagagcgagatcaccgacgaggacatcgacggcatcctggagagaggcgccaagaagaccgccgagatgaacgagaagctgagcaagatgggcgagagcagcctgagaaacttcaccatggacaccgagagcagcgtgtacaacttcgagggcgaggactacagagagaagcagaagatcgccttcaccgagtggatcgagccccccaagagagagagaaaggccaactacgccgtggacgcctacttcagagaggccctgagagtgagcgagcccaaggcccccaaggcccccagaccccccaagcagcccaacgtgcaggacttccagttcttcccccccagactgttcgagctgctggagaaggagatcctgttctacagaaagaccatcggctacaaggtgcccagaaaccccgagctgcccaacgccgcccaggcccagaaggaggagcagctgaagatcgacgaggccgagagcctgaacgacgaggagctggaggagaaggagaagctgctgacccagggcttcaccaactggaacaagagagacttcaaccagttcatcaaggccaacgagaagtggggcagagacgacatcgagaacatcgccagagaggtggagggcaagacccccgaggaggtgatcgagtacagcgccgtgttctgggagagatgcaacgagctgcaggacatcgagaagatcatggcccagatcgagagaggcgaggccagaatccagagaagaatcagcatcaagaaggccctggacaccaagatcggcagatacaaggcccccttccaccagctgagaatcagctacggcaccaacaagggcaagaactacaccgaggaggaggacagattcctgatctgcatgctgcacaagctgggcttcgacaaggagaacgtgtacgacgagctgagacagtgcatcagaaacagcccccagttcagattcgactggttcctgaagagcagaaccgccatggagctgcagagaagatgcaacaccctgatcaccctgatcgagagagagaacatggagctggaggagaaggagaaggccgagaagaagaagagaggccccaagcccagcacccagaagagaaagatggacggcgcccccgacggcagaggcagaaagaagaagctgaagctgtag

SEQ ID NO: 139421 - DNA, 2988 bp, Artificial Sequence
  derived and/or modified sequence
atggaggagatcttcgacgacgccagccccggcaagcagaaggagatccaggagcccgaccccacctacgaggagaagatgcagaccgacagagccaacagattcgagtacctgctgaagcagaccgagctgttcgcccacttcatccagcccgccgcccagaagacccccaccagccccctgaagatgaagcccggcagacccagaatcaagaaggacgagaagcagaacctgctgagcgtgggcgactacagacacagaagaaccgagcaggaggaggacgaggagctgctgaccgagagcagcaaggccaccaacgtgtgcaccagattcgaggacagccccagctacgtgaagtggggcaagctgagagactaccaggtgagaggcctgaactggctgatcagcctgtacgagaacggcatcaacggcatcctggccgacgagatgggcctgggcaagaccctgcagaccatcagcctgctgggctacatgaagcactacagaaacatccccggcccccacatggtgctggtgcccaagagcaccctgcacaactggatgagcgagttcaagagatgggtgcccaccctgagaagcgtgtgcctgatcggcgacaaggagcagagagccgccttcgtgagagacgtgctgctgcccggcgagtgggacgtgtgcgtgaccagctacgagatgctgatcaaggagaagagcgtgttcaagaagttcaactggagatacctggtgatcgacgaggcccacagaatcaagaacgagaagagcaagctgagcgagatcgtgagagagttcaagaccaccaacagactgctgctgaccggcacccccctgcagaacaacctgcacgagctgtggagcctgctgaacttcctgctgcccgacgtgttcaacagcgccgacgacttcgacagctggttcgacaccaacaactgcctgggcgaccagaagctggtggagagactgcacatggtgctgagacccttcctgctgagaagaatcaaggccgacgtggagaagagcctgccccccaagaaggaggtgaagatctacgtgggcctgagcaagatgcagagagagtggtacaccagaatcctgatgaaggacatcgacatcctgaacagcgccggcaagatggacaagatgagactgctgaacatcctgatgcagctgagaaagtgctgcaaccacccctacctgttcgacggcgccgagcccggccccccctacaccaccgacatgcacctggtgaccaacagcggcaagatggtggtgctggacaagctgctgcccaagctgaaggagcagggcagcagagtgctgatcttcagccagatgaccagagtgctggacatcctggaggactactgcatgtggagaaactacgagtactgcagactggacggccagaccccccacgacgagagacaggacagcatcaacgcctacaacgagcccaacagcaccaagttcgtgttcatgctgagcaccagagccggcggcctgggcatcaacctggccaccgccgacgtggtgatcctgtacgacagcgactggaacccccaggtggacctgcaggccatggacagagcccacagaatcggccagaccaagaccgtgagagtgttcagattcatcaccgacaacaccgtggaggagagaatcgtggagagagccgagatgaagctgagactggacagcatcgtgatccagcagggcagactggtggaccagaacctgaacaagatcggcaaggacgagatgctgcagatgatcagacacggcgccacccacgtgttcgccagcaaggagagcgagatcaccgacgaggacatcgacggcatcctggagagaggcgccaagaagaccgccgagatgaacgagaagctgagcaagatgggcgagagcagcctgagaaacttcaccatggacaccgagagcagcgtgtacaacttcgagggcgaggactacagagagaagcagaagatcgccttcaccgagtggatcgagccccccaagagagagagaaaggccaactacgccgtggacgcctacttcagagaggccctgagagtgagcgagcccaaggcccccaaggcccccagaccccccaagcagcccaacgtgcaggacttccagttcttcccccccagactgttcgagctgctggagaaggagatcctgttctacagaaagaccatcggctacaaggtgcccagaaaccccgagctgcccaacgccgcccaggcccagaaggaggagcagctgaagatcgacgaggccgagagcctgaacgacgaggagctggaggagaaggagaagctgctgacccagggcttcaccaactggaacaagagagacttcaaccagttcatcaaggccaacgagaagtggggcagagacgacatcgagaacatcgccagagaggtggagggcaagacccccgaggaggtgatcgagtacagcgccgtgttctgggagagatgcaacgagctgcaggacatcgagaagatcatggcccagatcgagagaggcgaggccagaatccagagaagaatcagcatcaagaaggccctggacaccaagatcggcagatacaaggcccccttccaccagctgagaatcagctacggcaccaacaagggcaagaactacaccgaggaggaggacagattcctgatctgcatgctgcacaagctgggcttcgacaaggagaacgtgtacgacgagctgagacagtgcatcagaaacagcccccagttcagattcgactggttcctgaagagcagaaccgccatggagctgcagagaagatgcaacaccctgatcaccctgatcgagagagagaacatggagctggaggagaaggagaaggccgagaagaagaagagaggccccaagcccagcacccagaagagaaagatggacggcgcccccgacggcagaggcagaaagaagaagctgaagctgtag

SEQ ID NO: 139422 - DNA, 3159 bp, Artificial Sequence
  derived and/or modified sequence
atgagctccgccgctgaacctcccccgccacctccccctgagagtgccccctccaaaccagcagcctcaatcgcctctggagggagcaattcatctaacaaggggggaccggaaggcgtggctgcccaagctgtagccagtgcagcaagtgctgggcccgcggatgccgagatggaggaaatcttcgatgacgctagtcctggaaagcagaaggaaatccaagaacctgaccccacatacgaggaaaagatgcagacggatcgcgctaatcggttcgagtatcttcttaagcaaaccgagctgtttgcgcacttcatccaacccgccgcccaaaagacccccacgtccccactcaaaatgaagcccggaagaccacgaatcaaaaaggatgaaaagcagaatcttctttcagttggagattaccgccaccgacggaccgaacaagaagaggatgaagagcttctcacggaatccagcaaagcaacaaacgtatgcaccaggttcgaggatagtcccagttacgtaaagtggggcaagctgcgtgactaccaggtgaggggactgaactggctgatttccctgtacgaaaacggtataaacgggattctagcggatgaaatgggcctggggaaaaccctacagactatttccctgttgggatacatgaaacactataggaacatcccaggtccacatatggttctggttcccaagagcactcttcacaactggatgtccgagttcaaaagatgggttcctactctcaggtctgtttgtctgatcggtgacaaggaacagagagctgccttcgtgcgggacgtgctgttgcctggggagtgggatgtttgcgtgaccagctacgagatgctgattaaagaaaagtccgtgtttaaaaagttcaattggaggtaccttgtaatcgacgaagctcaccggattaagaatgagaagtctaaacttagtgagattgttagagaattcaagaccactaataggctcctcctcaccgggacacccttacagaataatttacatgaattgtggagtctgctgaacttcctcttacccgatgtttttaactctgcggacgacttcgacagctggttcgacaccaacaattgtctcggggatcagaagttagtagagaggctgcatatggtgctcaggccattcttactcagacgaattaaggccgatgtagagaagtccctgccaccaaagaaggaagttaagatctatgtcggcctttctaagatgcagagagagtggtatacacgaattctaatgaaagacattgacatcttgaatagcgccggcaagatggataaaatgcgacttctgaatattctgatgcaattgagaaagtgttgcaatcatccttacttatttgacggagctgagccaggaccaccttacaccacagatatgcacctggtgaccaatagtgggaaaatggtcgttttagacaaactgttgcccaagctaaaggaacagggcagtcgagtgctaattttctcacaaatgactcgggtcctcgacattctcgaagactactgtatgtggaggaactacgaatattgcaggcttgacggacaaactccgcacgacgaacggcaggattcaattaatgcatacaatgaacctaatagtactaaattcgtcttcatgctgtccactagagccgggggacttggcattaacctggctacagcagacgtcgtcatcttatatgatagcgactggaatccgcaggtggatctgcaagctatggatagagcgcaccggattggccagacaaagactgtccgggtctttaggtttattaccgataacaccgtggaagaacgcatcgtcgaacgcgccgagatgaaactccgcctggactctatagtgatccagcagggccgactggtggatcaaaacctgaacaaaataggaaaagacgagatgctccaaatgatacgccacggagctacccatgtgttcgctagcaaggagtcagagatcacagacgaagacattgacggtatcttagaacgaggggcaaaaaagacagctgagatgaacgagaaattgagcaaaatgggagaatcatcactgagaaacttcaccatggacacagaatctagtgtatacaactttgaaggcgaagactaccgagaaaaacagaagatagcgttcaccgagtggatagaacctccaaagagagagagaaaagctaattacgccgtcgacgcatatttcagggaggcactccgggtttcggaaccgaaagcccctaaggctccacgcccccccaaacagcctaacgtgcaggattttcagttttttcctccccggctctttgagttacttgagaaagaaattctgttctacagaaagaccatcggctataaggtgcccaggaaccccgagctccccaacgccgcacaggcccagaaagaagaacaacttaaaattgatgaggcggagtccttgaacgatgaggagttagaggagaaggaaaagctgctgacacaagggttcaccaactggaataagcgggatttcaatcagttcatcaaagcaaacgaaaaatggggccgcgacgatattgagaacatcgctcgcgaagtggaaggcaaaacccccgaggaagtgatcgaatacagtgctgtgttctgggaacggtgcaatgaactccaggacatagaaaagatcatggcccagatcgagagaggtgaggctaggatccaacgccgaatttccatcaagaaggcactggacaccaagattggtcgatacaaggcgccatttcaccagctgagaatatcatacgggactaacaaaggcaaaaactatacggaagaagaagaccgcttcctgatctgcatgctgcacaaactcggtttcgataaggagaatgtgtatgatgaactgagacagtgcatacggaactctccgcagttccggttcgactggtttctcaagagtcggacagctatggagctgcaaaggcggtgcaacacattaataaccctgatcgagagggagaatatggagctggaagagaaggagaaagccgagaagaagaaacgcggtcctaaaccaagcactcagaaacgaaagatggatggggctccggacggtaggggccggaaaaaaaagttaaaactttag

SEQ ID NO: 139423 - DNA, 2988 bp, Artificial Sequence
  derived and/or modified sequence
atggaggaaattttcgatgacgcatctccgggtaaacagaaggaaattcaagaaccggaccccacatatgaggagaaaatgcagaccgaccgggccaacaggtttgaatatttgctaaagcagacggaactcttcgcccactttatccaacccgccgcacagaaaacccccacatctccattgaagatgaagccaggccgtcctagaatcaaaaaggacgaaaaacaaaatctacttagtgtgggagattatagacatcgacgaaccgagcaggaagaggacgaggaactgcttacagagtccagtaaggcaaccaatgtctgcactcgctttgaggattctcccagctatgtgaagtgggggaagctacgtgactaccaagtccgggggctgaattggctaataagtctttacgagaatggtataaacgggatcctggccgatgaaatgggcttgggaaaaactcttcagacaatctcgctcctgggctatatgaagcactaccgcaatatccccggcccgcacatggtcttggtgcctaaatcgaccctgcataactggatgagcgagtttaaacgttgggttccaactctcaggagcgtatgtcttatcggggacaaagagcagcgggcagcttttgtaagggatgttctcctgcccggcgaatgggacgtttgtgtgacatcatacgaaatgctgatcaaggagaaatccgtctttaagaagtttaattggagatacctggtgatcgatgaagcccaccggattaagaatgagaagagcaagctgtccgagatcgtacgggagttcaagacgaccaaccggctgctcctgaccggcaccccactgcagaacaacctgcacgaactttggtccttgctgaactttctcctgcccgacgtctttaattcagcagatgactttgattcatggttcgacacaaacaattgcctgggagatcagaagctcgtcgagcggctgcatatggtgttgagaccgttcctcctgaggagaatcaaagccgatgtggagaagtcactaccaccaaaaaaggaggtaaagatctacgttggtctgtctaaaatgcagagggaatggtacactcggattctcatgaaagacatcgatatcctcaacagcgccgggaaaatggacaagatgcgcctcctgaacatcttgatgcagttgaggaagtgttgcaaccatccctatctgtttgacggcgcagagccaggccctccctacacaactgacatgcacctcgttaccaattctggcaaaatggtggtgctggataaactgttacccaagttgaaggagcagggatcacgtgtcttaatttttagccagatgactagagtgctggacatcctggaagactactgtatgtggagaaattacgagtactgccgacttgacggtcaaacgccccacgatgagcgccaggactccattaatgcctacaacgaaccaaattctacgaaatttgtgtttatgttgagcactcgggccggcggcctgggcatcaacctggctacagctgacgtcgtcattctgtacgattccgactggaacccccaagtggacctacaagcaatggaccgcgcgcatcggattgggcagactaaaaccgttcgggtgtttaggtttatcactgacaataccgttgaggagcgaatagttgagagagcagagatgaaacttcggctggactcaatagtgatccaacaaggtaggctggtggatcagaatttaaataagattggcaaagatgagatgttgcagatgattagacacggggctactcatgtgtttgcaagcaaggagtccgagataactgatgaggatattgatggcattttggagaggggagctaaaaaaacagcagagatgaacgagaaactgagcaagatgggcgagagctcccttaggaatttcaccatggataccgagtccagtgtttataacttcgagggtgaagattacagggagaagcagaaaattgcttttaccgagtggatcgagccccccaaaagagagagaaaggcaaactacgcagttgacgcctactttagagaggcattaagggtctcggaaccaaaagcgccaaaagcgccccggcctccaaaacaacctaatgtccaggacttccagttcttccctccccgattgtttgaactcctggagaaagagatacttttttaccggaagaccatagggtataaggtacctcgcaatcccgaactgccaaatgctgcccaggcccagaaggaagaacagctcaagatcgatgaagctgaatccttgaatgatgaggagctcgaggagaaagaaaaattgcttacgcaaggttttactaattggaataagagggatttcaatcagttcattaaggccaacgagaaatggggcagagacgatattgagaatatcgctcgggaagtcgagggcaaaacacccgaggaggtgattgagtactccgccgtcttctgggaaagatgtaacgagttacaagacatcgaaaagattatggctcagatcgagcgcggagaggctcggatccagcggcgaatctctataaaaaaggcgttggacactaaaattggaaggtataaagctccttttcaccaattgcggatcagttatggcacaaacaaaggtaagaattacaccgaagaggaggatagattcctgatatgcatgctgcacaaattgggctttgataaagagaatgtttatgatgagctcagacagtgtatcagaaacagccctcaatttagattcgactggttcctcaaatcacggaccgccatggagctccagagacgctgcaatacattgataacactaatagagcgcgagaacatggaactggaggaaaaggagaaggcagagaagaagaaaagaggtccaaagccgtcaactcagaaaaggaagatggacggtgcccccgacgggcgtggacggaaaaagaaacttaagctgtag

SEQ ID NO: 139424 - DNA, 2988 bp, Artificial Sequence
  derived and/or modified sequence
atggaagagattttcgacgatgcaagccccgggaagcagaaagagattcaggaaccggacccaacttatgaggagaagatgcagactgacagagccaaccgcttcgagtatctgctgaaacagacagagttattcgcccacttcattcagcctgcagctcagaagactcctacctcgcccctcaagatgaagcctgggagacctcgtatcaaaaaagatgagaagcaaaacctgcttagtgtcggggactataggcaccggcgaactgagcaggaagaagatgaggaactgcttaccgaatcctctaaggccaccaacgtgtgcacaaggttcgaggactctccctcatacgttaagtgggggaagctacgagactatcaggtacgtggcctcaattggctgatctcactctatgagaacggcatcaatggcatcctggctgatgaaatgggattaggcaaaacgttgcagaccatctcattactgggatacatgaagcactaccgcaacattcccgggccccacatggtcttggtccctaagtcaactctgcacaactggatgtctgaatttaagcgctgggtgccgaccctgaggtcggtctgtctcatcggggacaaggagcaacgcgccgcttttgttagagacgtgctgctcccaggcgaatgggacgtgtgcgttactagttacgagatgctcataaaggagaagtctgtctttaaaaaattcaactggagatatcttgtcatcgacgaggcacaccggattaagaatgagaaatctaagttgtcggaaatcgttcgtgagttcaagacaacaaatcggctgctgctgacaggaacccccctgcagaacaatcttcatgaactgtggtcgctactcaatttcctcctccctgatgtattcaactcggccgatgatttcgactcctggtttgacaccaacaactgtctcggcgaccagaaactggtcgagcgcctgcacatggttctgcgtcctttcctgcttcgacggattaaagccgatgtcgagaaatccctccctcctaaaaaagaggttaagatttatgtaggcctatctaaaatgcagcgtgagtggtacacccggatcctaatgaaggatatcgatattctcaactcggccggcaaaatggacaagatgcgactcctcaatatcctcatgcaactcagaaagtgttgcaatcacccttatttgtttgacggggctgaacccggaccaccttacactacagatatgcacctggttacgaactccgggaagatggtggttctggacaagctgctccctaagttaaaggagcagggctcaagggtcctaatctttagccaaatgaccagggttctggacatcctggaagactattgtatgtggcgaaactatgaatactgccggcttgatggacagacaccacacgacgaaaggcaggatagcattaacgcatacaatgagccgaactcaactaagttcgtgtttatgctgagcacccgggcggggggacttggcatcaatctggctacagctgatgtcgtgattctctatgactctgattggaaccctcaagtggacctgcaggccatggatagggcacatcgtattgggcagacaaagacagtccgggtttttcgatttataactgacaataccgtggaagagagaattgtggagcgcgcagaaatgaaactgagattggactccattgtaatccaacagggcagactggttgatcagaatcttaataaaataggaaaggacgagatgctccagatgattcgtcacggtgctacccatgtgttcgcctctaaagagtccgagattactgacgaggacattgacggtattcttgagcgaggggcaaagaagaccgcggagatgaatgagaagctgagtaaaatgggcgaaagctctctgcgcaactttacaatggacactgagtctagcgtgtataactttgagggggaggactaccgggagaagcagaagatagctttcactgagtggattgagcccccaaaacgggaacgaaaggccaactacgcagtcgacgcctattttagagaggccctgagggtaagcgagccaaaggcgcccaaggctccacgaccccccaagcaaccaaatgtccaagactttcagttcttcccaccaagactgttcgaactactggagaaggagatattgttctaccggaaaaccatcggatacaaagtgccgcgaaacccagagctgcctaacgccgctcaggcacaaaaggaggagcagcttaaaatcgatgaggctgaaagcctgaacgacgaagagctggaggaaaaggagaagttgttgacccaaggctttacaaattggaataaaagggacttcaaccaatttatcaaagccaatgaaaagtggggtcgtgacgatatcgagaacatagcacgggaggtggaagggaaaactcccgaagaggtgatagagtactcagcggtgttctgggaacgatgcaacgagttacaggatatagaaaagataatggcccaaatagaacggggtgaagctcgaatacagcgtcgaatatctatcaagaaggcgttggacacgaagatcggacggtataaggccccttttcaccagctacgaatctcctacggcactaataaggggaaaaactatacagaagaggaggatcggttcctcatatgcatgctgcataaactcggcttcgacaaggagaacgtgtacgacgaactccgccagtgtattcgcaatagtccgcagttcagatttgattggtttctgaaaagccggactgccatggagcttcagaggagatgtaataccctgattacactaattgagcgggagaacatggagttagaggagaaagaaaaggcggaaaaaaaaaagcgtgggccgaagccttccacgcagaagcggaagatggacggcgccccagatgggcgcggacggaagaagaagctgaagctatag

SEQ ID NO: 139425 - DNA, 3159 bp, Artificial Sequence
  derived and/or modified sequence
atgagcagcgctgctgagcccccacctcctcctcctcctgagagcgcccccagcaagccagctgccagcatcgccagcggcggcagcaacagcagcaacaagggcggccctgagggcgtggccgcccaggccgtggccagcgctgccagcgctggccctgcagatgctgagatggaggagatctttgatgatgccagccctgggaagcagaaggagatccaggagccagaccccacctatgaggagaagatgcagacagaccgggccaacagatttgagtacctgctgaagcagacagagctgtttgcccacttcatccagcctgctgcccagaagacccccaccagccccctgaagatgaagccaggccggccccgcatcaagaaggatgagaagcagaacctgctgtctgtgggggactaccgccacagaagaacagagcaggaggaggatgaggagctgctgacagagagcagcaaggccaccaacgtgtgcaccaggtttgaggacagccccagctatgtgaagtggggcaagctgcgggactaccaggtgcggggcctgaactggctgatcagcctgtatgaaaatggcatcaatggcatcctggctgatgagatgggcctgggcaagaccctgcagaccatcagcctgctgggctacatgaagcactacagaaacatccctggcccccacatggtgctggtgcccaagagcaccctgcacaactggatgtctgagttcaagcgctgggtgcccaccctgcggtctgtgtgcctgattggagacaaggagcagagagctgcctttgtgagagatgtgctgctgcctggagagtgggatgtgtgtgtgaccagctatgagatgctgatcaaggagaagtctgtgttcaagaagttcaactggagatacctggtgattgatgaggcccaccgcatcaagaatgagaagagcaagctgtctgaaattgtgcgggagttcaagaccaccaaccggctgctgctgaccggcacccccctgcagaacaacctgcacgagctgtggagcctgctgaacttcctgctgcctgatgtgttcaacagcgcagatgactttgacagctggtttgacaccaacaactgcctgggggaccagaagctggtggagcggctgcacatggtgctgcggcccttcctgctgcggcgcatcaaggcagatgtggagaagagcctgccccccaagaaggaggtgaagatctacgtgggcctgagcaagatgcagcgggagtggtacacccgcatcctgatgaaggacatcgacatcctgaacagcgctgggaagatggacaagatgaggctgctgaacatcctgatgcagctgaggaagtgctgcaaccacccctacctgtttgatggagctgagcccggccccccctacaccacagacatgcacctggtgaccaacagcggcaagatggtggtgctggacaagctgctgcccaagctgaaggagcagggcagccgggtgctgatcttcagccagatgaccagggtgctggacatcctggaggactactgcatgtggaggaactatgagtactgccgcctggatggccagacccctcatgatgagcggcaggacagcatcaatgcctacaatgagcccaacagcaccaagtttgtgttcatgctgagcaccagggctgggggcctgggcatcaacctggccacagcagatgtggtgatcctgtatgacagcgactggaacccccaggtggacctgcaggccatggaccgggcccaccgcatcggccagaccaagacagtgcgggtcttccgcttcatcacagacaacacagtggaggagagaattgtggagagagctgagatgaagctgcggctggacagcatcgtcatccagcagggccgcctggtggaccagaacctgaacaagattggcaaggatgagatgctgcagatgatccgccacggggccacccacgtgtttgccagcaaggagagcgagatcacagatgaggacattgatggcatcctggagcggggggccaagaagacagctgagatgaatgagaagctgagcaagatgggagagagcagcctgaggaacttcaccatggacacagagagctctgtgtacaactttgaaggagaggactaccgggagaagcagaagatcgccttcacagagtggattgagccccccaagcgggagaggaaggccaactatgctgtggatgcctacttccgggaggccctgcgggtgtctgagcccaaggcccccaaggcccccaggcctcccaagcagcccaacgtgcaggacttccagttcttccccccccggctgtttgagctgctggagaaggagatcctcttctacaggaagaccatcggctacaaggtgcccaggaaccctgagctgcccaatgctgcccaggcccagaaggaggagcagctgaagattgatgaagctgagagcctgaatgatgaggagctggaggagaaggagaagctgctgacccagggcttcaccaactggaacaagagggacttcaaccagttcatcaaggccaatgagaagtggggcagagatgacatcgagaacatcgcccgggaggtggagggcaagaccccagaggaggtgattgagtacagcgctgtgttctgggagcgctgcaatgagctgcaggacatcgagaagatcatggcccagatcgagcggggggaggcccgcatccagaggcgcatcagcatcaagaaggccctggacaccaagattggccgctacaaggcccccttccaccagctgcgcatctcctatggcaccaacaagggcaagaactacacagaggaggaggaccgcttcctgatctgcatgctgcacaagctgggctttgacaaggaaaatgtgtatgatgagctgcggcagtgcatccggaacagcccccagttccgctttgactggttcctgaagagcaggacagccatggagctgcagaggcgctgcaacaccctcatcaccctcatcgagcgggagaacatggagctggaggagaaggagaaggccgagaagaagaagaggggccccaagcccagcacccagaagaggaagatggatggagccccagatggccggggcaggaagaagaagctgaagctgtag

SEQ ID NO: 139426 - DNA, 2988 bp, Artificial Sequence
  derived and/or modified sequence
atggaggagatctttgatgatgccagccctgggaagcagaaggagatccaggagccagaccccacctatgaggagaagatgcagacagaccgggccaacagatttgagtacctgctgaagcagacagagctgtttgcccacttcatccagcctgctgcccagaagacccccaccagccccctgaagatgaagccaggccggccccgcatcaagaaggatgagaagcagaacctgctgtctgtgggggactaccgccacagaagaacagagcaggaggaggatgaggagctgctgacagagagcagcaaggccaccaacgtgtgcaccaggtttgaggacagccccagctatgtgaagtggggcaagctgcgggactaccaggtgcggggcctgaactggctgatcagcctgtatgaaaatggcatcaatggcatcctggctgatgagatgggcctgggcaagaccctgcagaccatcagcctgctgggctacatgaagcactacagaaacatccctggcccccacatggtgctggtgcccaagagcaccctgcacaactggatgtctgagttcaagcgctgggtgcccaccctgcggtctgtgtgcctgattggagacaaggagcagagagctgcctttgtgagagatgtgctgctgcccggggagtgggatgtgtgtgtgaccagctatgagatgctgatcaaggagaagagcgtcttcaagaagttcaactggagatacctggtgattgatgaggcccaccgcatcaagaatgagaagagcaagctgtctgagatcgtgcgggagttcaagaccaccaaccggctgctgctgaccggcacccccctgcagaacaacctgcacgagctgtggagcctgctgaacttcctgctgcctgatgtgttcaacagcgcagatgactttgacagctggtttgacaccaacaactgcctgggggaccagaagctggtggagcggctgcacatggtgctgcggcccttcctgctgcggcgcatcaaggcagatgtggagaagagcctgccccccaagaaggaggtgaagatctacgtgggcctgagcaagatgcagcgggagtggtacacccgcatcctgatgaaggacatcgacatcctgaacagcgctgggaagatggacaagatgaggctgctgaacatcctgatgcagctgaggaagtgctgcaaccacccctacctgtttgatggagctgagcccggccccccctacaccacagacatgcacctggtgaccaacagcggcaagatggtggtgctggacaagctgctgcccaagctgaaggagcagggcagccgggtgctgatcttcagccagatgaccagggtgctggacatcctggaggactactgcatgtggagaaattatgagtactgccgcctggatggccagacccctcatgatgagcggcaggacagcatcaatgcctacaatgagcccaacagcaccaagtttgtgttcatgctgagcacccgggccggcggcctgggcatcaacctggccacagcagatgtggtgatcctgtatgacagcgactggaacccccaggtggacctgcaggccatggaccgggcccacagaattggccagaccaagacagtgcgggtcttccgcttcatcacagacaacacagtggaggagcgcatcgtggagcgggcagagatgaagctgcggctggacagcatcgtcatccagcagggccgcctggtggaccagaacctgaacaagattggcaaggatgagatgctgcagatgatcagacatggagccacccacgtgtttgccagcaaggagagcgagatcacagatgaagatattgatggcatcctggagcggggggccaagaagacagctgagatgaatgagaagctgagcaagatgggagagagcagcctgaggaacttcaccatggacacagagagctctgtgtacaactttgaaggagaggactaccgggagaagcagaagatcgccttcacagagtggattgagccccccaagcgggagaggaaggccaactatgctgtggatgcctacttccgggaggccctgcgggtgtctgagcccaaggcccccaaggccccccggccccccaagcagcccaacgtgcaggacttccagttcttccccccccggctgtttgagctgctggagaaggagatcctcttctacaggaagaccatcggctacaaggtgcccagaaatcctgagctgcccaatgctgcccaggcccagaaggaggagcagctgaagattgatgaggccgagagcctgaatgatgaggagctggaggagaaggagaagctgctgacccagggcttcaccaactggaacaagagggacttcaaccagttcatcaaggccaatgagaagtggggcagagatgacattgaaaatattgcccgggaggtggagggcaagaccccagaggaggtgattgagtacagcgctgtgttctgggagcgctgcaatgagctgcaggacatcgagaagatcatggcccagatcgagcggggggaggcccgcatccagaggcgcatcagcatcaagaaggccctggacaccaagattggccgctacaaggcccccttccaccagctgcgcatctcctatggcaccaacaagggcaagaactacacagaggaggaggaccgcttcctgatctgcatgctgcacaagctgggctttgacaaggaaaatgtgtatgatgagctgcggcagtgcatccggaacagcccccagttccgctttgactggttcctgaagagcaggacagccatggagctgcagaggcgctgcaacaccctcatcaccctgattgagcgggagaacatggagctggaggagaaggagaaggccgagaagaagaagaggggccccaagcccagcacccagaagaggaagatggatggagccccagatggccggggcaggaagaagaagctgaagctgtag

SEQ ID NO: 139427 - DNA, 3159 bp, Artificial Sequence
  derived and/or modified sequence
atgagcagcgccgccgagcccccccccccccccccccccgagagcgcaccgtccaagcctgcagcaagcattgccagcggcggctcaaatagttcgaataagggtgggccagaaggagtcgcggcccaggcggtcgcgagcgccgccagcgctggccctgccgacgccgaaatggaagagatcttcgatgatgcctcccctgggaaacaaaaagaaattcaggaaccagaccccacctatgaagaaaaaatgcagacagatcgagccaatcgtttcgagtacctcctgaagcagacggaactgttcgcccacttcatccagcccgctgcccagaagactcctaccagtcccctgaaaatgaaaccgggccgaccaaggattaaaaaggacgaaaagcagaacttgctgagtgtgggcgactaccgtcatcgaaggactgagcaggaagaagacgaggagctcctaacagagtcatccaaagctacaaacgtttgcacgaggttcgaagatagtccctcttacgtcaaatggggcaagttaagggattatcaggtgcggggacttaactggttgatttccttgtatgagaacggaatcaacggtatcttggccgatgagatggggcttggaaaaacactgcagactatttccctgctcggatatatgaagcactataggaacatacctgggccacatatggtcctggtccccaaatcgacacttcataattggatgtcagagtttaagagatgggtacctacactgaggtctgtttgcctgatcggcgataaagagcagcgagcagctttcgtgagggacgtcctgctgcctggggaatgggacgtctgtgttacctcatacgagatgctcataaaggagaaatccgtgtttaagaagtttaattggcgttatctggtaattgacgaggcgcacagaattaagaacgagaagagcaaactgtccgaaattgtacgggaattcaagacgacaaaccgcctgctgctcactggcactccacttcaaaacaatcttcacgagttgtggtctcttctgaattttttgcttccagatgttttcaatagcgctgatgacttcgacagctggttcgacactaacaattgccttggcgaccaaaaattggtagaaaggctccatatggttcttcgcccgttccttttacggcgaatcaaagcggatgtcgagaagagcctgccacccaagaaggaagtgaagatatatgtcggactcagcaaaatgcagagagagtggtacaccagaattctgatgaaggatatcgatattctgaatagcgctggaaaaatggacaagatgcgactcctgaatatcctaatgcaactccggaagtgttgtaatcacccttatctctttgacggtgccgagcccggtccgccatacacaacagatatgcacctggtcacaaactctgggaagatggtcgtgctcgacaagctattgccgaagctcaaggagcagggtagccgcgtgctgatcttttcccagatgactagagtgctcgacatcctggaagattactgcatgtggagaaattacgaatactgccggctggacgggcagacgccacacgatgagcgacaggattctatcaacgcatacaatgagcccaatagcactaagtttgtgtttatgcttagcacacgcgctggcggactgggaattaacctagcaaccgcagacgtggtaattctctacgattccgactggaacccacaggtagacctgcaagccatggaccgagcccaccggatcgggcagacaaagactgtgagggtattccggttcattaccgacaacacagttgaagagcggatcgttgaaagggcagaaatgaagcttcgtctggacagcatcgtgatccaacaaggacgcctggtggaccaaaatttgaataagattggaaaagacgagatgttacagatgattagacacggggctacacacgtgtttgcatccaaggagtcggaaatcacagatgaagacattgatgggattctggaacgcggggctaagaagactgctgagatgaacgagaagctctccaaaatgggtgaatcttctctgcggaattttactatggataccgaatcttccgtttataatttcgagggcgaagactatcgcgagaaacagaagatcgcctttaccgaatggattgagccgcccaagcgggagcgtaaggccaattacgcggttgatgcttattttcgggaggcacttcgcgtgtcggaacctaaggcgccaaaagcgccacgacctcctaaacagccgaatgtgcaggattttcagttcttccccccgcggctttttgaactattggaaaaggagatcctgttttacaggaagacgataggctacaaggtgcctagaaatcccgagctgcccaatgcagcacaggcgcaaaaggaggagcagcttaagatcgacgaggccgagagtcttaacgacgaagagttagaggagaaggaaaaactcctgacccagggcttcaccaattggaataagcgcgatttcaaccaattcataaaagcaaacgaaaagtgggggagagatgacatagagaacatcgcaagagaggtcgaaggaaagaccccagaggaagtgatcgagtatagcgctgtgttttgggaacgctgcaacgagctgcaggacatagaaaagattatggcacagatcgaaaggggcgaggcgagaattcagaggcgcattagcatcaagaaggcgttagacaccaaaataggaagatacaaagcacctttccatcagttgaggatctcatatggcaccaataaaggcaagaattacacggaagaagaagatcgttttttaatctgtatgcttcacaagctcggcttcgataaagagaatgtctacgacgagttaagacagtgcatccgaaattccccacaatttcgctttgactggtttctgaaatcgagaaccgccatggagctccagagacgctgcaatactctgattaccctgatcgagagagaaaacatggagctggaagagaaggagaaagccgaaaagaagaagcggggcccaaaaccatcaactcagaaacgcaaaatggacggtgcgcctgatgggaggggtagaaaaaagaagctgaagctctag

SEQ ID NO: 139428 - DNA, 2988 bp, Artificial Sequence
  derived and/or modified sequence
atggaggagatcttcgacgacgccagccccggcaagcagaaggagatccaggaaccagacccaacgtacgaagagaaaatgcaaaccgaccgcgcgaatcggttcgagtacttgctgaaacagactgaactgtttgcccactttatccagcccgccgcccaaaaaaccccaacaagccccctgaagatgaaaccagggcgcccccgcatcaagaaagatgagaaacagaacttactgagcgtgggtgattaccgacaccgacgcaccgaacaggaagaagacgaggagctgctaaccgagtctagcaaggcaactaatgtgtgcacacggtttgaggactccccttcttacgtcaaatggggcaaactgcgcgattatcaagttaggggcctgaactggcttatctctctttatgaaaacggaataaacggaatcctcgctgacgagatgggcctgggaaaaaccctgcagactataagcctgctaggatacatgaagcattataggaacatacccggcccacatatggtactggtcccaaagtcaaccttgcacaactggatgagcgagtttaagaggtgggtgcctacactgcgatccgtatgcctgattggcgacaaggaacaaagggccgcctttgtgagagacgtactgctgcccggtgaatgggatgtgtgtgtgacgagttacgagatgctcataaaagagaaaagcgtttttaagaagttcaattggcgctacctggtcatcgacgaggctcaccgcataaaaaatgagaaatccaagctcagcgaaatagtcagggaatttaagactactaacaggctgctgctcacaggaacacctctgcagaataacctgcacgagctgtggagccttctgaattttttgctgccggacgtttttaattcagccgacgactttgacagttggttcgacaccaacaactgcctaggtgaccagaaactggttgagcgcttacacatggtgctgcggcccttcttgctccggaggattaaagccgacgtggagaagagcctccctccaaaaaaggaagtgaagatctacgtggggctgagcaagatgcaacgagaatggtacacccgaatccttatgaaagacatcgacattctaaactcggcgggaaaaatggacaagatgcgtcttctgaatattctgatgcagctgcgaaagtgctgtaaccacccctacctgttcgatggcgcggagcccggccccccttacaccaccgacatgcatctggtaacaaactcaggtaagatggtggtcttggacaagcttctcccaaagctgaaagagcagggatcgcgggtactgattttctcacagatgacgagagtacttgatatactggaagactactgcatgtggcggaactatgagtactgccgcctggacggacagacacctcatgacgagcgccaggattccatcaatgcgtataatgagcccaacagtaccaaattcgtgtttatgttgtctacaagagctggcgggcttggcataaatctggccacagctgacgttgtgattctgtacgattctgactggaatcctcaggtggacctgcaagcaatggaccgcgcacacaggataggccagaccaagacagtccgcgtgtttcggttcataacagacaacactgtggaggagcgcatcgttgagcgtgctgaaatgaaactccgcttggacagtattgtcatacagcagggccgactggtggaccagaatcttaacaaaatcggaaaagatgagatgctgcagatgatacggcacggcgctactcacgtgttcgccagcaaggagtccgaaattactgatgaggatatcgacggaattctcgaacggggcgctaaaaagactgctgagatgaatgagaaactttcaaagatgggcgagagtagtttacggaacttcacaatggacaccgaaagttccgtgtataatttcgaaggagaggactacagggagaagcagaagattgctttcacggaatggattgagccccccaagcgagaacgcaaggcaaattacgctgtcgacgcttactttagggaagccctccgcgtgtccgaaccaaaggctcctaaggcgccacgccccccaaagcagccaaatgtccaagatttccagttctttcctccacggttgtttgagcttttagagaaggaaatcctgttctatagaaaaacaattggatataaggtcccacgaaacccggaactgccaaacgctgctcaggcgcagaaggaggaacagctcaagatagacgaggctgagagtttgaatgatgaggagcttgaagagaaggagaaactcctgacgcagggctttacgaactggaacaagcgggactttaatcagtttattaaggccaatgagaagtggggtcgtgatgacatcgagaacatcgcccgggaggtggagggaaagacccccgaagaggtcatcgaatatagtgccgtgttttgggagaggtgtaatgaactccaggacatcgaaaagattatggctcagatcgagaggggagaagcccgcatccagcggcgtatcagtataaaaaaggccttagacaccaaaattggaaggtataaggcaccctttcaccagttgagaatttcttatggaacaaacaaagggaagaattacaccgaagaggaggataggttcctcatttgtatgctccacaaactggggtttgataaagagaatgtatatgatgagcttcgccaatgtatccgtaactcgccacagtttcgctttgattggtttctcaagagccggacggccatggagttgcaacggaggtgtaataccttaatcacactgatcgagagagagaacatggagctagaagaaaaggaaaaagccgagaagaaaaaacgcgggcctaagccctctacacagaagcgtaagatggacggggcgcccgatggtcgtggtcggaaaaagaagttaaagttatag

SEQ ID NO: 139429 - DNA, 2988 bp, Artificial Sequence
  derived and/or modified sequence
atggaggagatcttcgacgacgccagccccggcaagcagaaggagatacaggaacctgatcctacctatgaagaaaagatgcagactgaccgtgccaatagattcgagtacttgctcaaacagaccgagttgttcgcccatttcattcagccagcagctcagaagacaccgaccagtccccttaaaatgaagcccggccggccacgcattaaaaaggacgagaagcaaaacctgcttagtgtcggggactaccggcacagacgaaccgaacaagaggaggatgaagagctgcttacggagtcttcgaaagccacaaacgtgtgcacccgctttgaggactcccccagttatgtgaagtggggcaaactccgagactatcaagtcagaggactgaattggcttatctcactgtatgaaaatgggataaatggtattctggccgacgaaatgggactgggcaagacactgcagaccatctctctactggggtatatgaagcactatagaaacatcccaggtccccacatggtactggtccctaaatctaccctccacaattggatgtcagagtttaagcgatgggtgccaacattgagatccgtgtgtctgattggggacaaggaacagcgtgcggccttcgtgcgcgacgttctgctacctggcgagtgggatgtttgtgtcacttcatatgagatgctcattaaggagaagagcgtgttcaaaaagttcaactggaggtacctcgtcatagatgaggcccacaggatcaaaaatgaaaagagtaagctctccgagatcgttcgtgaattcaagacaactaaccgactgcttctaacaggtacaccgttacagaataacctgcacgagttatggagcttgctgaatttcttgcttccagatgtcttcaattctgccgatgattttgattcatggttcgatactaataattgtttgggggaccagaaattggtggagcggctgcacatggtcctcaggccttttctactgcgacggatcaaggccgatgtagaaaagtcgttacccccaaaaaaggaggtgaagatatacgtcggcctgtccaagatgcagagagagtggtatacacggattctgatgaaagatatcgacatattaaactcagcagggaaaatggataagatgcggcttctaaatatcctgatgcagctaagaaaatgttgtaaccacccatacctgttcgacggggccgagcccgggccaccttatactacagacatgcacctggtgactaattcagggaagatggtggttctggataagctgctgcccaaactgaaagagcaagggagtcgggtcctgattttcagtcagatgacacgggtgctggacattctcgaggactattgcatgtggaggaattatgagtattgtcggctggacggccagacaccccatgacgagcggcaggacagtatcaacgcatacaacgagcccaactcaaccaagtttgtgtttatgctgtccacccgtgctggaggccttggcattaacctggcaactgccgatgtcgttatcctgtacgattccgactggaatccccaggtggacttacaggccatggaccgcgcccatcgaatcggccaaactaaaacggttagagtgttcaggtttattaccgataataccgtagaagagcgcatagtggaaagagctgagatgaagcttagactggacagtatcgtcattcagcagggccgactggtggatcagaatcttaacaagatcggaaaggacgagatgctgcagatgattagacacggggcaacccatgtcttcgcctcaaaggaatctgagattaccgacgaagatattgacgggattttggagcgcggggccaaaaaaaccgccgaaatgaatgaaaagttgtccaaaatgggggaatctagcctgagaaacttcacaatggatactgagagcagtgtttacaactttgagggcgaggattacagggagaagcagaagattgcttttacggagtggattgagccaccaaaacgcgagcgcaaggctaattacgcagtggatgcctacttcagagaagctcttcgcgtctccgaacctaaggcccctaaggccccccgtccccctaaacagcccaacgtgcaggatttccagttcttccctccacgcttgtttgagctgttagaaaaggagattttattttaccgaaaaacaatcggctacaaagttcctaggaatccagaactacccaacgcggcacaagctcagaaagaagaacaactgaagattgacgaagctgaatctctgaacgacgaagaacttgaagagaaggagaagttgctgacacaaggctttaccaattggaacaagcgggattttaaccagttcatcaaggccaatgaaaaatggggccgggacgacatcgaaaatatcgccagggaagtggagggcaagacaccggaagaggtgatcgagtattccgcagtgttctgggagcgctgtaacgagttacaggatatcgagaagattatggcacaaatcgagaggggagaagcccggatccagcgtcgcatatccattaagaaagcccttgacactaagattggcagatataaggcaccctttcaccagcttagaatatcgtatggtaccaacaagggcaaaaactacactgaagaggaggataggttcctgatatgcatgcttcacaaactgggcttcgacaaagagaacgtctacgatgaactgcgccagtgcattcggaattccccccaatttaggtttgattggtttctgaagtcccggaccgcaatggaactgcagagaaggtgtaacaccctgataactctcatagagagagagaacatggaacttgaggagaaggaaaaggccgagaaaaagaagcggggaccgaaaccaagcacccagaaacgaaaaatggacggggcccctgacgggcgtggccggaaaaaaaagctaaagctttag

SEQ ID NO: 139430 - DNA, 3159 bp, Artificial Sequence
  derived and/or modified sequence
atgagctccgccgcagaaccgcctcctcctcccccacccgagtctgcaccctcgaaaccggctgcctctatagcgtccggaggctcaaactccagcaataagggcggtcccgagggtgttgcagcccaggccgttgcctccgctgcctcagccggtcctgccgatgcagaaatggaagaaatctttgatgatgcgtcacctggaaagcagaaggagatccaggagcccgaccctacttacgaggagaagatgcagaccgaccgcgctaaccgattcgaatacctgttgaagcagacagaactcttcgcacacttcatacaacctgctgcacaaaaaacgcccacctctcccttaaagatgaagccaggcagacccagaattaagaaagatgagaagcaaaatctcctttctgtcggggactaccgccatcggaggacggaacaagaagaggacgaggaactgttgacagaatccagtaaggccacgaatgtctgcaccaggttcgaggatagcccgagctacgttaagtgggggaagttgcgtgattaccaggtacggggactgaattggctgatttccctttacgaaaacggcatcaacggcatactagctgatgaaatggggctgggcaaaacactccagactatttctctcctaggttatatgaaacactatcgcaatatacccggaccgcacatggtgcttgtgcctaagtctactcttcataactggatgtccgaatttaaacggtgggtccccacattgaggagcgtctgtctgatcggggataaagaacagagggccgcattcgtcagggacgttttactgcctggagagtgggacgtctgcgtgacatcttacgagatgttgatcaaagagaagtctgtttttaagaagttcaactggcgctacctcgtgattgacgaggcccaccgtataaagaatgagaaatctaaacttagtgagatagtgcgagaattcaagacaaccaaccggctcctcctgaccggcactcccctccagaataatctacacgagctttggtctttgctgaatttcctgctgcccgatgtatttaactcagctgacgacttcgatagttggttcgatacaaacaactgtctcggggaccagaagctcgtggaaaggctccacatggttcttcgcccttttcttctgagaagaataaaggctgacgtagagaagtctttgccacctaagaaggaggtaaagatttatgtgggcctgagcaaaatgcagcgtgagtggtacaccaggattctgatgaaggatattgatatccttaattccgctggaaagatggacaagatgaggctactcaacatcctgatgcaactgagaaagtgctgtaatcatccctacctgtttgacggggcagaacctgggccaccctacactacagacatgcacttagttacaaattcagggaaaatggtggtgctggacaaactgctccccaaattaaaagaacaagggagtagagtgctaattttttcccagatgacccgcgtgctggacatccttgaggactattgtatgtggagaaactacgagtattgtcgtcttgacgggcaaacccctcatgatgagcgccaagatagcatcaatgcgtacaacgaacccaacagcacaaagttcgtgttcatgcttagcacccgcgcaggtggtttgggtatcaacctagccactgcggacgtagtcatcctttatgactctgattggaaccctcaggttgatctgcaggcgatggaccgggcacatcggattggtcaaactaagacagtacgggtgttcaggttcatcacggacaacaccgttgaagagagaatcgtcgaacgcgcagagatgaagcttaggttggattccatcgtgatccagcaggggaggctggtggatcagaatctgaataagattgggaaagacgagatgctgcaaatgatccgtcacggggctacacatgtcttcgccagcaaggaatccgaaataacggacgaagatattgatggaatccttgagcggggagcgaaaaaaaccgcagaaatgaatgagaaactctctaagatgggcgagtctagcctgagaaactttacgatggacacggagtcatcggtttataactttgagggagaggattacagggaaaagcagaagatcgcgtttactgaatggatcgagccacctaagagggagcgtaaagcaaactacgccgtggacgcttacttccgagaagctctgcgcgtgtccgagccaaaagctcccaaagctccacgccctcctaaacagcctaacgtgcaggattttcaattctttccccctcgtttgtttgaactgttagaaaaggagatccttttctacaggaaaaccatcgggtataaggtccctcggaatcccgagctgccaaatgccgctcaggcgcaaaaggaagaacagctgaaaatagatgaggccgagtctctcaacgatgaagaactcgaagagaaagagaagctgctaacgcagggtttcacaaattggaataaacgggacttcaaccaattcattaaggcaaatgaaaagtggggacgagacgatatcgagaacatcgctcgggaagtagaagggaaaacaccagaggaagtcatcgagtacagtgcagtgttctgggagcggtgtaacgaactccaggacattgagaagatcatggctcaaatcgaacgcggagaggcacgcatacagcgacggatcagtatcaaaaaggcattggacactaagataggccgatacaaagcaccctttcaccagctgagaatctcatatggaacaaacaaaggcaagaactacacagaggaagaagaccgcttcctgatttgcatgctccacaaactgggctttgataaagaaaacgtgtatgacgaattgaggcagtgtattcggaattcacctcagttcaggttcgattggttcctcaaaagccggacggctatggagcttcaacggaggtgcaataccctgatcacactgattgaacgggagaacatggaactcgaggaaaaagaaaaagctgagaagaagaagcgtgggccaaaaccctcaactcaaaagagaaaaatggacggagcacctgacgggaggggtcgaaaaaaaaaattgaagctctag

SEQ ID NO: 139431 - DNA, 2988 bp, Artificial Sequence
  derived and/or modified sequence
atggaggagattttcgatgacgcctcccccggaaaacagaaggagattcaggaacctgatcccacctatgaggaaaagatgcagacagatagagctaatcggttcgagtacctgttgaagcagacagagctattcgctcatttcatccaacccgctgcccagaagacccccacatcccccctgaaaatgaaaccaggcaggcctcgaatcaagaaagacgagaagcaaaaccttctgtccgtcggtgactatcgacacaggagaaccgagcaagaagaagatgaagaactgctcactgaaagctcgaaagctacaaatgtttgcacgcggttcgaggattccccgagttacgtgaagtgggggaaactgcgcgactaccaggtgaggggccttaactggttgatctcactctacgagaatggcataaatggcatactcgccgatgaaatggggctggggaagacactgcagactattagcctgctgggatacatgaagcattaccgcaacattcccggtcctcatatggtcctcgtgcccaagagcactttgcacaactggatgtccgagttcaaaaggtgggttcccacactaagatctgtctgcctgataggcgacaaggagcaaagagccgcattcgtccgcgacgtcttactgccaggggagtgggatgtttgcgtcactagttatgaaatgctgataaaggaaaaaagtgtttttaagaagttcaattggcgatacttggtgatcgacgaagctcaccgaatcaagaatgaaaagtctaaactgtccgagatcgtgcgcgaattcaaaacaactaaccggttgctacttaccggaacccctctgcagaacaatcttcacgagctgtggtccttgctgaattttctcctccccgacgtgttcaatagcgccgacgacttcgacagctggttcgacacaaataactgtctgggtgatcaaaaactggtcgagcggctccatatggtcttgcgccctttcctcctccgcagaataaaggccgacgtggagaagtccctcccgccaaaaaaagaagtgaagatttacgtggggctttcaaaaatgcagcgagaatggtatacaagaatcctgatgaaggatatcgatatccttaactccgccggtaaaatggataagatgcgcctgctgaatatccttatgcaactacgcaaatgttgtaatcacccctatttatttgacggcgctgaacctggcccaccatatacaacagacatgcacctggtgaccaattccggcaaaatggtggtgctcgacaaactgttgcccaaactgaaggagcaggggagtagagtacttattttttctcagatgacaagggtgcttgacatcctggaggactattgtatgtggcggaactacgaatactgcagacttgatggacagaccccccacgacgaaaggcaggattccatcaacgcgtataatgagcctaattctactaagtttgtgttcatgttgtctacgagagccggagggctcggcatcaatttagccaccgcggatgttgtgatcctctatgactctgactggaatccacaggtagatttgcaagccatggaccgagcgcaccggatcggccaaactaagacggtgcgggtcttcaggtttattacagacaatacagtagaagagagaatcgtggagagagccgagatgaaactccggctagactcaatagtaatccagcaggggagattggtagaccagaaccttaacaaaatcgggaaggatgaaatgctacagatgatcaggcacggtgccacacacgtctttgcctcgaaggaaagcgagatcaccgacgaggacattgatggtattttggagcgcggagcgaagaagaccgcggagatgaatgagaaactgtcaaaaatgggtgagtcatctttgcgcaatttcacaatggacactgagagcagcgtttataacttcgagggggaggattatagggagaagcaaaagatcgcttttaccgaatggatcgagcctccaaaacgcgagcgtaaagccaactatgccgtggatgcgtatttccgggaggccctacgggtttccgagcccaaggcccctaaggccccacgtccccctaaacagcccaacgtgcaagatttccaatttttcccacctagattattcgagctgttggagaaggaaatccttttctaccggaagactatcgggtacaaggtccccaggaaccctgaactaccgaacgccgcacaggcccagaaagaagaacagctaaagatagacgaagccgagtctctcaacgacgaggaactggaagagaaggaaaaactcctcacacaaggatttacaaattggaacaagcgggacttcaatcagtttatcaaggctaatgagaagtggggcagagacgacatcgagaacatagccagagaagtcgagggaaagaccccagaagaggtgatcgagtacagtgcggtcttttgggaacgatgtaacgagttgcaggacattgaaaagattatggctcagattgagagaggggaagccaggatccagcgaaggatttcaattaagaaggctcttgatacaaaaattggacgctacaaagccccatttcaccagctcagaatctcctacggaaccaacaaaggcaagaattacaccgaagaagaggaccgcttcctcatttgtatgctgcacaagttagggtttgataaagagaacgtgtatgatgagcttagacagtgtattcggaatagcccacagttcagatttgactggtttctgaagagtcgcaccgccatggaacttcagaggcggtgcaacaccttgattaccttgatcgaaagggaaaacatggaactagaagagaaagagaaggccgagaaaaaaaagagagggcctaagccgtcaactcagaaacgcaaaatggacggcgcacccgatggaagggggagaaaaaaaaagctcaaactctag

SEQ ID NO: 139432 - DNA, 2988 bp, Artificial Sequence
  derived and/or modified sequence
atggaagagatatttgacgatgcttcaccaggtaaacagaaggaaatccaggaaccagacccgacttatgaagaaaagatgcagacagacagggcaaatagatttgaatatctcctgaaacagacggaattgttcgcccatttcatacaacctgccgcacaaaagacccctacgtccccgctgaagatgaaacctggacgcccaaggatcaaaaaggacgagaagcagaacctcttgtccgtgggggattaccggcaccgcaggactgagcaagaggaagatgaggaactactgaccgaatccagtaaagcaaccaatgtatgtacccgtttcgaggacagcccctcctatgtcaagtggggcaaactgcgcgactatcaagtccgcggacttaattggcttatctccttatatgagaatggaataaatgggatcctggcagatgaaatgggcctgggtaagaccctgcagaccatatctctgttagggtacatgaagcattatagaaatatccctggccctcatatggtactggttccgaaatccacactgcacaattggatgtctgagttcaaaaggtgggtgccaaccctgagatctgtatgcctgattggcgataaggagcaacgggctgcctttgttagggacgtcctcctgcccggagagtgggacgtttgtgtcaccagctacgaaatgctgattaaggagaaaagtgtcttcaagaagttcaactggcgatacctggtgattgatgaagctcacagaattaaaaatgagaagagcaagctatctgaaatagtgcgggagttcaagacaaccaaccgccttctattaactggaaccccactacagaataatctgcatgagctttggagcctcctgaattttctgcttccagatgtattcaactccgctgacgattttgattcttggtttgatacaaacaattgtctgggggaccagaagctggtcgagcgattacacatggtcctgaggccctttcttctgcgtagaattaaagcggacgttgaaaagtcgctgcctcccaagaaggaggtaaagatctacgtggggctaagcaagatgcaacgggaatggtacacgaggatccttatgaaggatatcgacattctcaattcagcaggtaagatggacaagatgcgcctgctgaacatattaatgcaacttcggaagtgttgcaatcacccctacctgtttgatggggctgaacccggacccccttataccacagacatgcacctcgtgaccaactccggaaagatggtggtcttggacaaattgctgcccaagctgaaggaacaggggagtcgggtactgatttttagccaaatgacccgagtgctcgacatccttgaggattattgcatgtggagaaactacgagtattgtaggttagacggccagaccccacacgatgagagacaagattccataaatgcctacaatgagcctaacagcaccaaattcgtctttatgctgtctacaagggccggtggccttgggatcaatcttgcaactgcagatgtggttattctgtacgatagcgattggaacccccaggtggacttacaggccatggaccgggctcaccgtatcggacagaccaaaaccgtaagggtatttcggtttattaccgacaacacggtcgaagagaggatcgttgagcgtgcagagatgaaacttaggctagacagtattgtgatccagcaaggccgactcgtggaccagaacctgaacaagataggaaaggatgaaatgcttcagatgatccgccacggcgcaacacatgttttcgcgtcaaaggagtccgagattactgacgaggacatagatggaattcttgagcggggtgccaaaaaaacggcagagatgaacgagaagctgagcaagatgggagagtctagtctgaggaacttcacaatggatacagagagtagcgtgtacaattttgagggtgaggattaccgggagaaacagaaaatcgccttcaccgaatggatcgagcctccgaagagggagaggaaagctaattacgctgtcgacgcctactttcgggaggccctgcgggtgtctgaaccaaaagccccaaaggcccctcgtccccctaagcagccgaatgttcaggactttcagttctttccacctcggctgttcgaacttctggaaaaggagatccttttctatagaaaaaccatcggatataaagtgcctcgcaaccccgagttgccaaatgctgcccaggctcagaaggaggagcagttgaaaatcgatgaggcagagtctctgaatgacgaggaacttgaagaaaaggagaagctgctgacacaggggttcactaattggaacaagcgcgactttaaccagtttatcaaagcaaacgagaagtggggtagggacgacatcgagaacatagcccgagaggtggaaggtaagacgccagaggaagttatcgagtactcagctgtgttttgggagagatgtaacgaactgcaagacatagagaaaataatggctcaaatcgagcggggtgaggctaggatacaaagacgaattagtatcaagaaagctttagacaccaagataggaagatataaggcgcctttccaccagcttaggatctcctacgggacgaacaaaggaaaaaattataccgaagaggaagaccgatttctaatctgtatgttacacaagcttgggttcgacaaagagaatgtatacgatgagctgaggcagtgcatccgtaatagcccccagttcagattcgattggtttttgaaatcacggactgccatggaattgcagcgcagatgcaatacattaattaccctcatcgagagagaaaacatggagttggaagaaaaggagaaagctgagaagaaaaagagaggcccaaagccaagcacccaaaaacggaagatggacggggctcctgacggtaggggccgaaaaaagaagctgaagctctag

SEQ ID NO: 139433 - DNA, 7923 bp, Artificial Sequence
  derived and/or modified sequence
gcgagtgttgaaagtcggtggcgtaggtcgtcgtcctggatgctggcgagatagatgttatcttccagaggaagaggaggaggcggcgaagcgttttcccagcctcagtctctctttcgttttccttttcccttcccccaaccctccgcccttctctaaatcagccggccttccttgacctcagtgacccgtctggccccgcccaccctcgtcgacgtgattcccgccgtgaggtaagcgccggtggaacctagagccccgcggaagagcagaacgtttgggagtgtgcagctcctgggcccggctcaggcccgtcgcggaggcgcggcgcaggggagcgctcgggtgggagtctcgctcctccaccagtttattgcgacgtagcatccaggcctaggcctccccgtccatccccgccggactcgggcctctggcagcagcgggtgacgcagacggaacatcatgtcgtccgcggccgagcctccgccacccccgcctcccgagagcgcgccttccaagcccgcagcctcgatcgccagcggcgggagcaacagcagcaacaaaggcggccccgaaggcgtcgcggcgcaggcggttgcgtctgcggccagcgctggtcccgcagacgccgagatggaggaaatatttgatgatgcgtcacctggaaagcaaaaggaaatccaagaaccagatcctacctatgaagaaaaaatgcaaactgaccgggcaaatagattcgagtatttattaaagcagacagaactttttgcacatttcattcaacctgctgctcagaagactccaacttcacctttgaagatgaaaccagggcgcccacgaataaaaaaagatgagaagcagaacttactatccgttggcgattaccgacaccgtagaacagagcaagaggaggatgaagagctattaacagaaagctccaaagcaaccaatgtttgcactcgatttgaagactctccatcgtatgtaaaatggggtaaactgagagattatcaggtccgaggattaaactggctcatttctttgtatgagaatggcatcaatggtatccttgcagatgaaatgggcctaggaaagactcttcaaacaatttctcttcttgggtacatgaaacattatagaaacattcctgggcctcatatggttttggttcctaagtctacattacacaactggatgagtgaattcaagagatgggtaccaacacttagatctgtttgtttgataggagataaagaacaaagagctgcttttgtcagagacgttttattaccgggagaatgggatgtatgtgtaacatcttatgaaatgcttattaaagagaagtctgtgttcaaaaaatttaattggagatacttagtaatagatgaagctcacaggatcaaaaatgaaaaatctaagttgtcagaaatagtgagggaattcaagactacaaatagactattattaactggaacacctcttcagaacaacttgcatgagctgtggtcacttcttaactttctgttgccagatgtgtttaattcagcagatgactttgattcctggtttgatacaaacaactgccttggggatcaaaaactagttgagaggcttcatatggttttgcgtccattcctccttcgtcgaattaaggctgatgttgaaaagagtttgcctccaaagaaggaagtaaaaatctatgtgggcctcagcaaaatgcaaagggaatggtatactcggatattaatgaaggatatagatatactcaactcagcaggcaagatggacaaaatgaggttattgaacatcctaatgcagttgagaaaatgttgtaatcatccatatctctttgatggagcagaacctggtccaccttatacaacagatatgcatctagtaaccaacagtggcaaaatggtggttttagacaagctgctccctaagttaaaagaacaaggttcacgagtactaatcttcagtcaaatgacaagggtattggacattttggaagattattgcatgtggagaaattatgagtactgcaggttggatggtcagacaccccatgatgagagacaagactccatcaatgcatacaatgaaccaaacagcacaaagtttgttttcatgttaagcacgcgtgctggtggtcttggcatcaatcttgcgactgctgatgtagtaattttgtatgattctgattggaatccccaagtagatcttcaggctatggaccgagcacatagaattgggcagactaagacagtcagagtgttccgctttataactgataacactgtagaagaaagaatagtagaacgtgctgagatgaaactcagactggattcaatagtcattcaacaagggaggcttgtggatcagaatctgaacaaaattgggaaagatgaaatgcttcaaatgattagacatggagcaacacatgtgtttgcttcaaaggaaagtgagatcactgatgaagatatcgatggtattttggaaagaggtgcaaagaagactgcagagatgaatgaaaagctctccaagatgggcgaaagttcacttagaaactttacaatggatacagagtcaagtgtttataacttcgaaggagaagactatagagaaaaacaaaagattgcattcacagagtggattgaaccacctaaacgagaaagaaaagccaactatgccgttgatgcatatttcagggaagctcttcgtgttagtgaacctaaagcacccaaggctcctcgacctccaaaacaacccaatgttcaggatttccagttctttcctccacgtttatttgaattactggaaaaagaaattctgttttacagaaaaactattgggtacaaggtacctcgaaatcctgagctgcctaatgcagcacaggcacaaaaagaagaacagcttaaaattgatgaagctgaatcccttaatgatgaagagttagaggaaaaagagaagcttctaacacagggatttaccaattggaataagagagattttaaccagtttatcaaagctaatgagaagtggggtcgtgatgatattgaaaatatagcaagagaagtagaaggcaaaactccagaagaagtcattgaatattcagctgtgttttgggaaaggtgcaacgagctccaggacatagagaagattatggctcagattgaaaggggagaggcgagaattcaaagaagaataagcatcaagaaagcacttgacacaaagattggacggtacaaagcaccttttcatcagctgagaatatcatatggtactaacaaaggaaaaaactatactgaagaagaagatcgttttctgatttgtatgcttcacaaacttggatttgacaaagaaaatgtttatgatgaattgcgacagtgtattcgcaactctcctcagttcagatttgactggtttcttaagtccagaactgcaatggagctccagaggagatgtaataccttaattactttgattgaaagagaaaacatggaactagaagaaaaggagaaggcagagaaaaagaaacgaggaccaaagccttcaacacagaaacgtaaaatggatggcgcacctgatggtcgaggaagaaaaaagaagctgaaactatgaatatgtttttgtttcataatcactaactttaaaccagtagttctttaatttacgggtcttcataagatgtactgtacaatgctcaattgttatgtcatttaaagacatcaggttcatctgtttactgagctagaaacatagtatgtagtttcacttttttaaatgcaacagctgtgctgaaatttttttatcattaacacttgaagtaataaaataggcttcatttattactaagtgtttcatttgatttatttttctattgtagttccatttgtgaagattgtgactttttgtttattagctataatttctacacttgtaaggcttaaaaacaagttaaaaagaaaattgcaaataacatttgtccctttcagtcttcacctagttgtgtaattattttaattcactttgcctttgcagaaatttgggtattttctttgtagtgctattgagtctcatctggaaagattatataaattgcattctccttgcttatgtgggtagaatgggaaaagaaggcaagacaaagtatacttaaattctatgcatatttctgttatgctttctgttttttttagttgattctgaaatgaatatgccctattcttttgaaagaatggccttttagttgtatagccaaagacatttagtattttccggttccttaaggtattactgtaccattttgtaaaaggaatattattattattatttttaattatttggtaaatattttgtcatatgaccttctgaagcagccacaacttagataatgtcagaactaaggtgattttttttttttaattttgaaagcccagccaaaatgaggtgtgaatttgtcatactgttacattgaaattggtaacaaaatatatcccctcccatttggacttttagggtaaatgaaaattttattgtattttaaagtagtttctaagtgttagcaagactgactataattccagtttctgttttctatggacagacctgataaactggagaccctaaagcaggaatacccaaattatagtgtcaggattttagctgtaccagaggcctttatgtgctacacataatttgtataaaattttatatgtgcagattgggtacataaacagttctccatttttctaagggaatgcaataaatgtagcatcgtgaataaatataacttttataatccgtaaagtggtcttttctttccatttctttaattgttttctcaatttttattcactttttcctttaggacacatttcccttaattggatatctttcccttaaatttctattagtagttgttttcatctgcccacatgtaattgaagatttaaaaaaaaaattttgatacctgcagtattactaatactgcttaatttcttgaaatgtggaattgctgctgttaatgtcaagcaaaacgcagtatttatggcaaattgtaaagtaatttgaatttagtgctacctcaaaattaactttttaaatactatgttagattcttaacagttaaaggtctaatacatgcatgaggaatggttacttatgaaaggaaaaagaatttgtaagagttatcacctcagtttggaagaaattgaaaaaatgtaaggctgaagaaaacttacggaggtcacaaaagtgatgttttcaagaggaggagaaactgggagggagatacacagtggaaatgcaaaatgaatcaagtatagtggtagccctgagagcttagggactcaaatggaaactgtgtgaagggaaactcacttgaaaaaaaagcatgaaccagctaggccctgccaccactgtgtttggccaagttcacaaatctgttttaacctgtcacttccctgtcacttctctggctttcctctcccgctaagcttttgtttcctggcagtaattaaaatcttctgtcagtgccacagctactactgctactggaactgccttaaccactactgctactggaactgccttagccaccttggtatcgtggtttggcaaagtattggcctctaccaccatagggcccagagcttctgcctccaaagtttcctcccttcatgggtccaaaatttgaagactgattgttgtcattgccaaaatcattgtagcttttaccacctccaaaattgcttcaatcattaccaaatctattatagcaatccccactgccaccatatccatcaccaccaccatggctgccaccaaagccaccacgatcacagaacttgatgactgtatttgtgactaattgtataatagtttctgttctgtggaaagtaaagcattccaacacagggtttcagtgtagattgttttgttttgtacccatgctgttgattgctaaatgttttaataatctgatcatgatactgaataaatgtctttttttttttttaacaacaaagcatgaaagattgcttaattgtacatctgacaaagtgctggaggctattataaagtgtaattattactacttttaagagacagggtcttgctctgtcacccaggctggagtgcagtggtgcaatcacagctcactgcaacctcaaacttcagggctcaagtgatcctcccacctcagcttcccaagtagctaggactacagataccacgcccagctaagtttttttagtttttgtagagatagggccttgctatgttgcccagtccggtctcaaacgccgacttcaggcaatcctcttgcgtcaacctctcaaagtgctgggattacatgtgtaagcctacattccaaagtgctgggatcatagttgtgagcctacaccacacctggcctacattttgtttttcataaagttgagagaagcaaatcctaagcatagagtacaagttgagcatccctaatcaaaaaatctaaaatcagaaatgctccataatttgaatgctcattagggcatttctgatttttggattagggatgctgaactgataagtataatgcaagtattctaaagtctggaaaatgctaaaaacacttctggttccaggcatttcagataaggattgctccatctgccctttgagtatttaatatatgccgattgtttgaactaatctggatttaattatataaatgattatataaatgatctttggcttagtacctttcttaatctcgatcttaaaaagcattgtaaaacacccctgtggtttttcagaaaaattctgagtaaaaaataaatttcatcttgttctatccctttgaatctaaaaaacaaatctttttgaaaggatgtgctactatatttcaaaccagtagttttggagtagaacattgctaaaaaaatgggtactaaggagggtaatttaaacaaagtagattaatgacacaaggtggattgatgaactcataaatccaaatgaatggaatgctagaagacatgtattaacggagtagctgttaccaaaatatatacatattttgtatatgtacatagctgttaccaaaatgtatctttgcctgttggaatctgatgtcaagatcaaaggtgagggcatccctcagatgacagataatgggcaaaatacattcttggtgtggagcagtgctgcagaattaacttcgctgtgtacatcccagaatcgttttggatctgttaaggtttttattagaatgattaaataggcttttgcagcattaactttacagtagttaccagaaaagactatgctacaagaaccaaaattgaagtaagaagaaaaagactgaaatgatatgattctaaatgaaaaaaatgaagaagtggaatagtttctccacaggcataagaggcaaagcattgtttcagaagtggactggcacctcacctgagatactcaagactggcaacatgggtctacattctttgttaccacagattcccttgtgtccggagagattccctagctctaatgacagcttttttggggggtaatgaggctatgagaagattgaggatctaggtacttgcctttaactctacagcatacaaggtgtgtggctcttatctctaggacaccaatatttaatgttgcatatcatgtatctccagtacaagaagaaagtttatcagaatttagttaatgttggaaactttgtaatataaacaatgtaaacactacattgacaaaaatattttattaatacaaagaatatgcatatagtttgcttactacagaaattcttgtttttgatgtagacaacccaaaggagtttttatgtatatagattgtgaataaattgggaaaagaaatagagataagtagagattatttcacttcattaaacttttgaagtcctaa

SEQ ID NO: 139434 - DNA, 3475 bp, Artificial Sequence
  derived and/or modified sequence
gtgttgaaagtcggtggcgtaggtcgtcgtcctggatgctggcgagatagatgttatcttccagaggaagaggaggaggcggcgaagcgttttcccagcctcagtctctctttcgttttccttttcccttcccccgagcctccgccacccccgcctcccgagagccggcgggagcaacagcagcaacaaaggcggccccgaaggcgtcgcggcgcaggcggttgcgtctgcggccagcgctggtcccgcagacgccgagatggaggaaatatttgatgatgcgtcacctggaaagcaaaaggaaatccaagaaccagatcctacctatgaagaaaaaatgcaaactgaccgggcaaatagattcgagtatttattaaagcagacagaactttttgcacatttcattcaacctgctgctcagaagactccaacttcacctttgaagatgaaaccagggcgcccacgaataaaaaaagatgagaagcagaacttactatccgttggcgattaccgacaccgtagaacagagcaagaggaggatgaagagctattaacagaaagctccaaagcaaccaatgtttgcactcgatttgaagactctccatcgtatgtaaaatggggtaaactgagagattatcaggtccgaggattaaactggctcatttctttgtatgagaatggcatcaatggtatccttgcagatgaaatgggcctaggaaagactcttcaaacaatttctcttcttgggtacatgaaacattatagaaacattcctgggcctcatatggttttggttcctaagtctacattacacaactggatgagtgaattcaagagatgggtaccaacacttagatctgtttgtttgataggagataaagaacaaagagctgcttttgtcagagacgttttattaccgggagaatgggatgtatgtgtaacatcttatgaaatgcttattaaagagaagtctgtgttcaaaaaatttaattggagatacttagtaatagatgaagctcacaggatcaaaaatgaaaaatctaagttgtcagaaatagtgagggaattcaagactacaaatagactattattaactggaacacctcttcagaacaacttgcatgagctgtggtcacttcttaactttctgttgccagatgtgtttaattcagcagatgactttgattcctggtttgatacaaacaactgccttggggatcaaaaactagttgagaggcttcatatggttttgcgtccattcctccttcgtcgaattaaggctgatgttgaaaagagtttgcctccaaagaaggaagtaaaaatctatgtgggcctcagcaaaatgcaaagggaatggtatactcggatattaatgaaggatatagatatactcaactcagcaggcaagatggacaaaatgaggttattgaacatcctaatgcagttgagaaaatgttgtaatcatccatatctctttgatggagcagaacctggtccaccttatacaacagatatgcatctagtaaccaacagtggcaaaatggtggttttagacaagctgctccctaagttaaaagaacaaggttcacgagtactaatcttcagtcaaatgacaagggtattggacattttggaagattattgcatgtggagaaattatgagtactgcaggttggatggtcagacaccccatgatgagagacaagactccatcaatgcatacaatgaaccaaacagcacaaagtttgttttcatgttaagcacgcgtgctggtggtcttggcatcaatcttgcgactgctgatgtagtaattttgtatgattctgattggaatccccaagtagatcttcaggctatggaccgagcacatagaattgggcagactaagacagtcagagtgttccgctttataactgataacactgtagaagaaagaatagtagaacgtgctgagatgaaactcagactggattcaatagtcattcaacaagggaggcttgtggatcagaatctgaacaaaattgggaaagatgaaatgcttcaaatgattagacatggagcaacacatgtgtttgcttcaaaggaaagtgagatcactgatgaagatatcgatggtattttggaaagaggtgcaaagaagactgcagagatgaatgaaaagctctccaagatgggcgaaagttcacttagaaactttacaatggatacagagtcaagtgtttataacttcgaaggagaagactatagagaaaaacaaaagattgcattcacagagtggattgaaccacctaaacgagaaagaaaagccaactatgccgttgatgcatatttcagggaagctcttcgtgttagtgaacctaaagcacccaaggctcctcgacctccaaaacaacccaatgttcaggatttccagttctttcctccacgtttatttgaattactggaaaaagaaattctgttttacagaaaaactattgggtacaaggtacctcgaaatcctgagctgcctaatgcagcacaggcacaaaaagaagaacagcttaaaattgatgaagctgaatcccttaatgatgaagagttagaggaaaaagagaagcttctaacacagggatttaccaattggaataagagagattttaaccagtttatcaaagctaatgagaagtggggtcgtgatgatattgaaaatatagcaagagaagtagaaggcaaaactccagaagaagtcattgaatattcagctgtgttttgggaaaggtgcaacgagctccaggacatagagaagattatggctcagattgaaaggggagaggcgagaattcaaagaagaataagcatcaagaaagcacttgacacaaagattggacggtacaaagcaccttttcatcagctgagaatatcatatggtactaacaaaggaaaaaactatactgaagaagaagatcgttttctgatttgtatgcttcacaaacttggatttgacaaagaaaatgtttatgatgaattgcgacagtgtattcgcaactctcctcagttcagatttgactggtttcttaagtccagaactgcaatggagctccagaggagatgtaataccttaattactttgattgaaagagaaaacatggaactagaagaaaaggagaaggcagagaaaaagaaacgaggaccaaagccttcaacacagaaacgtaaaatggatggcgcacctgatggtcgaggaagaaaaaagaagctgaaactatgaatatgtttttgtttcataatcactaactttaaaccagtagttctttaatttacgggtcttcataagatgtactgtacaatgctcaattgttatgtcatttaaagacatcaggttcatctgtttactgagctagaaacatagtatgtagtttcacttttttaaatgcaacagctgtgctgaaatttttttatcattaacacttgaagtaataaaataggcttcatttat

SEQ ID NO: 139435 - DNA, 3557 bp, Artificial Sequence
  derived and/or modified sequence
cgagtgttgaaagtcggtggcgtaggtcgtcgtcctggatgctggcgagatagatgttatcttccagaggaagaggaggaggcggcgaagcgttttcccagcctcagtctctctttcgttttccttttcccttcccccaaccctccgcccttctctaaatcagccggccttccttgacctcagtgacccgtctggccccgcccaccctcgtcgacgtgattcccgccgtgaggtaagcgccggtggaacctagagccccgcggaagagcagaacgtttgggagtgtgcagctcctgggcccggctcaggcccgtcgcggaggcgcggcgcaggggagcgctcgggtgggagtctcgctcctccaccagtttattgcgacgtagcatccaggcctaggcctccccgtccatccccgctggtcccgcagacgccgagatggaggaaatatttgatgatgcgtcacctggaaagcaaaaggaaatccaagaaccagatcctacctatgaagaaaaaatgcaaactgaccgggcaaatagattcgagtatttattaaagcagacagaactttttgcacatttcattcaacctgctgctcagaagactccaacttcacctttgaagatgaaaccagggcgcccacgaataaaaaaagatgagaagcagaacttactatccgttggcgattaccgacaccgtagaacagagcaagaggaggatgaagagctattaacagaaagctccaaagcaaccaatgtttgcactcgatttgaagactctccatcgtatgtaaaatggggtaaactgagagattatcaggtccgaggattaaactggctcatttctttgtatgagaatggcatcaatggtatccttgcagatgaaatgggcctaggaaagactcttcaaacaatttctcttcttgggtacatgaaacattatagaaacattcctgggcctcatatggttttggttcctaagtctacattacacaactggatgagtgaattcaagagatgggtaccaacacttagatctgtttgtttgataggagataaagaacaaagagctgcttttgtcagagacgttttattaccgggagaatgggatgtatgtgtaacatcttatgaaatgcttattaaagagaagtctgtgttcaaaaaatttaattggagatacttagtaatagatgaagctcacaggatcaaaaatgaaaaatctaagttgtcagaaatagtgagggaattcaagactacaaatagactattattaactggaacacctcttcagaacaacttgcatgagctgtggtcacttcttaactttctgttgccagatgtgtttaattcagcagatgactttgattcctggtttgatacaaacaactgccttggggatcaaaaactagttgagaggcttcatatggttttgcgtccattcctccttcgtcgaattaaggctgatgttgaaaagagtttgcctccaaagaaggaagtaaaaatctatgtgggcctcagcaaaatgcaaagggaatggtatactcggatattaatgaaggatatagatatactcaactcagcaggcaagatggacaaaatgaggttattgaacatcctaatgcagttgagaaaatgttgtaatcatccatatctctttgatggagcagaacctggtccaccttatacaacagatatgcatctagtaaccaacagtggcaaaatggtggttttagacaagctgctccctaagttaaaagaacaaggttcacgagtactaatcttcagtcaaatgacaagggtattggacattttggaagattattgcatgtggagaaattatgagtactgcaggttggatggtcagacaccccatgatgagagacaagactccatcaatgcatacaatgaaccaaacagcacaaagtttgttttcatgttaagcacgcgtgctggtggtcttggcatcaatcttgcgactgctgatgtagtaattttgtatgattctgattggaatccccaagtagatcttcaggctatggaccgagcacatagaattgggcagactaagacagtcagagtgttccgctttataactgataacactgtagaagaaagaatagtagaacgtgctgagatgaaactcagactggattcaatagtcattcaacaagggaggcttgtggatcagaatctgaacaaaattgggaaagatgaaatgcttcaaatgattagacatggagcaacacatgtgtttgcttcaaaggaaagtgagatcactgatgaagatatcgatggtattttggaaagaggtgcaaagaagactgcagagatgaatgaaaagctctccaagatgggcgaaagttcacttagaaactttacaatggatacagagtcaagtgtttataacttcgaaggagaagactatagagaaaaacaaaagattgcattcacagagtggattgaaccacctaaacgagaaagaaaagccaactatgccgttgatgcatatttcagggaagctcttcgtgttagtgaacctaaagcacccaaggctcctcgacctccaaaacaacccaatgttcaggatttccagttctttcctccacgtttatttgaattactggaaaaagaaattctgttttacagaaaaactattgggtacaaggtacctcgaaatcctgagctgcctaatgcagcacaggcacaaaaagaagaacagcttaaaattgatgaagctgaatcccttaatgatgaagagttagaggaaaaagagaagcttctaacacagggatttaccaattggaataagagagattttaaccagtttatcaaagctaatgagaagtggggtcgtgatgatattgaaaatatagcaagagaagtagaaggcaaaactccagaagaagtcattgaatattcagctgtgttttgggaaaggtgcaacgagctccaggacatagagaagattatggctcagattgaaaggggagaggcgagaattcaaagaagaataagcatcaagaaagcacttgacacaaagattggacggtacaaagcaccttttcatcagctgagaatatcatatggtactaacaaaggaaaaaactatactgaagaagaagatcgttttctgatttgtatgcttcacaaacttggatttgacaaagaaaatgtttatgatgaattgcgacagtgtattcgcaactctcctcagttcagatttgactggtttcttaagtccagaactgcaatggagctccagaggagatgtaataccttaattactttgattgaaagagaaaacatggaactagaagaaaaggagaaggcagagaaaaagaaacgaggaccaaagccttcaacacagaaacgtaaaatggatggcgcacctgatggtcgaggaagaaaaaagaagctgaaactatgaatatgtttttgtttcataatcactaactttaaaccagtagttctttaatttacgggtcttcataagatgtactgtacaatgctcaattgttatgtcatttaaagacatcaggttcatctgtttactgagctaga

SEQ ID NO: 139436 - protein, 327 aa, Artificial Sequence
  derived and/or modified sequence
MGGSALNQGVLEGDDAPGQSLYERLSQRMLDISGDRGVLKDVIREGAGDLVAPDASVLVKYSGYLEHMDRPFDSNYFRKTPRLMKLGEDITLWGMELGLLSMRRGELARFLFKPNYAYGTLGCPPLIPPNTTVLFEIELLDFLDCAESDKFCALSAEQQDQFPLQKVLKVAATEREFGNYLFRQNRFYDAKVRYKRALLLLRRRSAPPEEQHLVEAAKLPVLLNLSFTYLKLDRPTIALCYGEQALIIDQKNAKALFRCGQACLLLTEYQKARDFLVRAQKEQPFNHDINNELKKLASCYRDYVDKEKEMWHRMFAPCGDGSTAGES

SEQ ID NO: 139437 - DNA, 1500 bp, Artificial Sequence
  derived and/or modified sequence
gtcacagccagggagggcagcggggcgcaccaggccgaaggctcacgccacagggagggcagctaggacatggggggaagcgcgttaaaccagggagtcctggaaggggacgacgcccccggccagtccctgtacgagcggttaagtcagaggatgctggacatctcgggggaccggggcgtgctgaaggacgtcatccgagaaggagctggagacctagtggcgcctgatgcttcggtgctagtgaaatactcgggatacctggaacacatggacagacccttcgattctaattactttaggaaaactcctcggctaatgaaacttggagaggatattacactgtggggcatggagctgggccttctgagcatgcggagaggagagctggccaggtttctgttcaaaccgaactacgcctatggaacgctgggctgccctcccttgatccccccaaacaccactgtcctgtttgagattgagctgcttgacttcctggactgtgctgagtcagacaagttttgtgctctctcagctgagcagcaagaccaatttccacttcagaaggtcctgaaagtggcagctacggaacgggagtttggcaactaccttttccgccagaatcgtttctatgatgccaaagtgagatataaaagggccctgttgcttctgcgccggcgatcagcaccccctgaagagcagcacctggtggaggccgccaagcttcctgttctcctgaacctgtcctttacatacctgaagctagaccgacccaccatagccctgtgctatggagagcaggctttgatcattgaccaaaagaatgccaaggccctcttcaggtgtggacaggcttgtcttctcctgactgagtatcaaaaggcccgggattttctagttcgagcccagaaggagcaacccttcaatcatgacatcaataatgagctgaagaaactggctagctgttacagggactatgtggataaagagaaagaaatgtggcaccgcatgttcgcgccctgtggcgatggttctacagcaggagaaagttgaaggttcttcacctaccaacgaggggagagagctgtggttctccatcattgggggagtggaagggagctcccagcgcagccgtggcagccaccttccaggagcaggggctggaatgtcctgtggccgcatctctcatggacgcggctgaaacgtgttttcacaggtgctgttttctgttttccgtgttcgtaacagaagggaggggaaagcgcagctactgacaagtagaacactgctactttttttaaggcagtttcttgtttttttagacggaattagtccttggcttccctcccagtcccagccctgcttccggctgcgaatgtccctgagtcaacaccaatagagattgctttgtgtattttgtagggttctctgttttgaagacagaattatgttacaaatgtttttgttgtaaataaataaaacacttccttgtccttgcaa

SEQ ID NO: 139438 - DNA, 984 bp, Artificial Sequence
  derived and/or modified sequence
atgggcgggagtgccctgaatcagggagtcctagagggcgatgatgcccccggccagagtttgtatgaacgactttcccagcgtatgctggatatatctggagaccgcggcgtcctgaaagacgtgatcagggaaggagctggcgacctggttgcccctgacgcctccgtcctcgtgaaatacagtgggtacctcgagcatatggatcgaccattcgacagcaactacttcagaaagacaccccgcctgatgaagctgggagaggacattactctttggggaatggaactgggcctgctgagcatgaggcggggcgagttggcgcgctttctgtttaagcccaactatgcttacggaactcttggttgtccccccttaattcccccgaatacgaccgttctgttcgagatagagctgctggacttcctggattgtgcggagagtgacaaattctgcgctctcagcgccgagcagcaggatcagtttcctcttcagaaggtgctgaaagtagctgccaccgaacgagaattcggcaattatctttttcgacagaataggttctacgatgctaaggttcgttataaaagagccttgctgctcctccggcggcgttccgctcctcccgaagagcagcatcttgtggaagctgcaaagctgcctgtactgctcaaccttagctttacttaccttaagctcgatagacccacaatcgccctttgttacggtgaacaggccctcatcatagaccagaaaaatgctaaagcactgttccggtgtggccaggcatgcctgttgttgaccgaatatcaaaaggccagggatttcctggtacgtgcccagaaagagcagccattcaatcacgatattaacaacgagttgaaaaagctggcatcgtgttatcgcgactacgtcgacaaggagaaagagatgtggcaccggatgttcgcaccatgcggggatggatccaccgccggcgagagttag

SEQ ID NO: 139439 - DNA, 984 bp, Artificial Sequence
  derived and/or modified sequence
atgggcggcagcgccctgaaccagggcgtgctggagggagatgatgcccctggccagagcctgtatgaaaggctgagccagaggatgctggacatcagcggggacagaggagtgctgaaggatgtgatccgggagggcgctggggacctggtggccccagatgcctctgtgctggtgaagtacagcggctacctggagcacatggaccggccctttgacagcaactacttcaggaagaccccccggctgatgaagctgggggaggacatcaccctgtggggcatggagctgggcctgctgtccatgagaagaggagagctggcccgcttcctgttcaagcccaactatgcctacggcaccctgggctgccccccactcatcccccccaacaccaccgtgctgtttgaaattgagctgctggacttcctggactgtgccgagagtgacaagttctgtgccctgtctgctgagcagcaggaccagttccccctgcagaaggtgctgaaggtggccgccacagagcgggagtttggaaactacctgttccggcagaaccgcttctatgatgccaaggtgcgctacaagagggccctgctgctgctgcggaggagaagtgcccctcctgaggagcagcacctggtggaggccgccaagctgcctgtgctgctgaacctgtccttcacctacctgaagctggaccggcccaccatcgccctgtgctatggagagcaggccctgatcatcgaccagaagaatgccaaggccctcttccgctgtggccaggcctgcctgctgctgacagagtaccagaaggcccgggacttcctggtgcgggcccagaaggagcagcccttcaaccacgacatcaacaatgagctgaagaagctggccagctgctacagagattatgtggacaaggagaaggagatgtggcacaggatgtttgccccctgtggagatggcagcacagctggggagagctag

SEQ ID NO: 139440 - DNA, 984 bp, Artificial Sequence
  derived and/or modified sequence
atgggcggcagcgccctgaaccagggcgtgctggagggcgacgacgcacctggacaatcgctttacgaacggctgagccagagaatgcttgacatcagtggtgatagaggcgtcttaaaggacgtcatcagggagggcgcaggcgatctcgtggctccagacgcttcagttttggtcaagtatagcggatatttggagcatatggatcggccttttgattcaaactacttccgcaaaacaccccggttaatgaagctgggggaagatattaccctgtggggaatggagttaggtttgctgagcatgcgtcgaggcgaactcgctcgctttttattcaagccgaactacgcatacggcaccctgggatgcccccccctgattccccccaacaccactgtcctgtttgaaatagaactgcttgacttcctggattgtgccgagagtgataaattttgcgcccttagcgctgagcagcaggaccaattccctctgcagaaggtgctgaaagtggccgccaccgaacgtgaattcgggaactatctctttaggcagaaccgcttttatgacgccaaagtccgctacaaaagagccctgctactgctacgcaggagatctgccccgccagaggaacagcacctggtagaggccgccaagctgcccgttcttctgaatctgtctttcacgtatctgaaactcgacaggcccactattgcactctgctacggcgaacaggcactgataattgatcaaaaaaatgcaaaagccctcttcagatgtggccaagcatgcctgttacttaccgaatatcagaaagcaagggactttctggtcagggctcagaaagagcagccctttaaccatgatattaataatgaactcaagaagctggcaagttgctaccgtgactatgtagataaggagaaggagatgtggcatcggatgtttgctccctgcggtgatggaagtaccgcgggtgagtcctag

SEQ ID NO: 139441 - DNA, 984 bp, Artificial Sequence
  derived and/or modified sequence
atggggggtagtgcacttaaccagggcgtgctggaaggagatgatgctcctgggcaaagcctgtacgagcggctcagccaaagaatgctagacatctcaggcgacaggggtgttctgaaagatgtgatcagggagggcgctggcgacctggtggcaccagatgcatccgtgttggttaagtacagcggctatctggaacacatggaccggccattcgacagcaactatttccgcaagacgccaaggttaatgaaattgggagaagatatcacgttgtggggcatggaactggggcttcttagcatgcggcgtggcgagctggccagattcctatttaagcccaattatgcttacggtacattgggctgtccaccactgataccccctaacacaacggtactttttgaaatcgagcttctagactttctggattgcgccgaaagtgataaattctgcgcgctttctgccgagcagcaggatcagtttccactgcaaaaggtgctaaaggtggccgcaacagagcgggagtttgggaactatctattccggcagaataggttctatgacgccaaagtgcggtacaagcgggctctgctgttactacgcagacggtcagccccaccggaggagcagcatctcgttgaggccgctaaactgcccgtgctgttgaacctaagttttacctatttgaagctagatcggcctactatcgccctgtgctatggagaacaggccctaattattgatcagaaaaacgccaaggccctatttcggtgcgggcaagcttgtctactcctcaccgagtatcagaaagcgcgagacttcctcgtgagggctcagaaagaacagcccttcaatcatgacatcaacaatgaactgaaaaagctggccagttgctaccgggattacgtagacaaagaaaaagagatgtggcatcggatgttcgctccttgtggcgatggttctactgcaggagaaagttag

SEQ ID NO: 139442 - DNA, 984 bp, Artificial Sequence
  derived and/or modified sequence
atgggcggcagcgccctgaaccagggcgtgctggagggcgacgacgcccccggccagagcctgtacgagagactgagccagagaatgctggacatcagcggcgacagaggcgtgctgaaggacgtgatcagagagggcgccggcgacctggtggcccccgacgccagcgtgctggtgaagtacagcggctacctggagcacatggacagacccttcgacagcaactacttcagaaagacccccagactgatgaagctgggcgaggacatcaccctgtggggcatggagctgggcctgctgagcatgagaagaggcgagctggccagattcctgttcaagcccaactacgcctacggcaccctgggctgcccccccctgatcccccccaacaccaccgtgctgttcgagatcgagctgctggacttcctggactgcgccgagagcgacaagttctgcgccctgagcgccgagcagcaggaccagttccccctgcagaaggtgctgaaggtggccgccaccgagagagagttcggcaactacctgttcagacagaacagattctacgacgccaaggtgagatacaagagagccctgctgctgctgagaagaagaagcgccccccccgaggagcagcacctggtggaggccgccaagctgcccgtgctgctgaacctgagcttcacctacctgaagctggacagacccaccatcgccctgtgctacggcgagcaggccctgatcatcgaccagaagaacgccaaggccctgttcagatgcggccaggcctgcctgctgctgaccgagtaccagaaggccagagacttcctggtgagagcccagaaggagcagcccttcaaccacgacatcaacaacgagctgaagaagctggccagctgctacagagactacgtggacaaggagaaggagatgtggcacagaatgttcgccccctgcggcgacggcagcaccgccggcgagagctag

SEQ ID NO: 139443 - protein, 666 aa, Artificial Sequence
  derived and/or modified sequence
MNTGRDSQSPDSAKGFRSVRPNLQDKRSPTQSQITVNGNSGGAVSPMSYYQRPFSPSAYSLPASLNSSIVMQHGTSLDSTDTYPQHAQSLDGTTSSSIPLYRSSEEEKRVTVIKAPHYPGIGPVDESGIPTAIRTTVDRPKDWYKTMFKQIHMVHKPDDDTDMYNTPYTYNAGLYNPPYSAQSHPAAKTQTYRPLSKSHSDNSPNAFKDASSPVPPPHVPPPVPPLRPRDRSSTEKHDWDPPDRKVDTRKFRSEPRSIFEYEPGKSSILQHERPTDRINPDDIDLENEPWYKFFSELEFGRPPPKKPLDYVQDHSSGVFNEASLYQSSIDRSLERPMSSASMASDFRKRRKSEPAVGPPRGLGDQSASRTSPGRVDLPGSSTTLTKSFTSSSPSSPSRAKDRESPRSYSSTLTDMGRSAPRERRGTPEKEKLPAKAVYDFKAQTSKELSFKKGDTVYILRKIDQNWYEGEHHGRVGIFPISYVEKLTPPEKAQPARPPPPAQPGEIGEAIAKYNFNADTNVELSLRKGDRVILLKRVDQNWYEGKIPGTNRQGIFPVSYVEVVKKNTKGAEDYPDPPIPHSYSSDRIHSLSSNKPQRPVFTHENIQGGGEPFQALYNYTPRNEDELELRESDVIDVMEKCDDGWFVGTSRRTKFFGTFPGNYVKRL

SEQ ID NO: 139444 - DNA, 2001 bp, Artificial Sequence
  derived and/or modified sequence
atgaacaccggcagagacagccagagccccgacagcgccaagggcttcagaagcgtgagacccaacctgcaggacaagagaagccccacccagagccagatcaccgtgaacggcaacagcggcggcgccgtgagccccatgagctactaccagagacccttcagccccagcgcctacagcctgcccgccagcctgaacagcagcatcgtgatgcagcacggcaccagcctggacagcaccgacacctacccccagcacgcccagagcctggacggcaccaccagcagcagcatccccctgtacagaagcagcgaggaggagaagagagtgaccgtgatcaaggccccccactaccccggcatcggccccgtggacgagagcggcatccccaccgccatcagaaccaccgtggacagacccaaggactggtacaagaccatgttcaagcagatccacatggtgcacaagcccgacgacgacaccgacatgtacaacaccccctacacctacaacgccggcctgtacaaccccccctacagcgcccagagccaccccgccgccaagacccagacctacagacccctgagcaagagccacagcgacaacagccccaacgccttcaaggacgccagcagccccgtgccccccccccacgtgcccccccccgtgccccccctgagacccagagacagaagcagcaccgagaagcacgactgggacccccccgacagaaaggtggacaccagaaagttcagaagcgagcccagaagcatcttcgagtacgagcccggcaagagcagcatcctgcagcacgagagacccaccgacagaatcaaccccgacgacatcgacctggagaacgagccctggtacaagttcttcagcgagctggagttcggcagacccccccccaagaagcccctggactacgtgcaggaccacagcagcggcgtgttcaacgaggccagcctgtaccagagcagcatcgacagaagcctggagagacccatgagcagcgccagcatggccagcgacttcagaaagagaagaaagagcgagcccgccgtgggcccccccagaggcctgggcgaccagagcgccagcagaaccagccccggcagagtggacctgcccggcagcagcaccaccctgaccaagagcttcaccagcagcagccccagcagccccagcagagccaaggacagagagagccccagaagctacagcagcaccctgaccgacatgggcagaagcgcccccagagagagaagaggcacccccgagaaggagaagctgcccgccaaggccgtgtacgacttcaaggcccagaccagcaaggagctgagcttcaagaagggcgacaccgtgtacatcctgagaaagatcgaccagaactggtacgagggcgagcaccacggcagagtgggcatcttccccatcagctacgtggagaagctgaccccccccgagaaggcccagcccgccagaccccccccccccgcccagcccggcgagatcggcgaggccatcgccaagtacaacttcaacgccgacaccaacgtggagctgagcctgagaaagggcgacagagtgatcctgctgaagagagtggaccagaactggtacgagggcaagatccccggcaccaacagacagggcatcttccccgtgagctacgtggaggtggtgaagaagaacaccaagggcgccgaggactaccccgacccccccatcccccacagctacagcagcgacagaatccacagcctgagcagcaacaagccccagagacccgtgttcacccacgagaacatccagggcggcggcgagcccttccaggccctgtacaactacacccccagaaacgaggacgagctggagctgagagagagcgacgtgatcgacgtgatggagaagtgcgacgacggctggttcgtgggcaccagcagaagaaccaagttcttcggcaccttccccggcaactacgtgaagagactgtag

SEQ ID NO: 139445 - DNA, 2001 bp, Artificial Sequence
  derived and/or modified sequence
atgaatacgggcagggacagccagtctcctgatagtgctaaagggttccgatcggtgcggccaaatctgcaagacaagagatcccctacccagagccagattaccgtgaacggcaactccggcggggccgtgtcaccaatgtcctactaccaacgtcctttctcaccctccgcatacagcctaccagcatctttgaattcttcgattgtaatgcagcatggcacgagcttagactccacagatacatacccccagcatgcccagtctctcgatggaaccacgagcagctccatccccttgtatcgctcctctgaagaagaaaagagggtaaccgtcattaaagcccctcattaccctggtatcggacccgtggacgaaagtggaattcccaccgcaatcaggaccaccgtggaccgcccaaaagactggtacaaaacaatgtttaagcaaattcacatggtgcataaaccggacgatgacaccgatatgtataatactccttacacttacaatgccgggctttacaaccccccctatagtgcccaatcgcatccagctgctaagacacagacctatcgacccctctcaaaatcacacagcgataactctcccaacgcttttaaagatgcatcatctcctgtccctcctccccacgtgcctccaccagtcccaccactgaggccaagagatcgaagctccaccgaaaaacacgattgggaccccccggacagaaaggtcgacactagaaagttccggtcagagccccgttctattttcgaatacgagccaggcaagagttctatcctgcaacacgaacggcctactgacagaatcaatcccgatgacattgatctggagaacgagccctggtacaagttcttttccgaactggaatttggcaggcctccgccaaagaagccccttgattatgtgcaagatcacagttcaggtgtttttaatgaggcatctttatatcagtccagtatcgataggtctctggaacggcctatgtcatccgccagcatggcctcagattttcggaagagacgcaaatccgagccagccgtgggccccccacgaggactaggggaccagtctgcatcccgcacttcaccgggccgtgtggacctgcccggttcctctaccaccttgacaaaatcattcacctcaagctcccctagttcaccatcgcgtgcaaaagaccgggaaagccccagaagttacagctcaacactcacggacatggggcgctctgctccccgggagaggagaggtacacccgagaaggagaaactacccgcaaaggcggtgtatgacttcaaagcgcagacatccaaggaattgtcgtttaaaaagggcgataccgtgtacatcctgaggaagattgatcagaactggtatgaaggtgagcatcacggcagggtgggtatatttcccatcagctacgtggaaaagcttacacctcccgagaaggcccaacctgcgcgccctccaccccctgcgcaacctggggagatcggagaggccatcgccaaatacaacttcaacgcagatactaacgttgagctgagcctgaggaaaggggatcgagttatcctgttaaagcgcgtggaccaaaactggtatgaaggaaaaatacccggtacgaacaggcagggtatcttccccgtctcttatgtcgaagttgtgaagaagaatacaaagggtgccgaggattaccctgacccacctatcccacattcctacagtagtgaccgaattcacagtcttagctcaaacaagcctcagcggcctgtgttcacccacgagaatattcagggcggtggtgaaccattccaggcactctacaattacacacccaggaacgaggacgagctcgagctcagagaatccgacgtaattgacgtaatggaaaaatgtgacgatggttggttcgtggggaccagcaggcgtactaaattttttggcaccttccccggtaattacgtgaagagactgtag

SEQ ID NO: 139446 - DNA, 2001 bp, Artificial Sequence
  derived and/or modified sequence
atgaacacaggccgggacagccagagcccagacagcgccaagggcttccgctctgtgcggcccaacctgcaggacaagaggagccccacccagagccagatcaccgtgaatggaaacagcggcggcgctgtgagccccatgagctactaccagaggcccttcagccccagcgcctacagcctgcctgccagcctgaacagcagcatcgtgatgcagcacggcaccagcctggacagcacagacacctacccccagcacgcccagagcctggatggcaccaccagcagcagcatccccctgtaccgcagcagcgaggaggagaagagggtgaccgtcatcaaggccccccactacccaggcatcggccctgtggatgaaagtggcatccccacagccatccgcaccaccgtggaccggcccaaggactggtacaagaccatgttcaagcagatccacatggtgcacaagccagatgatgacacagacatgtacaacaccccctacacctacaatgccggcctgtacaaccccccctacagcgcccagagccaccctgctgccaagacccagacctaccggcccctgagcaagagccacagcgacaacagccccaatgccttcaaggatgccagcagccctgtgcccccaccccacgtgcccccacctgtgccccccctgcggccccgggacaggagcagcacagagaagcatgactgggaccccccagacaggaaggtggacaccaggaagttccgctctgagcccaggagcatctttgaatatgagcccgggaagagcagcatcctgcagcacgagcggcccacagaccgcatcaacccagatgacatcgacctggagaatgagccctggtacaagttcttcagcgagctggagtttggccggcccccacccaagaagcccctggactatgtgcaggaccacagcagcggggtcttcaatgaggccagcctgtaccagagcagcattgacaggagcctggagcggcccatgagcagcgcctccatggccagtgacttcaggaagaggaggaagtctgagcctgctgtgggccccccccggggcctgggggaccagagcgccagcaggaccagccctggccgggtggacctgcccggcagcagcaccaccctgaccaagagcttcaccagcagcagccccagcagccccagccgggccaaggaccgggagagccccaggagctacagcagcaccctgacagacatgggccgcagcgccccccgggagcggcggggcaccccagagaaggagaagctgcctgccaaggctgtgtatgacttcaaggcccagaccagcaaggagctgtccttcaagaagggggacacagtgtacatcctgaggaagattgaccagaactggtatgaaggagagcaccacggccgggtgggcatcttccccatctcctatgtggagaagctgaccccacctgagaaggcccagcctgcccggcccccacctccagcccagcctggagagatcggggaggccatcgccaagtacaacttcaatgctgacaccaacgtggagctgagcctgaggaaaggagacagagtcatcctgctgaagagggtggaccagaactggtatgagggcaagatccctggcaccaaccggcagggcatcttccctgtgtcctatgtggaggtggtgaagaagaacaccaagggagctgaggactacccagacccccccatcccccacagctacagcagtgaccgcatccacagcctgagcagcaacaagccccagaggcctgtgttcacccatgagaacatccagggcggcggggagcccttccaggccctgtacaactacaccccaagaaatgaagatgagctggagctgcgggagagtgatgtgattgatgtgatggagaagtgtgatgatggctggtttgtgggcaccagcaggaggaccaagttcttcggcaccttccctggcaactacgtgaagaggctgtag

SEQ ID NO: 139447 - DNA, 3043 bp, Artificial Sequence
  derived and/or modified sequence
cattttacttatggaaaacagtgtggcatattctgctgagcttcgccctggaagaagcctcttttatacatctcttcagggaagagagaagcaatgggcatgttagtatacaatgatcacagccacgcaggcctgcaagctgccttttggacaggctgttgactgccgttccaattagctgattggagaatgtggaatgcagagtgataatgctgcatatctgctatcaggcagcagcaaaggtttttgtcttgggaaggcaagctttccctgcaatattatctcagcagctccctagctgcttaccctgaaaacgagggatccaaacggagggtgttgcactctgctaacgctggtcctgtgcgtggctgtggcatatgagcggcaggtctgaaaaagcaggtgtgtgctgggacgggcactggactggaacgcaggcggacgctctcgggtttacctgcttcctgttaacagattgtgggctcccagggcatatgtctgcacgctgaggccgaggcggagaaggggcttcctgagcgtcccagtacactgacagagacacttggattggacttaatcttaaacctctggagttcaagaccttttaaaaagggctaaataaacaatctctacatgtaaaaggccactgactcctacttcctctgtatagagcaactgttgaactcagctgcctgtaggaaaactgaagactttaataacaaactctccaaggtgaaaatgaacacagggcgtgattctcagtcaccagactcagcaaaaggttttagaagcgttcgaccaaacctacaagataaaagatcaccaactcagagccagataacagtgaatggaaactcaggaggtgccgtgagtcccatgagttactatcagaggccgttttccccctcggcatattctctcccagcctcactcaactccagcattgtcatgcagcacggcacatccctcgattccacagacacatatccccagcatgcgcagtctctggatggcaccaccagcagctctatccccctgtaccgatcctcagaggaagagaagagagtgacagtcatcaaagccccgcattacccagggatcgggcccgtggatgaatccggaatccccacagcaattagaacgacagtcgaccggcccaaggactggtacaagacgatgtttaagcaaattcacatggtgcacaagccggatgatgacacagacatgtataatactccttatacatacaatgcaggtctgtacaacccaccctacagtgctcagtcacaccctgctgcaaagacccaaacctacagacctctttccaaaagccactccgacaacagccccaatgcctttaaggatgcgtcctccccagtgcctcccccacatgttccacctccagtcccgccgcttcgaccaagagatcggtcttcaacagaaaagcatgactgggatcctccagacagaaaagtggacacaagaaaatttcggtctgagccaaggagtatttttgaatatgaacctggcaagtcatcaattcttcagcatgaaagaccaactgatcgcataaatccagatgacatagatttagaaaatgagccctggtataaattcttttcagaactggagtttggacgcccgcctcctaaaaagcctctggactatgttcaagatcattcttctggtgttttcaatgaggcctccttgtatcagtcctctatagacagaagcctggaaagacccatgagttctgcaagcatggccagtgacttcaggaagcggaggaagagcgagcctgcagtgggtccaccacggggcttgggagatcaaagtgcgagcaggactagcccaggccgagtggacctcccaggatcaagcaccactcttacaaagtctttcactagctcttctccttcttccccatcaagagcaaaagaccgtgagtcccctagaagttactcatccactttgactgacatggggagaagtgcaccaagggaaagaagaggaactccagaaaaagagaaattgcctgcaaaagctgtttatgattttaaggctcagacatctaaggagttgtcatttaagaaaggagatactgtctacatcctcaggaaaattgatcaaaattggtatgagggagaacaccacgggagagtgggcatcttcccgatctcatacgtagagaaactcacacctcctgagaaagcacagcctgcaagaccacctccgccagcccagcccggagaaatcggagaagctatagccaaatacaacttcaacgcagacacaaatgtggagctgtcactgagaaagggagatagagttattcttcttaaaagagttgatcaaaactggtatgaaggtaaaatcccaggaaccaacagacaaggcatcttccctgtttcctatgtggaggtcgtcaagaagaacacaaaaggtgctgaggactaccctgaccctccaataccccacagctattctagtgataggattcacagcttgagctcaaataagccacagcgtcctgtgtttactcatgaaaatattcaaggtgggggggaaccgtttcaggctctgtataactatactcccaggaatgaagatgagctggagctcagagaaagtgatgtcattgatgtcatggaaaagtgtgatgacggctggtttgtggggacctcaagaagaaccaaattctttggtactttccccggaaactacgtcaagaggctgtgaattgcgctccctccttctgtagaggccgcctgccagccatgcacctgcgtcaacgcgcctgaaacaccccgcgggcctcccgttgtcatgccttacggtttccaatgcgccgtcaccatctccacctgccaccaaaccaccagcagagtagccgccgctgctgtgagcctggggacgacatggcaggctggtccccctccgtgaaagtgtggattcctacttcctgctctaagctttgacacgtcaaaatgtgggatcagaaagaaaaaaatcatgatatttaaaaatggtcaaatatttgagg

SEQ ID NO: 139448 - DNA, 2001 bp, Artificial Sequence
  derived and/or modified sequence
atgaacaccggccgggacagccagagccccgacagcgccaagggcttccgctcggtgaggccaaatttgcaggacaagaggtctcctactcaaagtcagatcaccgtaaatggcaactctggtggcgctgtatcaccaatgagctattatcagcgaccgttctcgccttctgcctactctctaccagcgagcctgaactctagtatcgtgatgcagcacggcacctccctcgatagtaccgacacttatccgcagcacgctcagtccctggatggcacaaccagcagtagcattccgctgtacaggagttccgaagaagagaagagagtgactgtcatcaaagccccccactaccccggcattggaccagtcgatgaatctggaatccccaccgccatcaggacgaccgttgatagacctaaggactggtataagaccatgttcaaacagatacacatggtgcacaaaccggacgacgataccgacatgtataataccccttacacctacaatgctgggctatacaatccaccgtactcagctcagtctcatcctgctgcaaagacccagacatataggcccttaagcaagtctcatagtgacaacagtcctaacgcgttcaaggatgcctcctcacccgttccaccaccccatgtgcctccaccagtacctccacttcgcccaagagatagaagttcgactgaaaaacacgattgggatccccctgaccggaaagtggacacacgcaaattcagatccgagccccggtcaatctttgaatacgagcctggtaaatcttcaatcttacagcacgaacgacctacagatagaatcaatccagacgacattgatctcgaaaacgagccctggtacaaatttttctcagaacttgaatttggtcgacctccacctaaaaaacccttggactacgtgcaggaccactcctccggggtgtttaacgaggcaagtctgtatcagagcagcattgatagaagtctggagagacccatgagcagcgcgtccatggcctctgacttccgcaaacggcgcaagagcgaacccgctgtagggcctcccagagggttaggggaccaatccgcatcgcgtaccagtccagggagggtggacttaccaggaagttcaaccaccttaaccaagagcttcacgtcctctagcccttctagtccatcccgtgcaaaagatcgcgagagccctcggtcttattcttccaccctaacagacatgggacgctccgcaccccgtgaaaggcgggggacgcccgaaaaggagaaattgcccgccaaagcagtgtacgatttcaaggcccaaacatctaaggaactaagcttcaagaagggcgataccgtgtatatcctcaggaagattgatcagaactggtacgaaggtgaacaccacggacgcgtaggaattttccccatctcttacgtagagaaactgacccctccagaaaaggcacagccagcccgacctccaccacccgcccagccaggtgaaatcggtgaagcaattgccaaatacaatttcaatgctgatacaaatgtagagttgagcttaaggaagggagatagagtgatcctactgaaaagagtggatcagaactggtatgaagggaagattccaggtaccaatcggcaagggatttttcccgtgtcctatgtggaggttgtaaagaagaacaccaagggggctgaagactatccagatccacccatcccccattcctacagttctgataggatacactcactatcatccaataagcctcaaagaccagtgtttacacatgagaatattcagggcgggggagagcctttccaggccttgtacaactatacaccaaggaatgaggacgaattggagctccgggagagtgatgtgatcgatgtgatggagaaatgcgatgacggttggtttgtcggcacatctcggagaaccaagttttttgggacttttcccggaaattatgtaaaacggctgtag

SEQ ID NO: 139449 - DNA, 2001 bp, Artificial Sequence
  derived and/or modified sequence
atgaacaccggacgagactctcagtcccccgactccgcaaaggggttcaggtccgtgagacctaacctgcaggacaagaggagccccacgcaatctcaaattaccgtgaacggtaactccggcggtgccgtgtcccctatgtcttactaccagagaccattctcaccatcagcctatagtctgcctgcctctctgaacagttcaatagtcatgcaacacggcacatctctcgacagcacagacacctacccccagcacgcccagtccttggacggcacaacgagcagttcaatacctctgtaccgctcctccgaggaagagaagcgggtcaccgtcattaaggcaccccactaccctggcataggcccagtggatgaaagcgggattcccacagcgattcgaactaccgtggatcgccctaaggattggtacaaaaccatgtttaagcagattcatatggtacataagccggacgacgacactgatatgtataataccccatatacctataacgccggtttgtataatcccccttatagcgctcagagtcaccccgcagcgaagacccagacttacaggccactctccaaatctcattcagacaattcaccgaacgccttcaaagacgcttcttcccccgtaccccctccacatgtgccacctcctgtgccccctctgaggccacgtgatcggagttccacggagaaacacgactgggatccccctgaccggaaagtagatacaagaaaattccggtctgaacctagatctatcttcgagtatgagcctggcaagagttctatattgcagcatgagagacccacggaccgcattaaccccgacgacatcgacctcgagaatgagccctggtacaagttctttagcgaactcgaattcggacggccacctccaaagaagcccctggactatgtgcaggaccatagcagcggggtcttcaatgaagcctccctgtaccagagttctatcgaccggtccctagaacggccaatgtctagtgcttccatggcatccgacttccggaagcggcgaaagtctgaaccagccgtgggccctcctcgaggacttggcgatcagtctgcctcccgcacttctcctgggagagtcgacttgcccggaagttcaactacgttaaccaaatcgtttacatcaagctcccctagctcccccagtagagccaaagatcgtgaatcacctagaagctattcgagtactctcacagacatgggcaggagtgcaccgcgagaacgccgtgggactcccgagaaggagaaactgcctgccaaggctgtatacgattttaaagcccagaccagcaaggagctttcttttaaaaagggggatacagtctacattctgcgaaaaatcgaccagaactggtacgagggtgaacatcatggcagagtgggcatatttcctattagttatgtggagaagctcacaccgcctgagaaggcccaaccagccagaccccctcctcccgctcagccaggagagataggggaagccattgcaaagtacaattttaatgcagatacgaacgtcgagttatccctgcggaagggcgatagggtgattttactgaagagggtagatcagaactggtacgagggcaagattccaggtacaaaccgccaaggaatatttccggtgagctacgtggaggtggtaaaaaagaacacgaagggcgcagaagactatcctgatcctccgattcctcacagttactcttccgatcgcatccactctctgagctcaaataaacctcagcgcccagtgtttacccacgagaatatccaggggggtggcgaaccctttcaggcactgtacaattacacacccaggaacgaggatgagctggagctaagggagtccgatgtcatcgacgtaatggagaaatgcgacgacggctggttcgtggggacatcaaggcgcaccaaattcttcggcacattccctgggaattacgtcaagcggctgtag

SEQ ID NO: 139450 - DNA, 575 bp, Artificial Sequence
  derived and/or modified sequence
attctttccctctctcatttgcctctctcttgctttttttccttcagacacttggattggacttaatcttaaacctctggagttcaagaccttttaaaaagggctaaataaacaatctctacatgtaaaaggccactgactcctacttcctctgtatagagcaactgttgaactcagctgcctgtagagcgagaataggacagactcgtataccattctgatctgggtgcatttcttcagaagggcgtgattctcagtcaccagactcagcaaaaggttttagaagcgttcgaccaaacctacaagataaaagatcaccaactcagagccagataacagtgaatggaaactcaggaggtgccgtgagtcccatgagttactatcagaggccgttttccccctcggcatattctctcccagcctcactcaactccagcattgtcatgcagcacggcacatccctcgattccacagacacatatccccagcatgcgcagtctctggatggcaccaccagcagctctatccccctgtaccgatcctcagaggaagagaagagagtgacagtcatcaaa

SEQ ID NO: 139451 - DNA, 546 bp, Artificial Sequence
  derived and/or modified sequence
agcacaacaatcatttgttgagagcctactcaagactctgtacttgtccgtgacagtcactgggagcatagcctttctccaatgacatcgccctgaacatccactctaaaaatgcagggcgtgattctcagtcaccagactcagcaaaaggttttagaagcgttcgaccaaacctacaagataaaagatcaccaactcagagccagataacagtgaatggaaactcaggaggtgccgtgagtcccatgagttactatcagaggccgttttccccctcggcatattctctcccagcctcactcaactccagcattgtcatgcagcacggcacatccctcgattccacagacacatatccccagcatgcgcagtctctggatggcaccaccagcagctctatccccctgtaccgatcctcagaggaagagaagagagtgacagtcatcaaagccccgcattacccagggatcgggcccgtggatgaatccggaatccccacagcaattagaacgacagtcgaccggcccaaggactggtacaagacga

SEQ ID NO: 139452 - DNA, 567 bp, Artificial Sequence
  derived and/or modified sequence
gtaaaaggccactgactcctacttcctctgtatagagcaactgttgaactcagctgcctgtagagcgagaataggacagactcgtataccattctgatctgggtgcatttcttcagaaggtacgctgtcctcacgggaaaccgcccgccactgcctgggtttggggctgatgaggccaggaagaaacttaatgcgtgcactctaacaaaaagatttcccaggcgtgattctcagtcaccagactcagcaaaaggttttagaagcgttcgaccaaacctacaagataaaagatcaccaactcagagccagataacagtgaatggaaactcaggaggtgccgtgagtcccatgagttactatcagaggccgttttccccctcggcatattctctcccagcctcactcaactccagcattgtcatgcagcacggcacatccctcgattccacagacacatatccccagcatgcgcagtctctggatggcaccaccagcagctctatccccctgtaccgatcctcagaggaagagaagagagtgacagtcatcaaagccccgcattaccca

SEQ ID NO: 139453 - DNA, 573 bp, Artificial Sequence
  derived and/or modified sequence
agaacagtagcaccacccagcagctgggattctttccctctctcatttgcctctctcttgctttttttccttcagacacttggattggacttaatcttaaacctctggagttcaagaccttttaaaaagggctaaataaacaatctctacatgtaaaaggccactgactcctacttcctctgtatagagcaactgttgaactcagctgcctgtaggtaaacacggtgttccagaatacagcaggagcatctgggcatttttgtggctggcgtgattctcagtcaccagactcagcaaaaggttttagaagcgttcgaccaaacctacaagataaaagatcaccaactcagagccagataacagtgaatggaaactcaggaggtgccgtgagtcccatgagttactatcagaggccgttttccccctcggcatattctctcccagcctcactcaactccagcattgtcatgcagcacggcacatccctcgattccacagacacatatccccagcatgcgcagtctctggatggcaccaccagcagctctatccccctgtaccgatcctcagagg

SEQ ID NO: 139454 - protein, 1257 aa, Artificial Sequence
  derived and/or modified sequence
MASCSFTRDQATRRLRGAAAAAAAALAAVVTTPLLSSGTPTALIGTGSSCPGAMWLSTATGSRSDSESEEEDLPVGEEVCKRGYLRKQKHGHRRYFVLKLETADAPARLEYYENARKFRHSVRAAAAAAAAAASGAAIPPLIPPRRVITLYQCFSVSQRADARYRHLIALFTQDEYFAMVAENESEQESWYLLLSRLILESKRRRCGTLGAQPDGEPAALAAAAAAEPPFYKDVWQVIVKPRGLGHRKELSGVFRLCLTDEEVVFVRLNTEVASVVVQLLSIRRCGHSEQYFFLEVGRSTVIGPGELWMQVDDCVVAQNMHELFLEKMRALCADEYRARCRSYSISIGAHLLTLLSARRHLGLVPLEPGGWLRRSRFEQFCHLRAIGDGEDEMLFTRRFVTPSEPVAHSRRGRLHLPRGRRSRRAVSVPASFFRRLAPSPARPRHPAEAPNNGARLSSEVSGSGSGNFGEEGNPQGKEDQEGSGGDYMPMNNWGSGNGRGSGGGQGSNGQGSSSHSSGGNQCSGEGQGSRGGQGSNGQGSGGNQCSRDGQGTAGGHGSGGGQRPGGGHGSGGGQGPGDGHGSGGGKNSGGGKGSGSGKGSDGDGERGKSLKKRSYFGKLTQSKQQQMPPPPPPPPPPPPAGGTGGKGKSGGRFRLYFCVDRGATKECKEAKEVKDAEIPEGAARGPHRARAFDEDEDDPYVPMRPGVATPLVSSSDYMPMAPQNVSASKKRHSRSPFEDSRGYMMMFPRVSPPPAPSPPKAPDTNKEDDSKDNDSESDYMFMAPGAGAIPKNPRNPQGGSSSKSWSSYFSLPNPFRSSPLGQNDNSEYVPMLPGKFLGRGLDKEVSYNWDPKDAASKPSGEGSFSKPGDGGSPSKPSDHEPPKNKAKRPNRLSFITKGYKIKPKPQKPTHEQREADSSSDYVNMDFTKRESNTPAPSTQGLPDSWGIIAEPRQSAFSNYVNVEFGVPFPNPANDLSDLLRAIPRANPLSLDSARWPLPPLPLSATGSNAIEEEGDYIEVIFNSAMTPAMALADSAIRYDAETGRIYVVDPFSECCMDISLSPSRCSEPPPVARLLQEEEQERRRPQSRSQSFFAAARAAVSAFPTDSLERDLSPSSAPAVASAAEPTLALSQVVAAASALAAAPGIGAAAAAAGFDSASARWFQPVANAADAEAVRGAQDVAGGSNPGAHNPSANLARGDNQAGGAAAAAAAPEPPPRSRRVPRPPEREDSDNDDDTHVRMDFARRDNQFDSPKRGR

SEQ ID NO: 139455 - DNA, 3774 bp, Artificial Sequence
  derived and/or modified sequence
atggccagctgcagcttcaccagagaccaggccaccagaagactgagaggcgccgccgccgccgccgccgccgccctggccgccgtggtgaccacccccctgctgagcagcggcacccccaccgccctgatcggcaccggcagcagctgccccggcgccatgtggctgagcaccgccaccggcagcagaagcgacagcgagagcgaggaggaggacctgcccgtgggcgaggaggtgtgcaagagaggctacctgagaaagcagaagcacggccacagaagatacttcgtgctgaagctggagaccgccgacgcccccgccagactggagtactacgagaacgccagaaagttcagacacagcgtgagagccgccgccgccgccgccgccgccgccgccagcggcgccgccatcccccccctgatcccccccagaagagtgatcaccctgtaccagtgcttcagcgtgagccagagagccgacgccagatacagacacctgatcgccctgttcacccaggacgagtacttcgccatggtggccgagaacgagagcgagcaggagagctggtacctgctgctgagcagactgatcctggagagcaagagaagaagatgcggcaccctgggcgcccagcccgacggcgagcccgccgccctggccgccgccgccgccgccgagccccccttctacaaggacgtgtggcaggtgatcgtgaagcccagaggcctgggccacagaaaggagctgagcggcgtgttcagactgtgcctgaccgacgaggaggtggtgttcgtgagactgaacaccgaggtggccagcgtggtggtgcagctgctgagcatcagaagatgcggccacagcgagcagtacttcttcctggaggtgggcagaagcaccgtgatcggccccggcgagctgtggatgcaggtggacgactgcgtggtggcccagaacatgcacgagctgttcctggagaagatgagagccctgtgcgccgacgagtacagagccagatgcagaagctacagcatcagcatcggcgcccacctgctgaccctgctgagcgccagaagacacctgggcctggtgcccctggagcccggcggctggctgagaagaagcagattcgagcagttctgccacctgagagccatcggcgacggcgaggacgagatgctgttcaccagaagattcgtgacccccagcgagcccgtggcccacagcagaagaggcagactgcacctgcccagaggcagaagaagcagaagagccgtgagcgtgcccgccagcttcttcagaagactggcccccagccccgccagacccagacaccccgccgaggcccccaacaacggcgccagactgagcagcgaggtgagcggcagcggcagcggcaacttcggcgaggagggcaacccccagggcaaggaggaccaggagggcagcggcggcgactacatgcccatgaacaactggggcagcggcaacggcagaggcagcggcggcggccagggcagcaacggccagggcagcagcagccacagcagcggcggcaaccagtgcagcggcgagggccagggcagcagaggcggccagggcagcaacggccagggcagcggcggcaaccagtgcagcagagacggccagggcaccgccggcggccacggcagcggcggcggccagagacccggcggcggccacggcagcggcggcggccagggccccggcgacggccacggcagcggcggcggcaagaacagcggcggcggcaagggcagcggcagcggcaagggcagcgacggcgacggcgagagaggcaagagcctgaagaagagaagctacttcggcaagctgacccagagcaagcagcagcagatgccccccccccccccccccccccccccccccccccccgccggcggcaccggcggcaagggcaagagcggcggcagattcagactgtacttctgcgtggacagaggcgccaccaaggagtgcaaggaggccaaggaggtgaaggacgccgagatccccgagggcgccgccagaggcccccacagagccagagccttcgacgaggacgaggacgacccctacgtgcccatgagacccggcgtggccacccccctggtgagcagcagcgactacatgcccatggccccccagaacgtgagcgccagcaagaagagacacagcagaagccccttcgaggacagcagaggctacatgatgatgttccccagagtgagccccccccccgcccccagcccccccaaggcccccgacaccaacaaggaggacgacagcaaggacaacgacagcgagagcgactacatgttcatggcccccggcgccggcgccatccccaagaaccccagaaacccccagggcggcagcagcagcaagagctggagcagctacttcagcctgcccaaccccttcagaagcagccccctgggccagaacgacaacagcgagtacgtgcccatgctgcccggcaagttcctgggcagaggcctggacaaggaggtgagctacaactgggaccccaaggacgccgccagcaagcccagcggcgagggcagcttcagcaagcccggcgacggcggcagccccagcaagcccagcgaccacgagccccccaagaacaaggccaagagacccaacagactgagcttcatcaccaagggctacaagatcaagcccaagccccagaagcccacccacgagcagagagaggccgacagcagcagcgactacgtgaacatggacttcaccaagagagagagcaacacccccgcccccagcacccagggcctgcccgacagctggggcatcatcgccgagcccagacagagcgccttcagcaactacgtgaacgtggagttcggcgtgcccttccccaaccccgccaacgacctgagcgacctgctgagagccatccccagagccaaccccctgagcctggacagcgccagatggcccctgccccccctgcccctgagcgccaccggcagcaacgccatcgaggaggagggcgactacatcgaggtgatcttcaacagcgccatgacccccgccatggccctggccgacagcgccatcagatacgacgccgagaccggcagaatctacgtggtggaccccttcagcgagtgctgcatggacatcagcctgagccccagcagatgcagcgagcccccccccgtggccagactgctgcaggaggaggagcaggagagaagaagaccccagagcagaagccagagcttcttcgccgccgccagagccgccgtgagcgccttccccaccgacagcctggagagagacctgagccccagcagcgcccccgccgtggccagcgccgccgagcccaccctggccctgagccaggtggtggccgccgccagcgccctggccgccgcccccggcatcggcgccgccgccgccgccgccggcttcgacagcgccagcgccagatggttccagcccgtggccaacgccgccgacgccgaggccgtgagaggcgcccaggacgtggccggcggcagcaaccccggcgcccacaaccccagcgccaacctggccagaggcgacaaccaggccggcggcgccgccgccgccgccgccgcccccgagcccccccccagaagcagaagagtgcccagaccccccgagagagaggacagcgacaacgacgacgacacccacgtgagaatggacttcgccagaagagacaaccagttcgacagccccaagagaggcagatag

SEQ ID NO: 139456 - DNA, 3774 bp, Artificial Sequence
  derived and/or modified sequence
atggccagttgcagttttacaagagatcaagcaactcgtcggttaagaggcgctgcggccgccgctgccgcagcactggccgcggtcgtgaccactccactgctctcatctggaacccctaccgctcttattggcacaggctcttcttgtcccggtgcaatgtggctgagtacagccacaggctctcgttcagactcggagtctgaggaggaagaccttcccgtaggcgaagaagtgtgcaaacggggatacctaagaaagcaaaagcatggccatcggcgctattttgtgttaaaactcgaaaccgctgacgcgcctgccaggcttgagtattatgagaacgctcgcaaattccgacattccgtgagagctgccgctgcagcggcagctgcagcagccagcggcgccgcaatcccaccattaattcctccccggcgggtgatcacgttataccagtgcttcagcgtgtcacaaagagcggatgctcgatataggcatctgatcgctttatttacccaggacgaatactttgccatggtggctgagaatgagtctgaacaggaatcttggtatctgttgctcagcagactgattctggagtctaagaggaggagatgcggtaccctgggtgctcagcccgatggcgaacccgcggcactagctgccgcagcggctgctgaaccacctttctacaaggacgtgtggcaagtcatcgttaaaccaagggggctcggtcacagaaaggagctaagcggggtgttcagactatgtctgaccgatgaagaagtcgtgtttgtacggctgaatactgaagtggcatccgtggtggttcagcttttgtccatcagacgatgcgggcattcggaacagtactttttcctggaggtgggaaggagcactgtgatcggcccaggtgagctctggatgcaggtggacgattgtgtggtcgcacagaatatgcacgaactctttttggagaagatgcgggctttatgcgccgacgagtaccgagcaagatgtcgaagctacagcattagtattggcgcacacctgctcaccttgctgtccgccagaagacatttgggcctcgtgcctcttgaaccaggaggctggctccgccggtctagatttgaacagttttgccaccttcgcgccataggcgatggcgaggatgagatgctgttcactaggcgctttgtgacccctagtgaaccagtggctcacagcagacgcgggcgccttcatcttccacgtgggcgcagatctcgaagggcagtgtccgtgcctgcatcctttttccggagattagcgccttcaccggcccgccctcgccacccagctgaagcacctaataatggagctcgccttagttcagaagtgtcaggcagcggcagcggaaatttcggagaagaaggaaatccacagggcaaagaagatcaggaggggtccgggggcgattacatgcccatgaataattggggtagtggcaacggcagaggaagcgggggcggccagggctccaatggccagggttcaagttcccactccagcggtggcaaccagtgttccggggaggggcagggctcccgtgggggacagggttccaacggccagggatctggtggaaatcagtgctcaagggatggtcagggaaccgctgggggccacgggtcaggtggggggcagcgcccgggcggtggacatggtagcggaggcggacaggggccaggcgatggccatggtagcgggggaggcaagaattccgggggaggaaagggttccggatccgggaagggcagcgacggggatggcgaaagagggaaatcactgaagaaaagatcatactttggcaaacttactcagtctaagcagcagcagatgcccccccctccgccgccaccccctccccctccgcccgccgggggcaccgggggaaaaggcaaaagcggaggcaggttccggctttatttttgtgttgataggggtgccacaaaggagtgtaaagaggccaaagaggtcaaggatgcagaaatccccgagggtgccgcaagaggtccccatcgagctcgggccttcgacgaagatgaggatgacccgtacgtccccatgagaccaggtgttgctacaccacttgttagttccagcgattacatgcctatggctccccagaatgtcagtgcctctaagaaaagacacagtcggtcccctttcgaagatagcagagggtatatgatgatgtttccacgcgtgtctcccccgcctgcccccagtccaccaaaggctccagacacgaataaagaggatgattcgaaggacaacgactctgagagcgattacatgtttatggctccaggagccggagctatccccaagaacccacgaaatccacaggggggatcttctagcaagtcatggtctagctatttctccctacccaacccgtttagatcctctccactcggccagaacgataattcggaatatgttcctatgctcccaggcaaattcctaggacgagggcttgacaaagaggtgtcgtataattgggacccaaaggacgccgcctcaaaaccaagtggcgagggatcattttcaaagcccggagacggtggatctccatcaaaaccctcagatcatgaacccccaaaaaataaagccaagagacctaatagattaagcttcattacaaaaggctacaagatcaagccaaaacctcagaagccgacacacgaacagagggaagccgatagtagttcagattatgtgaacatggatttcaccaagagggagagcaacacacccgccccctcgacgcaaggccttccagacagttggggtatcatcgctgagccacgccagtctgcctttagcaactacgtcaatgttgagttcggcgtcccctttcccaatcccgcgaatgatttgagcgacctactgagggccatccctagagcgaacccactttctctggactccgcaagatggccacttccacccctccccttgagcgccaccggttccaacgccatcgaggaagagggagactatatcgaagtgatcttcaacagcgccatgacaccagctatggcactagctgattcagcaattagatatgacgcagagaccggcaggatctatgttgtggatccgttttctgagtgttgcatggatatttctctcagcccatcccggtgctcagagccccctcccgtggcaagacttcttcaagaagaggagcaagaacgcaggaggccacagtcgaggagtcagtcattcttcgccgccgccagggcagccgtatctgccttccctactgactctcttgagcgggatcttagcccttcatctgcgcctgccgtagcttccgccgctgagcccaccctggcgctttcccaggttgttgccgcggctagcgccctggctgcggcaccagggatcggagccgcagctgctgccgcagggtttgattccgcatcagcccgatggtttcagccagtcgctaatgctgcagatgcggaagccgtgaggggggcacaggacgtagcagggggcagcaaccccggagcccataacccatctgccaatctggcccgcggtgacaaccaggccggaggcgcggccgcagcggctgccgccccagagcccccccctaggagtcgccgcgtcccccgaccaccagagagggaggactcggacaatgacgatgacacccatgtgaggatggattttgccagacgggacaatcagtttgattccccaaaacgcggcagatag

SEQ ID NO: 139457 - DNA, 3940 bp, Artificial Sequence
  derived and/or modified sequence
gacagcctcttcccccaaccctccctttcctgaattccccctcctcctcgctcaccttaaaaccatcgtgcatcaccatggcgagttgctccttcactcgcgaccaagcgacaagaagactaagaggtgcagcagcggcggcagcggcagctctagcagcagtggtgaccaccccgcttctttcctcgggaaccccgaccgcactcattgggaccgggtcgtcttgtccgggagccatgtggctctccacggccactggctcccggtcagactccgagtccgaagaggaggacctgcccgtcggggaggaagtctgcaaacgcggctacctgcggaaacagaagcatgggcacaggcgctacttcgtgctcaaactcgagactgctgacgccccagctcggctggaatactacgaaaatgccaggaagttccggcacagtgtccgcgccgcggcggctgcagcagcggcggccgcctctggcgccgcgatccccccgctcattccaccgcggcgcgtgatcaccctataccagtgcttttccgtgagccagcgagcagatgcaaggtaccgacacctcattgctcttttcacccaagacgaatacttcgcgatggtggccgagaacgagtcggagcaggaaagctggtacttgctgctcagccgcctcatcctcgagagcaagcgccgccgctgcggcacgctcggcgcgcagccggacggagagccggccgcgctggcggcggcagcggcggcggagccacccttctataaagatgtgtggcaggtaatagtcaaacccagggggctggggcacagaaaagagctgagcggcgtgttccggctgtgtctaaccgacgaggaggtcgtgtttgtgaggctgaacaccgaagtggccagcgtggtcgtccagctcctgagcatccgtcgctgtggacactcggagcagtatttcttcttggaagtaggcaggtccactgtcatcggtccgggagagctctggatgcaggtcgatgactgtgtggttgcccaaaacatgcatgagctgtttttggagaagatgagagccttgtgtgcagacgaatacagagcccgctgccgcagctacagcatcagcatcggcgcccacctgttaaccctgctgtccgctaggaggcacctgggcttggtgccgctcgagccgggaggctggctcagaaggtcccgctttgagcagttttgccacctcagggccatcggcgacggggaagacgagatgcttttcaccaggcgcttcgtaacacccagcgagcctgtggcccactccaggcgaggaagactgcacctgcccagagggcgcaggtcaaggagagcggtttcagtgccggccagcttttttcgccgcttagcacccagcccagcacgtccccggcaccctgcagaagccccgaacaatggagctcgcctgtcttctgaagtgtctggttctggctctggcaactttggggaggaaggcaatccccagggcaaagaagatcaggaaggaagcggaggtgactacatgcctatgaacaattggggctcaggaaatggccggggctcaggaggtggccagggctcaaatggccaaggctccagtagccatagctcgggaggaaaccagtgttcaggcgagggacagggatcccgaggtggtcagggctcaaatggccagggctcaggaggaaaccagtgctctagagatggccagggcaccgcaggtgggcacggttcaggtggtggccagagacctggaggtgggcatggctcaggtggtggccagggacctggagatggccatggctcaggtggtggcaagaactctggggggggcaaaggctcaggaagtgggaaaggatccgatggtgatggtgaacgtggaaaatctctgaagaaaagatcctattttggcaaattaactcaaagcaagcaacagcaaatgccaccacctccaccacctcctcctccacccccaccagctggaggaactggtggaaaagggaagtctgggggaagattcagactttatttttgtgttgacagaggagccacgaaagaatgcaaagaagccaaagaagtgaaagatgcagagatcccagaaggtgcagctcgaggtccccacagagccagagcttttgatgaagatgaggatgacccatacgtgccaatgaggccaggggtggccacccctcttgtaagctccagtgattatatgccaatggctcctcaaaatgtctctgcttcaaaaaagcgccactctcgatccccttttgaagattcaagagggtacatgatgatgtttcccagagtgagcccaccacctgctccgagtcctccaaaagcacctgatactaataaagaggatgactcaaaggacaatgacagtgagagtgactacatgtttatggctcctggagccggtgcaattccaaaaaaccccagaaatcctcagggtggctcttcctccaaaagttggagctcctacttctctctaccaaacccttttcggagctcacctttgggacagaatgacaacagtgagtatgtgccaatgttacctggaaagttcctggggaggggcctagacaaagaagtctcctataactgggaccccaaagatgcagcttcaaagccttcaggtgagggatcattctcaaagcctggagatgggggatcaccttcaaagccttcagatcatgagcccccaaagaataaagctaagagacctaaccgactttcttttattacaaaaggatataaaatcaagccaaaaccacaaaagcccacacatgagcagagagaagctgacagctctagtgactacgtcaacatggacttcactaaaagagagagcaatacaccagctccctctactcaaggactaccagattcgtggggcataattgctgaacccagacagtcagccttttctaattatgtgaatgttgagtttggagtgccatttccaaatccagcaaacgacctctcagatcttttaagagctataccacgtgccaaccccttatctctggacagtgctaggtggccacttcctccccttcccctcagtgctacaggtagcaatgctattgaggaagagggtgactacattgaagtaattttcaactcagcaatgacaccagccatggctcttgctgacagtgccattcgctatgatgctgaaacaggtcgaatctatgtggtcgacccattttctgagtgctgtatggatatttctctctcccccagccgatgttctgaaccaccacctgtagctaggctgctgcaggaagaagagcaggagagaagacgcccacaaagccgttctcaaagtttctttgcagcagccagagccgctgtctctgcttttccaacagacagcctcgagagagacctttccccatcctcagccccggctgtcgcttcggctgcagagccgactttagccctcagccaagttgtagctgcggcctccgcgctcgccgcagccccgggcatcggcgcagcagccgcagctgctggatttgactccgcctctgcccgctggtttcaacctgttgctaatgctgctgatgccgaagcagtaaggggagcccaagacgttgccggtggctcgaaccctggagcccacaacccatctgcaaaccttgccagaggtgataaccaggctggcggggctgccgctgcagctgccgctccggaaccaccacctcgcagtcgccgggtgccaagacccccggagagagaagattctgacaacgacgacgacactcacgtgagaatggattttgccagacgtgataatcagttcgactctcccaaaagaggtcggtaattttagaattaatttccctaaagtgaatggtcattgtctaatgattcgatgcgctacagtctacagtgttagggatactatttcattaa

SEQ ID NO: 139458 - DNA, 3774 bp, Artificial Sequence
  derived and/or modified sequence
atggccagctgcagcttcacccgggaccaggccacccggcggctgcggggagctgctgctgctgctgctgctgccctggccgctgtggtgaccacccccctgctgagcagcggcacccccacagccctgattggcaccggcagcagctgccctggggccatgtggctgagcacagccaccggcagcagaagtgacagcgagagcgaggaggaggacctgcctgtgggggaggaggtgtgcaagaggggctacctgaggaagcagaagcacggccaccggcgctactttgtgctgaagctggagacagcagatgccccagcccggctggagtactatgaaaatgccaggaagttccgccacagcgtgcgggctgctgctgctgctgctgctgctgctgccagcggggccgccatccccccactcatccccccaagaagagtcatcaccctgtaccagtgcttctctgtgtcccagagagcagatgcccgctaccgccacctgattgccctcttcacccaggatgagtactttgccatggtggccgagaatgaaagtgagcaggagagctggtacctgctgctgagccgcctcatcctggagagcaagagaagaagatgtggcaccctgggcgcccagccagatggagagcctgctgccctggccgctgctgctgctgctgagccccccttctacaaggatgtgtggcaggtgattgtgaagccccggggcctgggccacaggaaggagctgtctggagtcttccggctgtgcctgacagatgaggaggtggtgtttgtgcggctgaacacagaggtggcctctgtggtggtgcagctgctgagcatcagaagatgtggccacagcgagcagtacttcttcctggaggtgggccgcagcaccgtcatcggccctggagagctgtggatgcaggtggatgactgtgtggtggcccagaacatgcatgagctgttcctggagaagatgagggccctgtgtgctgatgagtaccgggcccgctgccgcagctacagcatcagcattggagcccacctgctgaccctgctgagcgcccggcggcacctgggcctggtgcccctggagcccggcggctggctgcggcgcagcagatttgagcagttctgccacctgcgggccatcggagatggagaagatgagatgctgttcaccaggagatttgtgaccccatctgagcctgtggcccacagccggcggggccgcctgcacctgccccggggccgccgcagcagaagagctgtgtctgtgcctgccagcttcttccggcggctggcccccagccctgcccggcccaggcaccctgctgaggcccccaacaacggggcccggctgagcagcgaggtgtctggcagcggcagcggcaactttggagaggagggcaacccccagggcaaggaggaccaggagggcagcggcggggactacatgcccatgaacaactggggcagcggaaatggccggggcagcggcggcggccagggcagcaatggccagggcagcagcagccacagcagcggcggcaaccagtgcagcggggagggccagggcagcagaggaggccagggcagcaatggccagggcagcggcggcaaccagtgcagcagagatggccagggcacagctgggggccacggcagcggcggcggccagaggcctgggggcggccacggcagcggcggcggccagggccctggagatggccacggcagcggcggcggcaagaacagcggcggcggcaagggcagcggcagcggcaagggcagtgatggagatggagagcggggcaagagcctgaagaagaggagctactttgggaagctgacccagagcaagcagcagcagatgcctcctcctcctcctcctcctcctcctcctcctcctgctgggggcactggaggcaagggcaagagcggcggccgcttccggctgtacttctgtgtggacagaggagccaccaaggagtgcaaggaggccaaggaggtgaaggatgctgagatccctgagggcgccgcccggggcccccaccgggcccgggcctttgatgaagatgaagatgacccctacgtgcccatgaggcctggggtggccacccccctggtgagcagcagtgactacatgcccatggccccccagaatgtgtctgccagcaagaagaggcacagccgcagcccctttgaggacagccggggctacatgatgatgttcccccgggtgagccccccaccagcccccagcccccccaaggccccagacaccaacaaggaggatgacagcaaggacaatgattctgagagtgactacatgttcatggcccctggggccggggccatccccaagaaccccaggaacccccagggcggcagcagcagcaagtcctggagcagctacttcagcctgcccaaccccttccgcagcagccccctgggccagaatgacaacagtgaatatgtgcccatgctgcccgggaagttcctgggccggggcctggacaaggaggtgtcctacaactgggaccccaaggatgctgccagcaagcccagcggggagggcagcttcagcaagccaggagatggcggcagccccagcaagcccagcgaccacgagccccccaagaacaaggccaagaggcccaaccggctgtccttcatcaccaagggctacaagatcaagcccaagccccagaagcccacccatgagcagcgggaggccgacagcagcagtgactatgtgaacatggacttcaccaagcgggagagcaacaccccagcccccagcacccagggcctgcctgacagctggggcatcatcgccgagccccggcagagcgccttcagcaactacgtgaatgtggagtttggagtgcccttccccaacccagccaatgacctgagtgacctgctgcgggccatcccccgggccaaccccctgagcctggacagcgcccgctggcccctgccccccctgcccctgagcgccaccggcagcaatgccatcgaggaggagggggactacattgaagtcatcttcaacagcgccatgaccccagccatggccctggccgacagcgccatccgctatgatgctgagaccggccgcatctacgtggtggaccccttcagcgagtgctgcatggacatcagcctgagccccagccgctgcagcgagcccccacctgtggcccggctgctgcaggaggaggagcaggagaggagaagaccccagagccgcagccagagcttctttgctgctgcccgggctgctgtgtctgccttccccacagacagcctggagcgggacctgagccccagcagcgccccagctgtggccagcgctgctgagcccaccctggccctgagccaggtggtggccgccgccagcgccctggccgccgcccctggcatcggggctgctgctgctgctgctggctttgattctgccagcgcccgctggttccagcctgtggccaatgctgctgatgctgaggccgtgcggggggcccaggatgtggccggcggcagcaaccctggggcccacaaccccagcgccaacctggcccggggggacaaccaggccggcggcgctgctgctgctgctgctgcccctgagcccccacccaggagccggcgggtgcccaggcctcctgagagagaagattctgacaatgatgatgacacccacgtgaggatggactttgcccggcgggacaaccagtttgacagccccaagagaggaagatag

SEQ ID NO: 139459 - DNA, 3774 bp, Artificial Sequence
  derived and/or modified sequence
atggccagctgcagcttcacccgggaccaggccacccggcggctgagaggggcagcagcggcggcagccgcagccctggctgccgtcgttaccacacctctgttatcctcaggtactcccaccgcactgattggcacgggaagttcctgtccaggcgcaatgtggctctctacagcaactggttctcggtctgacagcgaaagtgaggaggaagaccttccagtgggggaagaggtgtgtaaaagagggtacctccgaaagcagaaacatggtcacagaagatatttcgtcctcaaattggaaaccgctgatgccccagcaagattagagtactatgagaatgccaggaaattccgccatagtgttcgcgcagccgcagcagctgccgccgccgccgcgagtggggccgcaatccctccccttatcccccctagacgtgttattaccctctaccagtgcttttctgtctctcagagagccgatgctcgatatagacacctcatcgcccttttcacacaggacgagtattttgccatggtggcggagaacgagagcgagcaggagtcttggtatttgctgctgtctcgcctgatactggagagcaaacgaaggcgatgtggcaccctgggcgcccagcccgacggcgaaccagccgctctggctgcagccgctgccgccgagcccccattctataaagacgtgtggcaagtaatcgtcaaaccccggggtctggggcatcgcaaggagctttccggagtcttccggctctgtctgacggatgaggaggttgtgttcgtccggctgaacacagaagttgcatccgtggtggtccaactgctatccataagaaggtgcggtcactccgaacagtacttttttcttgaggtcggccggtccactgtgatcgggcccggcgaactctggatgcaagtggatgactgcgtcgtagctcaaaacatgcacgagctgttcctggaaaagatgagggccctgtgcgctgacgagtaccgcgcccgctgcagatcctattccatcagcataggggcccatctgctaaccctgctgagcgctcgacgccatctgggtctcgttcccctggaaccaggaggttggcttcgccgatccaggtttgaacagttttgccatctgcgagccatcggcgacggcgaagatgaaatgctgttcacacgccggtttgtgaccccctccgaacccgttgcccatagccggaggggcagactgcacctgccccgcgggcgccgctcccgccgcgcagtttcggtgcccgcgtcattcttcagaaggctggctccaagtcctgctaggccacgtcaccccgccgaggccccgaacaacggcgcaaggctgagttccgaggtctcaggctcaggtagcgggaatttcggcgaagagggcaacccacagggaaaggaagaccaggaaggctccggcggggactatatgcctatgaataattggggttccgggaacggccgcgggtctggtggaggacagggatccaatgggcaggggtccagtagccatagcagcggaggaaatcagtgttcaggagagggacaggggagccggggaggacaaggctccaacggccagggcagcggcgggaatcaatgtagtagagatgggcagggtactgcgggcggccacggctctggtggcggacagaggcccggaggtgggcatggtagtgggggcggtcagggacctggcgacggccacggttcaggcggtggcaagaattccggcggcggcaagggcagcgggagtgggaaggggtccgacggcgatggcgagcgaggaaaatccctgaaaaaaagaagctactttgggaagctaacccaatctaaacagcagcaaatgccacccccaccccccccacccccaccacctccaccggctggcggaaccggggggaagggcaagagcggcgggcggttccggttatatttttgcgtagaccggggggctaccaaggaatgcaaagaggcaaaggaagtcaaagacgcagaaatacccgaaggtgctgcccgaggacctcacagagcccgggcattcgatgaagacgaggatgacccgtatgtgcctatgcggcccggggttgccacccccctggtgtcctcaagcgattatatgcccatggcccctcaaaatgtgtcggcatcaaagaagaggcactccagatctccctttgaggatagcagaggctacatgatgatgttcccgcgcgtgagccctcccccagccccctctccaccaaaagctcctgacaccaacaaggaagacgattctaaagataatgacagtgaaagcgattacatgttcatggcgccaggcgccggcgcgatcccaaaaaacccacgcaatccacaaggagggtccagcagcaaaagttggtccagttacttctcactgcctaatcctttccggagcagtccgctcggacaaaatgacaattcagagtatgttcccatgttgcctggcaaattcctcggcaggggtctagacaaggaggtgagctataactgggacccgaaggacgccgcttccaagcccagcggagaggggtcttttagcaagccaggcgacgggggtagccctagcaagccctccgaccatgaacccccaaaaaataaggccaaacggcccaatcgactcagcttcattaccaaaggctacaagatcaagccaaagccccagaaaccgacacatgagcagcgtgaagccgattcatcatcggattacgtgaatatggacttcaccaaaagagagagcaatacaccagctcctagcacacaaggactccctgacagctgggggatcattgctgagcctcgacagtccgcattcagcaactacgttaacgtggagttcggcgtcccctttccaaacccggctaacgatctgtcagacctgctccgggctatcccaagggccaaccccttgtccctggattctgcccggtggccccttccccctttgcccctcagcgccactggctccaacgcgattgaggaagagggggactatatcgaggttatattcaacagcgctatgaccccggctatggccctggccgatagcgccattcgttacgacgcagaaacaggccgcatttatgttgtcgatcctttcagcgagtgctgtatggacatcagtttatctccatctagatgctcagagcctccccccgtcgcaaggctgctccaggaagaggagcaagagcgccgacgacctcaaagccgaagtcaaagctttttcgccgcagctcgcgcagctgtaagtgcgttcccaaccgattcactggaaagagatctgagtccttcgtctgctcctgctgtggcgtccgctgctgagccaaccctggccctctctcaagtcgtagctgccgcatcagctctcgctgccgctccaggcatcggtgccgcagctgcagccgctggattcgatagcgcttccgcccggtggtttcagccggtagcaaacgccgccgacgccgaggcagttcggggagcccaagacgtcgccggcggctctaacccgggggcgcataacccatctgctaatctggcacgcggcgacaatcaagcggggggggccgccgcagcagcggcagcgcccgagcctcctcctcgtagtcgccgggttcccagaccaccagagcgggaggactctgacaacgacgatgatacacacgtaaggatggacttcgcccgccgcgacaaccaatttgattctcctaaaaggggaaggtag

SEQ ID NO: 139460 - DNA, 3774 bp, Artificial Sequence
  derived and/or modified sequence
atggcatcttgctcctttacacgggaccaggccaccagaagactccggggagcagccgctgctgccgctgctgcacttgccgctgtggtgactaccccacttctctcgtctggtacacccacggctctgatcggcacaggctcttcctgcccaggggcaatgtggcttagtacagccacaggctcccgttccgacagcgaaagcgaagaagaagacctgcctgttggggaggaggtttgcaaaaggggctacttgcggaagcaaaaacacggccatagacggtacttcgtgctgaagttggagaccgctgacgcacctgctcgcctcgagtactacgaaaatgcacgaaaatttcggcactctgtgcgtgctgcggcagctgcagctgctgccgctgccagcggtgccgctatccctcccttgatccccccaagaagggtaattactctgtaccagtgcttcagcgtgtctcagagagcggacgccaggtatcggcacctgattgctttgtttactcaagacgaatactttgcaatggtggcggagaatgagtccgagcaggaaagctggtacttactgctctcccggcttatcctggaatccaagaggcgtagatgtggaacccttggtgcgcaaccggatggcgaaccagccgctctggcggctgccgcagctgccgaaccccctttttacaaggatgtgtggcaggtgatcgtcaaaccaagggggctgggacatcggaaggaattgtcaggcgtgtttcggctctgtctgacagatgaagaggtggtttttgtgcggttgaacacagaagtcgcctctgtggtggtccagcttctgtctatcagacgctgtggacactcagaacaatacttctttctcgaagttgggagatctaccgtgatcggtccgggagaactttggatgcaggtggacgattgtgtcgtcgcacagaatatgcacgagcttttcctcgaaaagatgagagcgctttgtgctgacgagtacagggccagatgcaggtcctattccatttccattggagcccacctgcttacactgctcagcgccagacgtcatctgggattggtcccgctagagccgggaggatggctacgcagatctaggttcgagcagttctgccacctacgtgctataggcgatggcgaagacgagatgctgtttacaaggaggttcgtgacaccctcagaacccgtggctcactcaaggcgtggtcggctgcacttgcctagagggaggcggtccagaagagcagttagcgtgcccgcatcctttttccgcagactggcgccaagccccgcacgccctaggcacccagccgaagcaccaaacaatggcgctagactttcttctgaggtgtcaggtagcggctcaggcaattttggcgaagagggtaatcctcagggcaaagaagatcaggaggggtcagggggtgactacatgccaatgaacaactggggcagcggaaacggacgtggttctggcggagggcagggcagcaacggccaggggagcagcagccacagctccggaggcaaccagtgcagcggggaaggacagggtagtcggggaggccaaggctctaacggccagggatccggtggtaatcaatgctctcgggacgggcagggcaccgccggtggccatggctccggtggaggccagagaccagggggtggccatggctcaggcggaggccaggggccaggggacggccatgggtcgggaggtgggaagaacagcggcggagggaaaggctcaggctcaggaaaggggagtgacggagacggtgagcgagggaaaagcctgaagaagcggtcctacttcggtaaactcacacagtctaaacagcagcagatgcccccaccacctccacccccaccaccaccgccacctgccggaggaaccgggggaaaaggtaaatcgggcggacgtttcaggctttacttctgtgtcgaccggggagccactaaagaatgcaaggaagccaaggaggtgaaggacgcagaaatcccagagggcgctgcaagaggaccacacagggcacgcgctttcgatgaggatgaagacgacccttacgtccccatgcgcccaggcgtggccacgcccctggtgagctctagtgattatatgccgatggccccacagaatgtttcagcctcaaaaaagcggcactctcgtagcccgtttgaggatagcaggggctacatgatgatgtttcctagggtgtcacccccacccgcaccaagccctccaaaagcacctgacacgaacaaggaggacgatagcaaagacaatgacagtgagtcagactatatgtttatggcccctggggctggcgctatccccaagaatccacgcaacccacagggcggaagttccagcaagagctggtcgtcctatttcagcctgccgaatccattcaggtcctccccactgggtcaaaatgacaattctgaatacgtgccaatgctgccaggcaagttccttggaaggggactggacaaagaagtgagttacaactgggaccccaaggacgctgctagcaagcctagtggcgaaggttcgttcagcaagcccggagacgggggaagcccctctaagccttcagaccatgagcctcctaaaaacaaagctaaaagacccaacaggctcagcttcatcactaaagggtacaaaatcaagccaaaaccccagaagcccactcacgaacagcgcgaggctgattcctctagtgactacgtgaacatggactttactaagcgggaatcaaacaccccagccccatctactcaggggctgccagacagttggggtatcatcgctgagcctaggcagtctgccttctccaactacgtgaacgttgagtttggcgtaccctttcctaatccagcaaacgatttgtctgatctgctgagagccatcccacgagcaaaccccctcagtctggattccgcacgctggccactgcctccactgcctctgtccgctaccgggtcaaatgctatcgaagaggagggcgattatattgaggtgatctttaactctgctatgacgcccgcaatggctctggcggatagcgcgattcgctatgacgcagaaacagggcgaatctacgttgtggaccccttctccgaatgctgcatggatatcagcctgagcccttcgcggtgtagcgaaccccctcccgtcgccaggctcttacaggaggaggagcaggaaaggcgcaggcctcaaagtagatcacagagcttcttcgcagcagcgcgagccgctgtttcggctttcccaaccgactccttggaacgcgatcttagtccctcctctgcaccagcagtggcaagcgctgccgagccaaccctcgccctgagccaggtggtggcagccgcatctgctttagctgccgctccagggataggggcagccgcagccgcagcaggattcgactctgccagcgctcgctggtttcagcccgtggcgaacgctgcagacgccgaagctgttaggggcgcacaggatgtcgcgggtgggtccaaccccggagcccacaatccgagcgcgaatcttgcccgaggagacaaccaagcaggaggtgctgcggctgctgctgccgctccggagcctcctccgaggtctaggagagtccctagacctcctgagagggaagactcggacaacgatgatgacacccacgtcaggatggattttgctcgtagggataatcagttcgatagccctaagcggggacgttag

SEQ ID NO: 139461 - protein, 1691 aa, Artificial Sequence
  derived and/or modified sequence
MSGEVRLRQLEQFILDGPAQTNGQCFSVETLLDILICLYDECNNSPLRREKNILEYLEWAKPFTSKVKQMRLHREDFEILKVIGRGAFGEVAVVKLKNADKVFAMKILNKWEMLKRAETACFREERDVLVNGDNKWITTLHYAFQDDNNLYLVMDYYVGGDLLTLLSKFEDRLPEDMARFYLAEMVIAIDSVHQLHYVHRDIKPDNILMDMNGHIRLADFGSCLKLMEDGTVQSSVAVGTPDYISPEILQAMEDGKGRYGPECDWWSLGVCMYEMLYGETPFYAESLVETYGKIMNHKERFQFPAQVTDVSENAKDLIRRLICSREHRLGQNGIEDFKKHPFFSGIDWDNIRNCEAPYIPEVSSPTDTSNFDVDDDCLKNSETMPPPTHTAFSGHHLPFVGFTYTSSCVLSDRSCLRVTAGPTSLDLDVNVQRTLDNNLATEAYERRIKRLEQEKLELSRKLQESTQTVQALQYSTVDGPLTASKDLEIKNLKEEIEKLRKQVTESSHLEQQLEEANAVRQELDDAFRQIKAYEKQIKTLQQEREDLNKELVQASERLKNQSKELKDAHCQRKLAMQEFMEINERLTELHTQKQKLARHVRDKEEEVDLVMQKVESLRQELRRTERAKKELEVHTEALAAEASKDRKLREQSEHYSKQLENELEGLKQKQISYSPGVCSIEHQQEITKLKTDLEKKSIFYEEELSKREGIHANEIKNLKKELHDSEGQQLALNKEIMILKDKLEKTRRESQSEREEFESEFKQQYEREKVLLTEENKKLTSELDKLTTLYENLSIHNQQLEEEVKDLADKKESVAHWEAQITEIIQWVSDEKDARGYLQALASKMTEELEALRNSSLGTRATDMPWKMRRFAKLDMSARLELQSALDAEIRAKQAIQEELNKVKASNIITECKLKDSEKKNLELLSEIEQLIKDTEELRSEKGIEHQDSQHSFLAFLNTPTDALDQFERKTHQFFVKSFTTPTKCHQCTSLMVGLIRQGCSCEVCGFSCHITCVNKAPTTCPVPPEQTKGPLGIDPQKGIGTAYEGHVRIPKPAGVKKGWQRALAIVCDFKLFLYDIAEGKASQPSVVISQVIDMRDEEFSVSSVLASDVIHASRKDIPCIFRVTASQLSASNNKCSILMLADTENEKNKWVGVLSELHKILKKNKFRDRSVYVPKEAYDSTLPLIKTTQAAAIIDHERIALGNEEGLFVVHVTKDEIIRVGDNKKIHQIELIPNDQLVAVISGRNRHVRLFPMSALDGRETDFYKLSETKGCQTVTSGKVRHGALTCLCVAMKRQVLCYELFQSKTRHRKFKEIQVPYNVQWMAIFSEQLCVGFQSGFLRYPLNGEGNPYSMLHSNDHTLSFIAHQPMDAICAVEISSKEYLLCFNSIGIYTDCQGRRSRQQELMWPANPSSCCYNAPYLSVYSENAVDIFDVNSMEWIQTLPLKKVRPLNNEGSLNLLGLETIRLIYFKNKMAEGDELVVPETSDNSRKQMVRNINNKRRYSFRVPEEERMQQRREMLRDPEMRNKLISNPTNFNHIAHMGPGDGIQILKDLPMNPRPQESRTVFSGSVSIPSITKSRPEPGRSMSASSGLSARSSAQNGSALKREFSGGSYSAKRQPMPSPSEGSLSSGGMDQGSDAPARDFDGEDSDSPRHSTASNSSNLSSPPSPASPRKTKSLSLESTDRGSWDP

SEQ ID NO: 139462 - protein, 1719 aa, Artificial Sequence
  derived and/or modified sequence
MSGEVRLRQLEQFILDGPAQTNGQCFSVETLLDILICLYDECNNSPLRREKNILEYLEWAKPFTSKVKQMRLHREDFEILKVIGRGAFGEVAVVKLKNADKVFAMKILNKWEMLKRAETACFREERDVLVNGDNKWITTLHYAFQDDNNLYLVMDYYVGGDLLTLLSKFEDRLPEDMARFYLAEMVIAIDSVHQLHYVHRDIKPDNILMDMNGHIRLADFGSCLKLMEDGTVQSSVAVGTPDYISPEILQAMEDGKGRYGPECDWWSLGVCMYEMLYGETPFYAESLVETYGKIMNHKERFQFPAQVTDVSENAKDLIRRLICSREHRLGQNGIEDFKKHPFFSGIDWDNIRNCEAPYIPEVSSPTDTSNFDVDDDCLKNSETMPPPTHTAFSGHHLPFVGFTYTSSCVLSDRSCLRVTAGPTSLDLDVNVQRTLDNNLATEAYERRIKRLEQEKLELSRKLQESTQTVQALQYSTVDGPLTASKDLEIKNLKEEIEKLRKQVTESSHLEQQLEEANAVRQELDDAFRQIKAYEKQIKTLQQEREDLNKELVQASERLKNQSKELKDAHCQRKLAMQEFMEINERLTELHTQKQKLARHVRDKEEEVDLVMQKVESLRQELRRTERAKKELEVHTEALAAEASKDRKLREQSEHYSKQLENELEGLKQKQISYSPGVCSIEHQQEITKLKTDLEKKSIFYEEELSKREGIHANEIKNLKKELHDSEGQQLALNKEIMILKDKLEKTRRESQSEREEFESEFKQQYEREKVLLTEENKKLTSELDKLTTLYENLSIHNQQLEEEVKDLADKKESVAHWEAQITEIIQWVSDEKDARGYLQALASKMTEELEALRNSSLGTRATDMPWKMRRFAKLDMSARLELQSALDAEIRAKQAIQEELNKVKASNIITECKLKDSEKKNLELLSEIEQLIKDTEELRSEKGIEHQDSQHSFLAFLNTPTDALDQFETVDSTPLSVHTPTLRKKGCPGSTGFPPKRKTHQFFVKSFTTPTKCHQCTSLMVGLIRQGCSCEVCGFSCHITCVNKAPTTCPVPPEQTKGPLGIDPQKGIGTAYEGHVRIPKPAGVKKGWQRALAIVCDFKLFLYDIAEGKASQPSVVISQVIDMRDEEFSVSSVLASDVIHASRKDIPCIFRVTASQLSASNNKCSILMLADTENEKNKWVGVLSELHKILKKNKFRDRSVYVPKEAYDSTLPLIKTTQAAAIIDHERIALGNEEGLFVVHVTKDEIIRVGDNKKIHQIELIPNDQLVAVISGRNRHVRLFPMSALDGRETDFYKLSETKGCQTVTSGKVRHGALTCLCVAMKRQVLCYELFQSKTRHRKFKEIQVPYNVQWMAIFSEQLCVGFQSGFLRYPLNGEGNPYSMLHSNDHTLSFIAHQPMDAICAVEISSKEYLLCFNSIGIYTDCQGRRSRQQELMWPANPSSCCYNAPYLSVYSENAVDIFDVNSMEWIQTLPLKKVRPLNNEGSLNLLGLETIRLIYFKNKMAEGDELVVPETSDNSRKQMVRNINNKRRYSFRVPEEERMQQRREMLRDPEMRNKLISNPTNFNHIAHMGPGDGIQILKDLPMNPRPQESRTVFSGSVSIPSITKSRPEPGRSMSASSGLSARSSAQNGSALKREFSGGSYSAKRQPMPSPSEGSLSSGGMDQGSDAPARDFDGEDSDSPRHSTASNSSNLSSPPSPASPRKTKSLSLESTDRGSWDP

SEQ ID NO: 139463 - DNA, 5076 bp, Artificial Sequence
  derived and/or modified sequence
atgtccggagaagttagactgagacagctggagcagttcatcctggacgggccagcacaaacaaatggacagtgcttcagcgtcgagactcttctcgatatcctgatttgtctctacgatgaatgtaataatagcccactaagacgcgaaaagaatatattggaatacctggagtgggcgaagccattcacatccaaagtcaagcaaatgaggctgcaccgggaggatttcgaaatcctgaaggtaatcggacgcggagcgtttggggaggtggcggtggtgaagctgaagaatgctgataaagtgttcgctatgaaaattctgaacaagtgggagatgctcaagagggccgagactgcctgctttagggaagagagggacgtgctggtgaacggagacaacaaatggatcactacgcttcactatgcatttcaggatgacaataacttgtacctggttatggattactacgtaggcggcgatcttctcacactcctgtcaaaatttgaagacagactgcctgaggacatggctcggttctacctggccgaaatggtaatagctattgactctgttcaccagttgcactacgttcacagagacataaaacctgacaacatcctgatggatatgaatggtcacattcgacttgccgacttcggctcctgcctcaagctgatggaggacgggactgtgcagtccagtgtcgcagttggcacgccggattatatctcccctgaaatcctgcaggcgatggaggatggcaagggtagatatgggcctgaatgcgattggtggtcgctgggtgtctgtatgtatgagatgctgtacggggaaacccctttttatgctgagagtctcgtggagacttatggcaagataatgaatcataaggagagattccagtttcccgcccaggtcaccgacgtatccgagaatgccaaggatctgattcggagactcatttgctcaagggaacatcgccttggccagaatggaatagaagatttcaagaaacatccttttttcagcggtatagattgggacaatatcaggaattgcgaagccccttacatccctgaagtctcttcacccacagacacctccaacttcgacgtcgacgacgattgcctgaaaaatagcgagaccatgcccccaccgacacacactgctttttctggtcatcacctaccctttgtgggattcacttatacctcaagctgtgtcctcagcgataggtcctgcttgcgcgtgaccgcaggccccacgagtctggacctcgacgttaacgttcagaggaccttggacaataacttggctacagaggcgtatgaacgccgcatcaagcgcctggagcaggaaaaacttgaactgtcccgcaagctgcaggaatctacacagacggtccaggccctgcagtactcgaccgtggatggccccctgaccgcgtcaaaagatctggaaatcaaaaaccttaaggaggagatagaaaaactgcgtaaacaggtgactgaatctagccatttagagcagcagctggaagaggcgaacgccgtgcgccaggaacttgatgatgcattcaggcagatcaaggcatacgaaaagcagatcaagacgttacagcaggagcgtgaggatttgaataaggaactcgtgcaggcttccgagaggctaaagaaccagtccaaggagttaaaggatgctcattgccaacggaaacttgctatgcaggaatttatggaaattaatgaaagactgaccgagttacacacgcagaagcagaaattggcacggcatgtgcgggataaagaggaggaagtggatctggtgatgcagaaagttgagtcattacgacaagaactcagaagaaccgagagagcaaagaaagagctggaagtacacactgaagctctcgcggccgaagccagtaaagatcggaaactccgcgagcagtcagagcactactccaaacagctggaaaacgagctcgaaggcctaaaacagaaacagatcagctactctcccggcgtgtgcagcatcgaacatcagcaggaaattaccaaacttaagactgacctcgagaagaaaagtatcttttatgaagaagagctaagtaagcgcgaggggattcatgcgaacgaaattaagaatctgaagaaagagttgcatgacagtgagggccagcagctggctctgaacaaggaaatcatgattttgaaggataagttagaaaaaacccgtcgagagtctcagtctgagcgagaggagtttgagtctgaattcaagcagcagtatgaacgagaaaaggtgctactcaccgaggagaacaagaaattaacttctgaattggataagctcacaaccctgtatgaaaacctctccatccacaaccagcagctcgaggaagaggtcaaagacctggccgacaaaaaggagagcgtggcccattgggaggcccagatcacggaaatcatccagtgggtctccgatgagaaggatgcccgtggctacttacaggcattggcgtctaaaatgactgaagaactggaggccctgcggaattcttctctgggcactagagccactgacatgccgtggaaaatgcggcgctttgcgaaactggacatgtccgcacgccttgagctacagtcggctctagatgccgagattcgtgccaagcaggctatccaggaggaactgaataaagtgaaggctagcaatattataaccgagtgcaaactgaaggacagcgaaaaaaaaaatttagagctgctgagcgaaatagagcaacttattaaagataccgaagagctgcgcagcgaaaaaggcatcgaacatcaggatagtcaacactcctttctggcctttctcaacacacccactgatgcactggatcagtttgagcgcaaaacacatcaattttttgtaaagtcttttacaacgcctaccaagtgtcaccagtgcacttcattgatggtgggactaattcgtcagggctgttcgtgtgaggtctgcggtttcagttgccacatcacatgcgtgaataaagcccccaccacgtgcccagttcctccagagcaaactaagggcccactcgggattgatcctcagaaaggtatcggtaccgcctacgagggccatgtcagaatccccaagcctgcgggggtgaaaaaaggttggcaacgggccctggccatcgtatgcgactttaaactgtttctatacgacattgctgaggggaaggcttctcaaccttctgtggtgatatctcaggtgattgacatgcgtgacgaggagttttctgtgtcctcagtcttggcaagtgacgtgatccatgcgagccgtaaggatatcccctgcatttttcgggtcacagcctcccagttgagcgcctccaacaataagtgttccatactgatgttagccgataccgagaatgagaagaacaagtgggtcggcgttttatccgaacttcataagatactgaaaaaaaacaaatttcgtgataggtccgtgtacgttccaaaagaggcttacgactccaccttgccattgatcaagactacccaggccgccgccatcatcgaccacgagcggatcgccctgggcaacgaggaaggcctcttcgtggtgcatgtgacaaaagacgagatcatcagggtgggggacaataagaagattcaccagattgaactgattcccaacgaccagttggttgccgtaattagtggaagaaaccgccacgtccgtctgttcccgatgtcggctcttgacggtagggagacggacttttataaattatccgaaacaaaagggtgtcagactgtgacaagcggcaaagttagacacggagccctgacatgtctgtgtgtcgctatgaaaagacaggtgttgtgttacgaactattccaatcaaagacgcgccaccggaagtttaaggagatccaggttccctacaacgtacagtggatggctattttttccgagcaactgtgtgtcgggttccagtcaggttttttgaggtatccacttaacggcgaagggaacccttattcaatgctgcattcgaacgatcatacgttgtctttcatcgcacaccagcctatggatgctatctgcgctgtggaaattagcagtaaggagtacctcctctgctttaactccattggtatctataccgattgtcaaggcaggcgcagccgccagcaggagttgatgtggcccgcaaatccaagcagctgttgttacaatgcaccttacctcagcgtttacagcgaaaatgctgttgatatatttgacgtgaactcaatggagtggatccagacactacctctcaagaaggtgagaccgcttaataacgagggttccctaaacttgctagggctcgagactattcggctgatatacttcaaaaacaaaatggccgagggtgacgaactagtcgtgcccgagacctccgataattcccgaaagcagatggtccggaatatcaataataaaaggagatactcctttagagtccctgaggaggagcgcatgcagcagagaagggaaatgctgcgcgacccagaaatgcggaacaaactgatttctaatcctacgaacttcaatcacattgcacacatggggcccggggacggcatacagatcttgaaagatctgcctatgaacccgaggcctcaggaaagtaggacagtgttttctggatccgttagcattcccagcattacgaagagcaggcctgagcctggcaggagtatgtcagcttcgtcaggcctgtcagctagaagtagtgctcagaatggcagtgccttgaagcgggaattcagtgggggctcctactcggccaagaggcaacctatgccgtcccccagtgaagggagcttgagttcaggcggcatggatcaaggctcagacgcgcccgccagggacttcgacggcgaggatagtgattctccgcggcacagtacagcgagcaactctagtaacctttcctcccccccctcaccagcaagcccgcggaagactaagtctcttagcctcgagagcacagatcgggggagctgggacccatag

SEQ ID NO: 139464 - DNA, 5160 bp, Artificial Sequence
  derived and/or modified sequence
atgtctggcgaggtgagactacggcagctcgagcagtttattttggatggcccagcccagaccaatggacagtgtttctctgtggagaccttgctggacatcctcatttgcctgtacgacgaatgtaataacagtcccctgcggcgggaaaaaaatatcttggagtatctggagtgggctaagcccttcaccagtaaagtgaagcaaatgcgcctgcatcgagaggacttcgaaatcctcaaggttatcgggagaggagcctttggagaagtcgctgtggtcaagctgaaaaacgcggacaaagtattcgctatgaagatcctaaacaaatgggaaatgctgaagcgagccgagaccgcttgctttagggaggagcgcgatgtgttggtcaacggcgacaacaaatggattacaaccctgcactacgcgtttcaggatgataacaatctgtatcttgtcatggactattacgttgggggagacttactgaccttgctgtcaaaattcgaggacaggctacccgaagatatggcacggttctacctagcggagatggtgattgcaatcgattccgtacatcaactgcattatgtccaccgcgatattaagccagacaatatcctgatggatatgaacggtcatatccgacttgccgattttgggagctgtctaaagctcatggaagacggaactgttcagtccagcgtggccgtgggcacacccgactacatctcccccgagatcctgcaggcgatggaggatggcaaaggtaggtatggaccggaatgtgactggtggagccttggcgtgtgcatgtacgagatgctctatggagagacacccttttatgctgagtcacttgtcgaaacctacggcaagatcatgaatcacaaggagcggttccaattccctgcacaggtaaccgatgtgagcgagaacgcaaaagacctgattcgtcggctgatctgcagccgagagcatcggctaggacagaatggaatcgaggattttaaaaaacaccctttttttagtgggatcgattgggacaatataaggaattgcgaggcgccatatatccccgaggtaagcagccccaccgatacaagcaacttcgacgtcgacgatgattgcctgaagaattcggagaccatgccaccacccacgcacaccgctttcagtggacaccatctcccctttgtcggattcacatatactagtagctgcgtgctttctgatcgatcctgtctgagagtgacagctggcccaacctccctggatctggacgtgaatgtacagcgcacactggataacaatttggcaaccgaggcctacgaacgtagaatcaaaagacttgaacaggaaaaactggaactttccaggaagctgcaggagtcgacacagaccgtacaggctctgcaatacagcacagtggatggccccctgacagctagcaaggacctggaaatcaagaacctaaaagaggaaatagaaaaactgcggaaacaggtcacggaaagtagccacctcgaacaacagctggaagaggccaatgcagtccgtcaggagcttgatgacgccttccggcagataaaggcttatgaaaaacagattaagacactccaacaggaacgcgaggatctgaacaaagaactggtgcaagcatccgagcggctcaaaaaccagtccaaagagctgaaagatgcccattgccagcgtaagctggcgatgcaggagtttatggaaattaacgaaagactgactgagcttcatacccagaagcagaaactggcccgtcatgtccgcgataaggaggaggaagtagacctggtgatgcagaaggttgagagcctacgccaggagctcagaagaacagagagagctaagaaggaactcgaagtgcacaccgaagcactcgccgctgaagctagcaaagataggaaactgagagaacagtccgaacactattccaagcagcttgagaatgagctggaaggtctgaaacagaaacagatttcatacagtcccggtgtgtgtagtattgagcatcagcaggaaatcaccaaattgaagacagatctggagaagaagtctattttctatgaggaggagctctcaaagagggaaggtatacatgcgaacgagattaaaaacctcaaaaaggagctgcatgactccgaaggccagcagttagccttaaataaggaaataatgatactgaaagacaaattagagaaaaccagaagagagtctcaaagcgaacgagaagagtttgagagtgagtttaagcagcagtacgagcgagaaaaggtgctgttgacagaggagaataaaaagctcaccagcgaactcgataaattaaccaccctgtacgagaacttgagcattcacaatcagcagctcgaagaggaagttaaagacttggcagataagaaagagtctgttgcccattgggaggcacagatcacagagattattcaatgggtttccgatgagaaggacgcccgcgggtacctccaggctctggcttccaagatgaccgaggaactcgaagcactgcggaactcctcgctgggaacaagagccacagatatgccttggaaaatgcgccgcttcgccaagctggacatgtccgcaagacttgagctgcagtctgcgctggacgctgaaattcgcgccaagcaggctatacaggaggaactaaacaaggtcaaagcgtcaaacatcatcactgagtgcaagctgaaggacagcgaaaagaagaatctagagctgctctcagagattgaacagttgatcaaagatactgaagaactgaggagtgaaaaaggaatcgagcatcaggattctcagcactctttcctagcctttctaaatacgccaacagacgccttggatcagtttgagaccgtggactccacgcccctgtcggtgcatacgccgaccttgaggaaaaaggggtgtcccggcagtactggtttccctccgaagcggaagacccaccagttcttcgtgaagagctttacaacccccaccaagtgccaccagtgtactagcctgatggtagggctgataagacaagggtgctcttgcgaggtgtgtggctttagttgccacattacatgtgtgaacaaggctcccacaacctgtccagtgccaccagaacaaactaagggaccgttgggtatagaccctcagaagggaataggcactgcatacgagggccacgtccggatacccaaacccgccggcgtaaagaagggctggcagagagcgctggccattgtctgcgatttcaaacttttcctttatgacatcgctgaggggaaggcttcccagcctagcgtagtgatctcccaggtcatagacatgagggacgaagagttctcagtctcttcggttctggcttccgacgtaatccatgcttccagaaaggatataccatgcatatttcgggttactgcctcccagcttagcgcctctaataataagtgttctattctcatgttggcggatactgagaacgaaaaaaacaaatgggtgggagttctttccgagctgcataagattctgaagaaaaacaagtttagggatcggagcgtatatgtgccaaaagaagcatatgattcaacgcttcctctgatcaagactacccaggctgccgctatcattgaccatgagagaattgctctgggtaacgaagaaggtctgtttgtggtgcacgttacaaaggatgaaattatacgggtaggcgacaacaaaaagatccaccagatcgagctgataccgaacgaccagctggtagctgttatatcaggtaggaacagacatgtccgactctttcctatgtcggcgcttgacggtcgggagaccgatttctataagctgagcgagactaaagggtgccagactgtcacctcagggaaggtccggcatggcgctcttacatgcttgtgcgtggccatgaagcggcaggtcctgtgctatgagctttttcagtcaaagacccgccatcgcaagtttaaggagatacaggtcccctacaacgtgcaatggatggccatattcagcgagcagctctgtgttggattccaatccggtttcctaaggtatcccctcaatggagaaggtaacccctactctatgcttcattctaatgatcatacactcagtttcatcgcccaccaacccatggacgcaatttgcgccgtggaaatcagcagcaaggagtacctgctgtgctttaatagcattgggatatatactgattgtcaaggccgtcgtagccgccagcaggagttgatgtggcccgctaaccctagctcttgttgttacaatgccccttatctgagtgtttatagcgaaaacgccgtggacatctttgatgtcaattctatggagtggattcagactttacccctgaagaaagtgcggcccctgaacaatgaaggttccctcaacctcctgggtctcgaaactattagactgatctactttaaaaacaagatggccgagggagacgagctggtggtaccagagacatccgacaacagccgaaaacagatggtacggaacatcaacaacaagagaagatattcatttcgcgtcccggaggaggagcgtatgcagcagaggcgcgaaatgctgcgagatcctgagatgagaaacaaacttatcagtaaccccacgaattttaaccacattgcacacatgggccctggggatggcattcaaatcctgaaggacttgccaatgaacccccgtcctcaggagtcccggacagtgttcagtggctctgtatccatcccaagcatcaccaaaagccgccctgagcccggcagatccatgagtgcaagtagcggcctctcagcaaggtcttctgctcagaacggctctgccttaaagagggaattctcaggaggctcttatagcgccaagcgccagcctatgccttctcccagcgagggaagcctgtctagcgggggcatggatcagggaagcgatgcccccgcacgggatttcgatggggaggactcagatagccctcgccatagtacggcgagcaactcttctaacctttcttctccgccctccccagcttctccccgaaaaactaagagcctgagcctcgaatccacagatcgcggcagctgggatccctag

SEQ ID NO: 139465 - DNA, 1641 bp, Artificial Sequence
  derived and/or modified sequence
taagacattgcagagggtaaggccagtcagccctctgtcgtgatctcccaggtcattgacatgcgcgatgaggagttcagcgtaagttcagtgctggccagtgacgtgatccacgcaagcagaaaggatatcccgtgcatcttccgagtgacggctagccaactgagcgcgagcaacaataagtgtagtattttgatgctggccgacaccgaaaatgaaaagaataaatgggttggcgtgctaagtgagctgcacaagatactgaagaaaaataagttccgcgacaggtcagtgtacgtgcccaaggaagcctatgatagcacacttccgctgatcaaaacaactcaggcagcagcaattattgatcacgagcggatcgctctgggaaatgaggaaggcttattcgtggtccacgtgacaaaggacgagattataagagtgggagacaacaagaagattcaccaaattgagctcatacctaatgaccagctggtagccgtgattagcgggcggaacagacacgttcgactattccccatgtcagccctcgacgggcgtgagactgacttctacaaactcagcgaaaccaaggggtgccagaccgtgacttcggggaaagtgcgccacggagctctgacatgtctgtgtgtagccatgaagcggcaagtcctgtgctacgaattgttccagagtaagaccagacacagaaagtttaaagagatccaggtcccttacaacgtgcagtggatggcaattttcagcgagcagctgtgtgtcggattccagtcaggcttcttgcggtaccctttaaacggcgaggggaacccatactctatgctgcattcgaacgaccacaccctgtccttcatcgcccaccagcccatggacgcgatctgcgcagtagaaatctcaagtaaggagtatttactgtgcttcaatagcattggcatctatactgattgccagggaagacgtagtcgccagcaggaactgatgtggcccgcgaacccaagttcatgctgctacaacgccccttatctatccgtctactctgagaacgcggtcgacatttttgacgttaactccatggagtggatccaaacactgccactgaaaaaagtgagaccgctaaacaatgaaggtagtctcaaccttttaggactggagaccatacgcctgatttactttaagaacaagatggcggagggagatgagctagtggtgcccgaaacaagtgataattctaggaaacagatggtccggaacatcaataacaaaaggcggtactcgtttagggtcccagaagaggagcgtatgcagcagaggagggagatgctacgcgaccctgagatgaggaacaaactcataagtaatccgactaacttcaaccacatcgctcatatgggcccaggcgacggaatacaaattttgaaggacctgccgatgaatcctcgccctcaagaatcccgtactgtgttctctggctccgtttccattccgtcaataaccaagtcccgtcctgagcctggaaggagtatgtcagcttccagtgggttaagtgcatccaaatgcagagggtatcggaaagtgccactgcggcaaggcgaccctcaattgccgcctttactgtcaagaggatag

SEQ ID NO: 139466 - DNA, 5076 bp, Artificial Sequence
  derived and/or modified sequence
atgtctggagaggtgcggctgcggcagctggagcagttcatcctggatggccctgcccagaccaacggccagtgcttctctgtggagaccctgctggacatcctgatctgcctgtatgatgagtgcaacaacagccccctgcggcgggagaagaacatcctggagtacctggagtgggccaagcccttcaccagcaaggtgaagcagatgaggctgcacagagaagattttgagatcctgaaggtgattggccgcggggccttcggggaggtggccgtggtgaagctgaagaatgctgacaaggtgtttgccatgaagatcctgaacaagtgggagatgctgaagagagctgagacagcctgcttccgggaggagagagatgtgctggtgaatggagacaacaagtggatcaccaccctgcactacgccttccaggatgacaacaacctgtacctggtgatggactactacgtgggcggggacctgctgaccctgctgagcaagtttgaggaccggctgcctgaggacatggcccgcttctacctggccgagatggtgattgccattgattctgtgcaccagctgcactacgtgcaccgggacatcaagccagacaacatcctgatggacatgaatggccacatccggctggccgactttggcagctgcctgaagctgatggaggatggcaccgtgcagagctctgtggccgtgggcaccccagactacatcagccctgagatcctgcaggccatggaggatggcaagggccgctatggcccagaatgtgactggtggagcctgggcgtgtgcatgtatgagatgctgtatggagagacccccttctacgccgagagcctggtggagacctacggcaagatcatgaaccacaaggagcgcttccagtttcctgcccaggtgacagatgtgtctgaaaatgccaaggacctgatcagaagactcatctgcagccgggagcaccggctgggccagaatggaattgaggacttcaagaagcaccccttcttcagcggcatcgactgggacaacatccggaactgtgaggccccctacatccctgaggtgagcagccccacagacaccagcaactttgatgtggatgatgactgcctgaagaacagcgagaccatgcccccacccacccacacagccttcagcggccaccacctgccctttgtgggcttcacctacaccagcagctgtgtgctgagtgacaggagctgcctgcgggtgacagctggccccaccagcctggacctggatgtgaatgtgcagaggaccctggacaacaacctggccacagaggcctatgaaagacgcatcaagaggctggagcaggagaagctggagctgagcaggaagctgcaggagagcacccagacagtgcaggccctgcagtacagcacagtggatggccccctgacagccagcaaggacctggagatcaagaacctgaaggaggagattgagaagctgaggaagcaggtgacagagagcagccacctggagcagcagctggaggaggccaatgctgtgcggcaggagctggatgatgccttccggcagatcaaggcctatgagaagcagatcaagaccctgcagcaggagcgggaggacctgaacaaggagctggtgcaggccagcgagcggctgaagaaccagagcaaggagctgaaggatgcccactgccagaggaagctggccatgcaggagttcatggagatcaatgaaaggctgacagagctgcacacccagaagcagaagctggcccggcacgtgcgggacaaggaggaggaggtggacctggtgatgcagaaggtggagagcctgcggcaggagctgcggaggacagagcgggccaagaaggagctggaggtgcacacagaggccctggccgctgaggccagcaaggacaggaagctgcgggagcagagcgagcactacagcaagcagctggagaatgagctggagggcctgaagcagaagcagatctcctacagccctggggtgtgcagcattgagcaccagcaggagatcaccaagctgaagacagacctggagaagaagagcatcttctatgaggaggagctgagcaagcgggagggcatccacgccaatgagatcaagaacctgaagaaggagctgcatgattctgagggccagcagctggccctgaacaaggagatcatgatcctgaaggacaagctggagaagacccggcgggagagccagagcgagcgggaggagtttgaaagtgagttcaagcagcagtatgagcgggagaaggtgctgctgacagaggagaacaagaagctgaccagcgagctggacaagctgaccaccctgtatgagaacctgagcatccacaaccagcagctggaggaggaggtgaaggacctggccgacaagaaggagagcgtggcccactgggaggcccagatcacagagatcatccagtgggtgtctgatgagaaggatgcccggggctacctgcaggccctggccagcaagatgacagaggagctggaggccctgaggaacagcagcctgggcacccgggccacagacatgccctggaagatgagaagatttgccaagctggacatgtctgcccggctggagctgcagagcgccctggatgctgagatccgggccaagcaggccatccaggaggagctgaacaaggtgaaggccagcaacatcatcacagagtgcaagctgaaggacagcgagaagaagaacctggagctgctgtctgaaattgagcagctgatcaaggacacagaggagctgcggtctgagaagggcatcgagcaccaggacagccagcacagcttcctggccttcctgaacacccccacagatgccctggaccagtttgagaggaagacccaccagttctttgtgaagagcttcaccacccccaccaagtgccaccagtgcaccagcctgatggtgggcctcatccggcagggctgcagctgtgaggtgtgtggcttcagctgccacatcacctgtgtgaacaaggcccccaccacctgccctgtgcccccagagcagaccaagggccccctgggcatcgacccccagaagggcatcggcacagcctatgagggccacgtgcgcatccccaagccagctggggtgaagaagggctggcagagggccctggccatcgtgtgtgacttcaagctgttcctgtatgacattgctgagggcaaggccagccagcccagcgtggtgatcagccaggtgattgacatgagagatgaggagttctctgtgtcctctgtgctggccagtgatgtgatccacgccagcaggaaggacatcccctgcatcttccgggtgacagccagccagctgagcgccagcaacaacaagtgcagcatcctgatgctggccgacacagaaaatgagaagaacaagtgggtgggcgtgctgtctgagctgcacaagatcctgaagaagaacaagttccgggacagatctgtgtatgtgcccaaggaggcctatgacagcaccctgcccctcatcaagaccacccaggccgccgccatcatcgaccacgagcgcatcgccctgggcaatgaggagggcctgtttgtggtgcacgtgaccaaggatgagatcatccgggtgggggacaacaagaagatccaccagatcgagctgatccccaatgaccagctggtggccgtcatctctggaagaaacagacatgtgcggctcttccccatgtctgccctggatggccgggagacagacttctacaagctgtctgagaccaagggctgccagacagtgaccagcggcaaggtgagacatggagccctgacctgcctgtgtgtggccatgaagaggcaggtgctgtgctatgagctgttccagagcaagaccaggcacaggaagttcaaggagatccaggtgccctacaacgtgcagtggatggccatcttcagcgagcagctgtgtgtgggcttccagagcggcttcctgcgctaccccctgaatggagagggcaacccctacagcatgctgcacagcaatgaccacaccctgtccttcatcgcccaccagcccatggatgccatctgtgctgtggagatcagcagcaaggagtacctgctgtgcttcaacagcatcggcatctacacagactgccagggccgccgcagccggcagcaggagctgatgtggccagccaaccccagcagctgctgctacaatgccccctacctgtctgtgtacagtgaaaatgctgtggacatctttgatgtgaacagcatggagtggatccagaccctgcccctgaagaaggtgcggcccctgaacaatgaaggcagcctgaacctgctgggcctggagaccatccgcctcatctacttcaagaacaagatggccgagggagatgagctggtggtgcctgagaccagtgacaacagcaggaagcagatggtgaggaacatcaacaacaagaggcgctacagcttccgggtgcctgaggaggagaggatgcagcagaggcgggagatgctgcgggaccctgagatgaggaacaagctgatcagcaaccccaccaacttcaaccacatcgcccacatgggccctggagatggcatccagatcctgaaggacctgcccatgaacccccggccccaggagagcaggacagtgttcagcggctctgtgtccatccccagcatcaccaagagcaggcctgagcccggccgctccatgtctgccagcagcggcctgagcgcccggagcagcgcccagaatggaagtgccctgaagcgggagttcagcggcggcagctacagcgccaagaggcagcccatgcccagccccagcgagggcagcctgagcagcggcggcatggaccagggcagtgatgccccagcccgggactttgatggagaggacagcgacagccccaggcacagcacagccagcaacagcagcaacctgagcagcccccccagccctgccagccccaggaagaccaagagcctgagcctggagagcacagaccggggctcctgggacccctag

SEQ ID NO: 139467 - DNA, 5160 bp, Artificial Sequence
  derived and/or modified sequence
atgtctggagaggtgcggctgcggcagctggagcagttcatcctggatggccctgcccagaccaacggccagtgcttctctgtggagaccctgctggacatcctgatctgcctgtatgatgagtgcaacaacagccccctgcggcgggagaagaacatcctggagtacctggagtgggccaagcccttcaccagcaaggtgaagcagatgaggctgcacagagaagattttgagatcctgaaggtgattggccgcggggccttcggggaggtggccgtggtgaagctgaagaatgctgacaaggtgtttgccatgaagatcctgaacaagtgggagatgctgaagagagctgagacagcctgcttccgggaggagagagatgtgctggtgaatggagacaacaagtggatcaccaccctgcactacgccttccaggatgacaacaacctgtacctggtgatggactactacgtgggcggggacctgctgaccctgctgagcaagtttgaggaccggctgcctgaggacatggcccgcttctacctggccgagatggtgattgccattgattctgtgcaccagctgcactacgtgcaccgggacatcaagccagacaacatcctgatggacatgaatggccacatccggctggccgactttggcagctgcctgaagctgatggaggatggcaccgtgcagagctctgtggccgtgggcaccccagactacatcagccctgagatcctgcaggccatggaggatggcaagggccgctatggcccagaatgtgactggtggagcctgggcgtgtgcatgtatgagatgctgtatggagagacccccttctacgccgagagcctggtggagacctacggcaagatcatgaaccacaaggagcgcttccagtttcctgcccaggtgacagatgtgtctgaaaatgccaaggacctgatcagaagactcatctgcagccgggagcaccggctgggccagaatggaattgaggacttcaagaagcaccccttcttcagcggcatcgactgggacaacatccggaactgtgaggccccctacatccctgaggtgagcagccccacagacaccagcaactttgatgtggatgatgactgcctgaagaacagcgagaccatgcccccacccacccacacagccttcagcggccaccacctgccctttgtgggcttcacctacaccagcagctgtgtgctgagtgacaggagctgcctgcgggtgacagctggccccaccagcctggacctggatgtgaatgtgcagaggaccctggacaacaacctggccacagaggcctatgaaagacgcatcaagaggctggagcaggagaagctggagctgagcaggaagctgcaggagagcacccagacagtgcaggccctgcagtacagcacagtggatggccccctgacagccagcaaggacctggagatcaagaacctgaaggaggagattgagaagctgaggaagcaggtgacagagagcagccacctggagcagcagctggaggaggccaatgctgtgcggcaggagctggatgatgccttccggcagatcaaggcctatgagaagcagatcaagaccctgcagcaggagcgggaggacctgaacaaggagctggtgcaggccagcgagcggctgaagaaccagagcaaggagctgaaggatgcccactgccagaggaagctggccatgcaggagttcatggagatcaatgaaaggctgacagagctgcacacccagaagcagaagctggcccggcacgtgcgggacaaggaggaggaggtggacctggtgatgcagaaggtggagagcctgcggcaggagctgcggaggacagagcgggccaagaaggagctggaggtgcacacagaggccctggccgctgaggccagcaaggacaggaagctgcgggagcagagcgagcactacagcaagcagctggagaatgagctggagggcctgaagcagaagcagatctcctacagccctggggtgtgcagcattgagcaccagcaggagatcaccaagctgaagacagacctggagaagaagagcatcttctatgaggaggagctgagcaagcgggagggcatccacgccaatgagatcaagaacctgaagaaggagctgcatgattctgagggccagcagctggccctgaacaaggagatcatgatcctgaaggacaagctggagaagacccggcgggagagccagagcgagcgggaggagtttgaaagtgagttcaagcagcagtatgagcgggagaaggtgctgctgacagaggagaacaagaagctgaccagcgagctggacaagctgaccaccctgtatgagaacctgagcatccacaaccagcagctggaggaggaggtgaaggacctggccgacaagaaggagagcgtggcccactgggaggcccagatcacagagatcatccagtgggtgtctgatgagaaggatgcccggggctacctgcaggccctggccagcaagatgacagaggagctggaggccctgaggaacagcagcctgggcacccgggccacagacatgccctggaagatgagaagatttgccaagctggacatgtctgcccggctggagctgcagagcgccctggatgctgagatccgggccaagcaggccatccaggaggagctgaacaaggtgaaggccagcaacatcatcacagagtgcaagctgaaggacagcgagaagaagaacctggagctgctgtctgaaattgagcagctgatcaaggacacagaggagctgcggtctgagaagggcatcgagcaccaggacagccagcacagcttcctggccttcctgaacacccccacagatgccctggaccagtttgaaacagtggacagcacccccctgtctgtgcacacccccaccctgaggaagaagggctgccccggcagcacaggcttcccccccaagaggaagacccaccagttctttgtgaagagcttcaccacccccaccaagtgccaccagtgcaccagcctgatggtgggcctcatccggcagggctgcagctgtgaggtgtgtggcttcagctgccacatcacctgtgtgaacaaggcccccaccacctgccctgtgcccccagagcagaccaagggccccctgggcatcgacccccagaagggcatcggcacagcctatgagggccacgtgcgcatccccaagccagctggggtgaagaagggctggcagagggccctggccatcgtgtgtgacttcaagctgttcctgtatgacattgctgagggcaaggccagccagcccagcgtggtgatcagccaggtgattgacatgagagatgaggagttctctgtgtcctctgtgctggccagtgatgtgatccacgccagcaggaaggacatcccctgcatcttccgggtgacagccagccagctgagcgccagcaacaacaagtgcagcatcctgatgctggccgacacagaaaatgagaagaacaagtgggtgggcgtgctgtctgagctgcacaagatcctgaagaagaacaagttccgggacagatctgtgtatgtgcccaaggaggcctatgacagcaccctgcccctcatcaagaccacccaggccgccgccatcatcgaccacgagcgcatcgccctgggcaatgaggagggcctgtttgtggtgcacgtgaccaaggatgagatcatccgggtgggggacaacaagaagatccaccagatcgagctgatccccaatgaccagctggtggccgtcatctctggaagaaacagacatgtgcggctcttccccatgtctgccctggatggccgggagacagacttctacaagctgtctgagaccaagggctgccagacagtgaccagcggcaaggtgagacatggagccctgacctgcctgtgtgtggccatgaagaggcaggtgctgtgctatgagctgttccagagcaagaccaggcacaggaagttcaaggagatccaggtgccctacaacgtgcagtggatggccatcttcagcgagcagctgtgtgtgggcttccagagcggcttcctgcgctaccccctgaatggagagggcaacccctacagcatgctgcacagcaatgaccacaccctgtccttcatcgcccaccagcccatggatgccatctgtgctgtggagatcagcagcaaggagtacctgctgtgcttcaacagcatcggcatctacacagactgccagggccgccgcagccggcagcaggagctgatgtggccagccaaccccagcagctgctgctacaatgccccctacctgtctgtgtacagtgaaaatgctgtggacatctttgatgtgaacagcatggagtggatccagaccctgcccctgaagaaggtgcggcccctgaacaatgaaggcagcctgaacctgctgggcctggagaccatccgcctcatctacttcaagaacaagatggccgagggagatgagctggtggtgcctgagaccagtgacaacagcaggaagcagatggtgaggaacatcaacaacaagaggcgctacagcttccgggtgcctgaggaggagaggatgcagcagaggcgggagatgctgcgggaccctgagatgaggaacaagctgatcagcaaccccaccaacttcaaccacatcgcccacatgggccctggagatggcatccagatcctgaaggacctgcccatgaacccccggccccaggagagcaggacagtgttcagcggctctgtgtccatccccagcatcaccaagagcaggcctgagcccggccgctccatgtctgccagcagcggcctgagcgcccggagcagcgcccagaatggaagtgccctgaagcgggagttcagcggcggcagctacagcgccaagaggcagcccatgcccagccccagcgagggcagcctgagcagcggcggcatggaccagggcagtgatgccccagcccgggactttgatggagaggacagcgacagccccaggcacagcacagccagcaacagcagcaacctgagcagcccccccagccctgccagccccaggaagaccaagagcctgagcctggagagcacagaccggggctcctgggacccctag

SEQ ID NO: 139468 - DNA, 1641 bp, Artificial Sequence
  derived and/or modified sequence
tgagatattgctgagggcaaggccagccagcccagcgtggtgatcagccaggtgattgacatgagagatgaggagttctctgtgtcctctgtgctggccagtgatgtgatccacgccagcaggaaggacatcccctgcatcttccgggtgacagccagccagctgagcgccagcaacaacaagtgcagcatcctgatgctggccgacacagaaaatgagaagaacaagtgggtgggcgtgctgtctgagctgcacaagatcctgaagaagaacaagttccgggacagatctgtgtatgtgcccaaggaggcctatgacagcaccctgcccctcatcaagaccacccaggccgccgccatcatcgaccacgagcgcatcgccctgggcaatgaggagggcctgtttgtggtgcacgtgaccaaggatgagatcatccgggtgggggacaacaagaagatccaccagatcgagctgatccccaatgaccagctggtggccgtcatctctggaagaaacagacatgtgcggctcttccccatgtctgccctggatggccgggagacagacttctacaagctgtctgagaccaagggctgccagacagtgaccagcggcaaggtgagacatggagccctgacctgcctgtgtgtggccatgaagaggcaggtgctgtgctatgagctgttccagagcaagaccaggcacaggaagttcaaggagatccaggtgccctacaacgtgcagtggatggccatcttcagcgagcagctgtgtgtgggcttccagagcggcttcctgcgctaccccctgaatggagagggcaacccctacagcatgctgcacagcaatgaccacaccctgtccttcatcgcccaccagcccatggatgccatctgtgctgtggagatcagcagcaaggagtacctgctgtgcttcaacagcatcggcatctacacagactgccagggccgccgcagccggcagcaggagctgatgtggccagccaaccccagcagctgctgctacaatgccccctacctgtctgtgtacagtgaaaatgctgtggacatctttgatgtgaacagcatggagtggatccagaccctgcccctgaagaaggtgcggcccctgaacaatgaaggcagcctgaacctgctgggcctggagaccatccgcctcatctacttcaagaacaagatggccgagggagatgagctggtggtgcctgagaccagtgacaacagcaggaagcagatggtgaggaacatcaacaacaagaggcgctacagcttccgggtgcctgaggaggagaggatgcagcagaggcgggagatgctgcgggaccctgagatgaggaacaagctgatcagcaaccccaccaacttcaaccacatcgcccacatgggccctggagatggcatccagatcctgaaggacctgcccatgaacccccggccccaggagagcaggacagtgttcagcggctctgtgtccatccccagcatcaccaagagcaggcctgagcccggccgctccatgtctgccagcagcggcctgagcgccagcaaatgtcggggctacaggaaggtgcccctgcggcagggcgacccccagctgccccccctgctgagccggggctag

SEQ ID NO: 139469 - DNA, 5076 bp, Artificial Sequence
  derived and/or modified sequence
atgagcggcgaggtgcggctgcggcagctggagcagttcatcctggacggacccgctcagactaatggacaatgtttttccgtggagacacttctggacatcctgatatgtttgtatgatgaatgtaataattcacccctgcgccgggagaaaaacatcttagagtatttagaatgggcgaagcccttcacctcaaaggtgaaacaaatgcgactgcacagagaggattttgaaattctcaaggtcataggacgtggcgcttttggcgaggttgccgtggtgaagttgaaaaatgccgacaaggtctttgccatgaaaatccttaacaagtgggaaatgcttaaacgtgcggaaaccgcctgttttcgagaagaaagggatgtccttgtcaatggggataataagtggatcacgacactgcactacgcctttcaagacgacaataatttgtacctcgtgatggattactatgtgggcggcgacttgctgacactcttgtcgaagtttgaagatagactgcccgaggatatggctaggttctacctggctgagatggtgatagccattgattctgtccaccagctgcattatgttcaccgcgatataaagccggacaatatactcatggatatgaatgggcacatccggttggctgattttgggagttgccttaagctgatggaagacggtaccgttcagagcagcgtggcagtgggaacacctgattacataagtcccgaaattctccaggccatggaagatggcaagggccgatatggccctgagtgcgactggtggtccttaggagtatgtatgtacgagatgctgtacggggaaacccctttctacgccgaaagtttggtggagacgtacgggaaaatcatgaaccataaagagcgatttcagttcccagcacaggttacggacgtttctgagaacgcaaaggatctgattcgtcgcttgatctgctctcgcgagcacagactcggtcagaatggaatcgaggatttcaaaaagcatcccttcttctccggcattgactgggataacattagaaactgtgaggccccatacattcctgaggtgtcctcgcccacagatacaagtaactttgacgtggatgatgattgcttgaagaactcagaaactatgcctcctcccacccacacggctttctccggtcaccacctcccctttgtgggctttacgtacacatcttcctgcgtgctctctgaccggtcttgcctccgagtcacagcgggccccacctcgctggacctggacgtgaacgtgcaaaggacccttgataacaatcttgccacagaagcatatgagagacggattaaaagactagagcaagagaagctggaactcagccggaaactgcaggaaagcacccagactgtccaggcactgcagtattccacagtagatggccccctaacagctagcaaggacctggaaataaaaaacctcaaggaggagatcgagaaattgaggaagcaagtgacggaatcctcccatctcgagcagcagttggaggaagcaaatgccgtgcgtcaggagcttgacgatgcattccgtcaaatcaaggcctatgagaagcagatcaaaactctccagcaggagcgcgaggatctgaataaagagctagttcaagcaagcgaaagactgaagaaccagtcgaaagaacttaaagacgcccattgccagcgcaaattggccatgcaagaatttatggaaattaacgaaagactgactgagctgcacacacagaagcagaagctcgcacgacacgtgcgagataaggaagaggaggtggatctggtgatgcaaaaggtggagagcttgcggcaggaactgcggaggactgagcgagccaaaaaggagttggaggtgcatacagaagcactggctgccgaggcctccaaggaccggaagctcagggaacaatctgagcactacagcaagcagttagagaacgagctagagggtctgaaacagaaacaaataagttatagtccaggggtgtgttcaattgagcaccagcaggagattacaaagttgaaaacggacctggaaaaaaagtccatcttctatgaggaagaactgagcaagcgggagggaatacacgccaacgagatcaagaacctgaaaaaagagctgcatgactccgagggacaacagcttgcactgaataaggaaattatgatcctgaaagacaagctggaaaaaacgagacgagagagtcagagcgagagggaggagttcgagtctgagtttaagcagcagtatgaacgcgaaaaagtgctgttgacggaggagaacaagaagcttacttctgaactggataagctcacgaccctctacgaaaatttatccatccacaatcagcaacttgaggaggaggttaaggacctagccgacaagaaggagtcggttgcccattgggaagcacagattactgagataatccaatgggtgtcagatgaaaaagatgctcgggggtacctccaggctcttgcatcgaagatgactgaagagctggaggccttaaggaatagctctcttgggacacgcgccactgatatgccctggaagatgcgaaggttcgccaaactcgacatgtctgctaggttggaactgcaaagcgccctcgacgccgagatccgcgcgaagcaggctatacaggaagagctgaataaagtgaaagcatctaacatcatcaccgagtgcaagttgaaggactcagagaagaagaatttagagctgctgtctgaaattgagcagctcataaaggacaccgaggaactcagaagtgagaagggaatagaacaccaggattcccagcattctttcttggcttttttgaatactccaaccgacgccttggatcaatttgaacgcaagacccaccagttcttcgttaaatcctttacaactcccacgaagtgccatcaatgtacaagcctgatggtggggctcatcaggcagggatgctcatgtgaagtgtgcggcttcagctgccacataacttgcgtgaacaaagcacctaccacctgcccagttcctcccgagcaaacaaagggacccctaggaatcgacccccagaaaggaatcgggacagcatatgaggggcacgtccggatccccaagcccgccggtgtgaagaaaggctggcaacgtgcgttggccatcgtttgcgacttcaagttatttctgtacgatattgccgagggtaaagcctcacagccaagtgtggtgataagccaagttatagacatgcgcgacgaagaattctccgtctcctcagtgctggccagtgatgtgatccacgccagtcgaaaagatatcccttgcatttttcgagtgactgctagccagctcagcgccagtaacaataagtgtagcattctcatgctggcagataccgagaacgagaagaataaatgggtgggagtcctgagtgaactccataaaatcctgaagaagaacaagttcagagatcggtcagtgtacgtgcccaaagaggcatatgactcgacactgccattgatcaagaccacgcaagccgccgctatcatcgatcatgagcggatcgccctcgggaacgaggaaggcctgttcgtcgtccacgtgactaaggacgaaatcataagggtcggagacaacaagaaaatccaccagatagagcttatcccgaatgatcagctggtcgcggtcatcagtggacgaaaccgccacgttcgcctgtttccaatgtccgccctagacgggcgagaaactgatttttacaaactttcagaaacgaaggggtgtcagaccgtcacctctggaaaagtgagacatggagctctgacttgcctgtgcgttgctatgaagcgtcaggtgctctgttatgagctttttcagagcaagacccggcaccgcaaattcaaagaaatccaagtgccctataacgtgcaatggatggctatttttagcgagcagctctgcgtaggattccaatcaggattcctcaggtatccccttaacggtgaaggcaatccttactccatgctccacagcaatgatcatactctctcttttattgcacaccagcctatggacgcgatctgtgcagtcgaaatttcttctaaggagtacttactgtgctttaacagtattgggatatacactgactgtcagggacgacggtcgcgccagcaggaactgatgtggccagccaatccctcgtcctgctgttacaacgccccctacctgtctgtgtactcagagaacgccgttgacatcttcgacgtcaattccatggaatggattcaaactctgcccctgaagaaggtgcgacccctgaacaacgaggggagtctgaacctgctcggcctcgagactattagactgatctatttcaaaaacaagatggctgagggcgacgagttggttgtgccggagaccagtgacaactctaggaagcagatggtccgtaatattaacaacaaacggcggtattcttttcgcgtccctgaagaggaacgcatgcagcaacggagagaaatgcttcgagatcccgagatgcggaacaaactcatatcaaaccccaccaattttaaccatatcgcccatatgggccccggggatggaatccaaatcctgaaggaccttcccatgaacccacggccacaggagagccgcaccgtgttttcgggttccgtgagcatcccgtccataacaaagagccggcccgagccaggcagatcaatgtctgcttcttcagggttgtctgccaggtcctctgcccagaatggcagcgctctgaaaagagaattctctgggggatcgtattccgccaagcgacaacccatgcccagtcctagcgagggcagcctctcatctggaggtatggatcaagggtcagatgcccctgctagagacttcgatggtgaggactcagactctcccagacactccaccgcatccaacagcagtaatcttagtagcccacctagcccagctagcccgaggaaaaccaaaagtctgagcctggaaagtaccgaccgcggcagttgggacccatag

SEQ ID NO: 139470 - DNA, 5160 bp, Artificial Sequence
  derived and/or modified sequence
atgagcggcgaggtgcggctgcggcagctggagcagttcatcctggacggccccgcacaaactaacgggcaatgtttttctgtcgaaaccttattggacattcttatttgtctctatgatgaatgcaacaatagtcctttgaggcgcgagaagaatattctagaataccttgagtgggctaagcctttcactagtaaggttaagcaaatgaggctccaccgggaagatttcgagattctgaaggtaatcggccggggagccttcggcgaggtggctgtggtgaaactgaagaacgcagacaaagtgttcgccatgaagattctgaacaagtgggaaatgctgaaacgagcagaaacagcctgttttcgggaggaacgggatgtgttggtgaacggtgacaacaagtggatcaccaccttgcactatgccttccaggacgacaataatctttacctggtgatggattactatgttgggggcgatcttctgacactcctgtcgaaattcgaggaccggttacctgaggatatggctagattctacctggccgagatggtgattgccattgattcagttcaccagttgcattacgtacacagggacatcaaacccgacaatattctgatggatatgaacggacacataagactggcggattttggttcttgtctgaaactgatggaggatggcacggtgcagagcagcgtcgccgttgggaccccagattatatttcaccagagatattgcaagccatggaagatggaaaaggcaggtacggtccggagtgcgattggtggagtctcggggtctgtatgtacgagatgctctatggcgaaaccccattttacgctgaaagcctggtcgagacatatggcaaaattatgaaccacaaagaaaggttccagttccccgcgcaggtgactgacgtttccgagaatgctaaggaccttatacggcgactcatctgcagtcgcgagcatcgtctgggccagaatgggatcgaggatttcaagaagcatccatttttcagcggaattgattgggacaatataagaaattgcgaggctccatacatccccgaggtcagttccccaactgacactagtaactttgatgtcgatgacgactgtctcaagaactcagaaaccatgccgcccccgactcacacggcttttagtggtcatcatctgccctttgtgggattcacttatacctccagctgcgtgctctcagatagatcctgcctccgcgtgacggctggccctacgagccttgacctcgatgttaacgtgcagaggaccctcgacaataatcttgcaacagaggcttacgaaaggaggattaagcgcctcgagcaggagaagctggaactgtctagaaagttgcaggagagcacccagactgtgcaggcccttcaatactctaccgtggacggacccctcaccgctagcaaagatctggaaatcaagaacctcaaggaggagatcgaaaaactgcgaaagcaagtgacagaaagcagccacctcgagcagcaactcgaagaggctaatgccgtgagacaagaactcgatgatgcattcaggcaaatcaaggcatatgaaaagcagatcaagactctccagcaagaacgagaggatctgaataaggagcttgtgcaggctagcgagcgattgaaaaaccagtcgaaagaactcaaggatgcccattgccaacgcaagctcgcaatgcaggagttcatggagattaacgagagactgaccgaacttcatacccaaaagcagaaactggcaaggcatgtgcgagataaggaggaagaagtggatcttgtcatgcaaaaagtcgaaagcctgcgccaagagctgcgcaggactgaaagagccaagaaggaacttgaggtacacacagaagctttggccgccgaggccagcaaagataggaagcttcgggagcagagtgaacattattctaagcagttggagaacgagctggagggtctgaaacagaagcagatctcttactcccctggagtgtgttccatcgagcatcagcaggagatcacaaaactgaagacagatttggaaaagaaatccattttctatgaagaggagctgtcaaagagagaagggatacatgccaatgaaatcaagaacttgaaaaaggaattgcatgatagcgagggccagcagctcgcactcaacaaggaaataatgattctgaaagataaacttgagaaaacccggcgtgagtcacaatccgaacgggaagagttcgaatctgaatttaaacaacaatacgaacgagagaaggtgctgttgactgaagaaaataagaaactaacaagtgagctggacaaattgacgacattgtatgagaacctgtctatccacaaccagcaactggaagaggaggtcaaagatctggcagataagaaagagtcagtggcccattgggaagcacagatcaccgaaatcatccagtgggtcagtgacgaaaaagatgctaggggttatcttcaggccctcgcaagcaaaatgactgaggaacttgaggccctgcgcaacagctcactgggcacacgcgctacagatatgccctggaagatgaggcgatttgcgaaattggacatgtctgcccgcctcgaactgcagagcgccctggacgcagagatccgcgccaagcaggccatccaggaggaactaaacaaagtcaaagcctccaacatcattacagagtgcaagctgaaggactccgagaaaaaaaacctggaattgctgtccgaaatcgaacagctaatcaaagataccgaggagctgaggagcgagaaaggaatagagcatcaggatagccagcactcattcttggcctttctaaatacaccgacagatgcccttgaccagtttgaaacggtggacagcaccccactgtctgtgcatacacccaccctaagaaagaagggctgccccggttccactggtttcccccccaaacggaaaactcaccagttctttgtgaagagtttcactacgcctacaaaatgccaccagtgtacatctctcatggtgggcttgattcggcaaggttgctcttgtgaagtgtgtggtttctcttgtcacattacttgcgtcaacaaggcgcctacaacctgtcctgtgcctcccgagcagacaaaaggcccattaggcatcgatccacagaagggcataggcaccgcctacgaaggacacgttcgcattcccaaaccagcgggggtaaagaaggggtggcagagagccctcgccatcgtctgcgacttcaagctcttcctgtatgacattgccgagggaaaggcaagtcagccatccgttgttataagtcaggtgattgatatgagagatgaggagttcagtgtgtccagtgtgctcgcttctgacgtgattcatgccagccggaaagatatcccttgcatcttcagggtgactgccagccaactgtccgcgagcaataataagtgctcaatattaatgctggccgatactgaaaacgaaaaaaacaagtgggtgggcgtcttatccgaactccacaaaatcttaaaaaagaacaaattccgcgatcggtccgtgtacgtacccaaagaggcgtatgactccaccctgccccttatcaagactacccaagctgccgctatcatcgatcacgaaaggatcgcactgggtaacgaagagggcctcttcgtagtgcatgtgacaaaggatgaaataatccgagtcggagacaacaaaaagatacaccaaattgagctcatacctaatgaccagttggtggctgtaattagcggaagaaaccgacatgtacgattgttcccgatgtctgccctggacgggagggagaccgacttctacaagcttagtgaaacgaagggctgtcaaaccgtcactagtggaaaggtcagacatggagctctcacttgcctgtgcgtggcaatgaaacgccaggtgttgtgctacgagttgtttcaatccaagacccggcacaggaaatttaaggaaattcaagtcccttacaacgtgcagtggatggcaattttttccgagcagttatgcgtggggtttcaaagtggcttcctgaggtacccactcaatggggaagggaatccatatagcatgctccatagcaatgatcataccctgtcatttatcgcccaccaacccatggatgcaatatgcgccgtagagatctcatccaaggagtatttattgtgcttcaactctattggaatctacaccgactgtcagggcaggaggtcccgccaacaggagctgatgtggcctgccaaccccagcagctgctgttacaacgcgccatatctatcagtgtatagtgaaaacgcagtagatatcttcgatgttaactcaatggaatggattcagaccctcccattgaaaaaggtcagaccactgaataatgaagggagcctgaatcttctcggtctggagactatacgattgatttatttcaaaaataagatggctgaaggcgatgagttggtggtgcccgagacatcagacaatagccgtaaacaaatggtccggaatataaataacaagagacggtactctttcagagtgcctgaggaggaaagaatgcagcaaagacgagaaatgctacgcgatcccgagatgcgcaataagcttattagcaacccaacaaactttaaccacatcgctcatatgggccctggcgatggtatccaaatcttaaaagacctgcccatgaacccgcgccctcaggagtcgcgcacggtgttttcaggcagcgtgtccattccctcaatcaccaagtccaggcctgagcctggaagatccatgagtgctagctctggactgtctgcccgttcctctgctcagaacggttccgctctcaaaagagagttttctggcggtagctactcagctaagcgtcagcctatgccatctcctagtgaaggcagcctgagctctggcggcatggaccagggctctgatgctccggcgcgagattttgatggcgaggattctgactctccacggcactcgactgcttctaattcttccaacttatcctcgccaccctcacctgcctctccaaggaaaaccaagtccttaagcctcgagtctacggacagagggtcttgggacccttag

SEQ ID NO: 139471 - DNA, 1641 bp, Artificial Sequence
  derived and/or modified sequence
tgagacatcgccgagggcaaggccagccagcccagcgtggtgatctctcaagtaatagatatgagagacgaggagttttcagtaagctcagttctggcttcagacgtgatccatgcctcgcgtaaagatataccttgcatattcagggtgactgcctctcagctgagtgctagtaacaacaaatgttcaatcctgatgttagccgataccgagaatgaaaaaaataagtgggtgggtgtgctctccgagctccataaaatcttgaagaaaaataaatttagagacagaagcgtctatgtccctaaggaagcctacgactctaccctgccattgatcaagacaacccaagcagcggctatcatcgaccatgagagaattgcccttggcaatgaagagggactgttcgtcgtccacgtcactaaggacgaaattattagagtcggggacaataaaaagatccatcagatcgaactaattcccaacgatcaactagtcgcagtcatatcaggccgcaaccgacacgtccggctcttccccatgtctgccctggatgggagagaaacagatttttacaagttgtctgagacaaagggctgtcagacggtgaccagtgggaaagtgcggcatggcgcgttgacatgcctttgcgtagctatgaagagacaggtgctctgttatgaactgttccaatccaaaacccgccatagaaagttcaaggagatccaggttccatataacgtccaatggatggccatattttcggagcagctgtgtgttggcttccaatccggtttcctgcgatatcctttgaatggtgagggcaatccatattctatgctgcattcaaatgaccataccctgagttttattgcgcatcagccgatggatgcaatatgcgccgttgagattagtagcaaagagtacctcctttgctttaattctattggcatctacaccgactgccagggccgccgctctagacagcaagagctcatgtggccagccaacccctctagttgctgctacaacgccccatatcttagtgtgtactccgaaaatgcggtcgatatcttcgacgtaaattccatggagtggatccagacccttccactgaaaaaagtccgaccactcaacaacgagggatctctcaatttactgggactggagacgatccggctgatttactttaaaaacaagatggctgaaggagacgaactggtcgtaccagagacctctgataattcgagaaagcagatggttagaaacatcaataataagcgaaggtacagcttccgcgtgccggaggaggagcgcatgcagcaacgaagggagatgctcagggaccctgaaatgcggaacaagctgatatctaaccctactaatttcaatcacattgcgcatatgggccccggcgacggcatacagattctgaaggacctccctatgaatccccggccccaggaatctagaaccgtgttctccggctctgtcagtattccgtcgatcaccaaatccaggcccgaaccggggcggtccatgtctgcatcctcgggtctgtctgcctcgaaatgccgaggctacaggaaggtcccactgcgccagggggatccccagttgcccccccttttatctagggggtag

SEQ ID NO: 139472 - DNA, 5075 bp, Artificial Sequence
  derived and/or modified sequence
atgagcggtgaggtgagactgaggcagctggagcagttcatcctggatggccctgctcagactaatggccagtgcttttctgtcgagaccctgctcgacattctgatttgtctttatgacgagtgcaataactcgcctcttcggagagagaaaaacatccttgagtatctggagtgggcaaagcccttcacgtctaaggtcaagcagatgagattacatcgggaggacttcgagatcttgaaggtgattggaagaggtgctttcggagaagtcgcggtggtgaaactgaaaaatgctgacaaggtgttcgcgatgaagatactcaataagtgggagatgctgaaacgagcggaaacagcttgcttcagggaggagcgagacgtgctcgtcaatggggataataaatggatcactaccctgcactacgcctttcaagatgacaacaacctttatttggttatggattattatgtgggcggagatctattaacactgctcagtaaatttgaggaccgcttgcctgaagacatggcccgattctacctggccgaaatggtcatcgccattgatagcgtgcaccagctgcattatgtccacagagacatcaagccagataatatccttatggatatgaatggacatattcgcctggcagacttcggctcctgtctgaagctgatggaggatggaacagtgcaatcctcggtggccgtgggaacccccgattatatttctcctgagatcctccaggcaatggaggatggtaagggacggtacggaccagaatgcgattggtggtcacttggggtttgcatgtacgaaatgttgtacggagagaccccattttacgctgagagcctggtggaaacatacggtaaaattatgaaccataaggagcgcttccagtttcctgcccaagtaacagacgtgtccgagaatgctaaggaccttatccgccgattaatttgctctagggaacaccgactgggacagaacggcatcgaggatttcaagaagcatccattctttagtgggatcgactgggacaatatcaggaactgtgaggctccatacatccctgaggtgtcatcacccaccgatacatctaatttcgacgtggacgacgactgtctgaagaacagcgagacaatgcctccacccacccataccgccttctcgggtcatcacctgccattcgtgggctttacatacacgagttcctgtgtcctgagtgataggagctgtttgagggtcaccgctggtcctacaagtttggatctggatgtcaatgttcagcgaaccctcgataacaaccttgccacagaggcatacgagcgacgtatcaaaaggcttgagcaggaaaaattggaattgagtaggaaactgcaggaatctactcagaccgtgcaggccttgcagtattctacagtagacggcccactgacagcctctaaggatctggagataaaaaacctgaaggaggaaatagagaaactcaggaagcaggtgacagagtcaagccacttggagcagcagttggaggaagctaacgctgtgcgccaagaactagacgatgcctttcgtcaaataaaagcatatgaaaaacagatcaagactctgcagcaggagcgggaagatctaaacaaggagctggttcaggctagcgaaagactcaagaatcagtctaaagagttaaaggacgcccactgccaaaggaagttggcgatgcaggaattcatggaaatcaacgagcgtctcacggaactgcacactcagaagcagaagctggcaagacatgtccgagataaggaggaggaggtggaccttgtgatgcagaaggtggagtctttgcgccaggagctccgtagaacagagcgcgcaaaaaaggaactggaagtgcacactgaagctctggccgcagaagcctcgaaggaccgaaagttgcgggaacagtccgagcactactccaagcaattggagaatgagctggagggccttaagcaaaaacagatctcttattcacccggagtttgttcaattgagcatcagcaggaaattacaaagctgaagaccgatctcgagaaaaagtccatcttctatgaggaagagctctctaaaagagaaggaatacacgctaatgagatcaagaacctgaagaaggagctccacgacagcgagggccaacagctggctctgaacaaggaaataatgatcctgaaggataagctggagaagacacgtagagaaagtcagtcagagagggaggagttcgagagcgaatttaagcagcaatacgagagagaaaaagtcctcctgaccgaggagaacaaaaaacttacatccgagttggacaagcttactaccctgtacgagaatctcagcattcataaccagcaacttgaagaggaggtcaaggatctggccgacaaaaaggagtccgtcgcccactgggaagcccagatcaccgaaatcatccagtgggtctctgacgaaaaagacgcaagaggctaccttcaagcactggcttctaagatgacagaggaactggaagccctgcgcaattcatcattagggacgcgagccaccgatatgccgtggaagatgcgaaggttcgctaaacttgacatgtctgccagactcgagcttcagagcgccctggatgccgagattcgggctaaacaggcaatccaagaggagctcaataaggtaaaggctagcaatatcatcacagagtgtaagctcaaagacagcgagaaaaagaacctggagttgttgtctgagatcgaacaacttatcaaggacactgaggagttacgtagtgaaaaaggtattgagcatcaggattctcagcattcatttttagcgttccttaacacccccacagacgccctggatcagttcgaacgaaaaacccaccagttctttgtcaagagtttcaccacacctacaaaatgtcaccagtgcaccagcctgatggtagggctcatcaggcaggggtgcagctgcgaggtgtgtggattttcctgtcacataacctgtgttaacaaggcaccaacgacttgtcccgtcccccctgaacagaccaaggggcctcttgggatcgacccgcagaaaggaatcggcacagcatatgagggccacgtgcggatccctaaacctgccggtgttaaaaaggggtggcagagagccttagctatcgtgtgcgactttaaattgttcctgtatgatatcgcggaagggaaagccagccaacctagcgtggtgatttcgcaggtgattgatatgagggacgaggaattttcagtgtcaagtgtgctggcttctgatgttatccacgccagccgcaaggatattccatgtatctttcgcgtcaccgcaagccagctgtcagcaagcaataacaaatgttctatcctgatgctggctgacacagagaacgagaaaaacaaatgggtgggcgtcttatccgagctgcataaaatactgaaaaaaaataaattccgggaccggagcgtgtatgtgcccaaggaggcctacgatagtactctgccactgatcaaaacgacacaggcggctgcaatcattgaccacgagcggatagcactggggaatgaagaagggctctttgtggtgcacgttactaaggacgagatcatccgagtgggtgataataagaagattcaccagatcgagttgattcccaacgatcagttagtggcagtaatttctgggcgtaacaggcatgtgcggttgttcccaatgtcagcgcttgatgggagagagaccgacttctataagttaagtgaaactaagggctgccagaccgtgacctccggtaaggtgcgccacggcgctctcacatgtctgtgtgttgccatgaagaggcaggtgctttgctacgaactgtttcagagtaaaactcgccataggaagttcaaggaaatccaggtgccatacaatgtgcagtggatggccatcttttccgagcaactctgcgtagggttccagtcaggcttcctccgctatccactgaacggagagggaaatccatactctatgttgcatagcaatgaccacacactaagctttattgctcaccagcctatggacgccatctgcgctgtcgagatctcttccaaagaatacttattgtgtttcaactccattggcatttataccgattgtcaaggtcggcgttcccggcagcaagaattgatgtggccggcaaatcctagtagttgctgctacaacgctccctatttatccgtgtacagtgaaaacgccgtagacatctttgatgtgaactccatggagtggatacagaccctgccactgaagaaagtgaggccactgaataatgaaggaagtctgaatctgctgggcctggagacaataaggctgatttacttcaagaataagatggccgaaggagatgagcttgtggtgcctgagacaagcgacaatagccggaaacagatggtgcggaacatcaataataagcgacggtatagtttcagggtcccggaagaggagagaatgcagcagaggcgcgaaatgctgagggaccccgagatgagaaataagctgatctcaaatccaaccaactttaatcacatcgcccatatgggccctggggacgggatccaaatactgaaggatcttcctatgaatcctcggccacaggagagccggacagtcttctcaggatcggtaagcatacctagcataacaaagagccgtcccgagccgggacggtcaatgtcggctagtagtggcttaagtgccaggtctagcgcgcagaatggcagcgcgctcaaaagggaattctcgggaggcagctactccgctaaacgccagccaatgccctccccatcggagggctcgcttagcagcggcggaatggaccaaggaagcgacgctccagcgagggacttcgatggagaagacagtgattctccccgacattcgacagctagcaatagctctaatctgtcttcacctccttctcccgcttcaccccgaaagaccaagtctttatccttagagtctaccgacagggggtcctgggatccata

SEQ ID NO: 139473 - DNA, 5160 bp, Artificial Sequence
  derived and/or modified sequence
atgtcaggtgaagtgcggttacggcaattggaacagtttattctggacgggcctgcccaaactaatggacagtgcttttcggtggagaccctccttgatattcttatttgcctttacgatgagtgtaataattccccactgcgcagagaaaaaaacatcctggagtatctcgaatgggctaagccattcacgtccaaagtcaaacaaatgcggttgcatagagaagattttgagattttgaaggttattggcaggggggcttttggagaggtcgcagtggttaagcttaagaatgccgataaggtgttcgcgatgaaaattttaaacaagtgggagatgctcaagcgggcagaaacagcttgtttccgcgaggaaagggacgtcctcgtcaacggtgacaacaagtggattactacattacactatgctttccaagacgacaataacttgtacctggtcatggattactatgtcggcggtgatttactgacacttctcagtaagtttgaagataggcttcccgaagatatggccagattttaccttgctgagatggttattgccatcgacagcgtgcatcaactgcactacgtccatagggatatcaagccagacaatatcctaatggatatgaatgggcatatccgactagctgatttcggctcttgtttaaagttgatggaggacggaaccgtgcaaagtagtgtggccgtgggaaccccagactacatctctcctgagattctccaggccatggaggatggcaaaggccgttatggtcctgagtgcgactggtggtccctgggcgtgtgcatgtacgagatgctgtatggggaaaccccgttttacgctgagtcgctggttgagacttacggcaagatcatgaaccataaagagaggttccaatttccagcacaagtgactgacgtgagcgagaatgccaaggatctgattagacgactaatttgctcccgggagcacaggctcggccaaaacggcattgaggactttaagaagcacccattttttagcggcatcgactgggataatatccgcaattgcgaagctccgtatattccagaggtaagcagtcccactgatacaagtaacttcgatgttgatgacgactgtctgaagaacagcgaaaccatgccccctcctacacatactgccttctccggacatcacctcccattcgttggattcacatataccagttcatgcgtgctgtccgaccgttcatgcctgagagtcaccgccggacccacctctttggacttggatgtgaatgttcagcggacgctggacaataatctggccaccgaagcctacgagcggaggatcaaacggctggaacaggaaaagttggagttgagtcgtaaacttcaggaatctacacaaacagtgcaggccctgcagtacagcaccgtcgacggcccactcaccgcctcaaaggatctggagattaagaacctgaaggaagagattgagaagcttaggaaacaggtgactgagtccagccaccttgaacaacaactcgaagaggcaaacgctgtgcgacaagaattggacgatgcttttcgacagataaaggcgtatgagaagcagattaagacgctccagcaagaaagggaggatctcaacaaagagctggttcaagcaagcgagaggctcaagaatcagtccaaagagcttaaggacgctcactgccagcgaaagctggccatgcaagaattcatggagataaatgagcggttaacagagttgcacacacagaagcagaaactggccaggcatgtccgagataaagaggaggaagtggaccttgtgatgcagaaggtggagagtctccggcaggaacttcgacgcaccgagagagccaagaaagaacttgaagtccatacagaagccttggccgctgaggcaagcaaggatagaaagctccgtgagcagtccgaacactatagcaagcaactcgagaatgagctcgagggactaaagcaaaaacagatcagctactcccccggtgtctgcagtatcgagcatcagcaggagattaccaagctgaaaacagacttggaaaagaagtcaattttttacgaagaagagctttcaaaaagagaggggatccacgccaatgaaataaagaacctgaagaaagaactgcacgacagtgagggacagcagctggcattaaataaagagattatgattctgaaagacaaactggaaaagacgcgtcgagaatctcaatcagaaagagaagaattcgaatccgaattcaagcaacaatacgagcgggagaaagtcttgctgacagaggagaataaaaagctcacaagtgaactagacaagcttactactctctatgagaatctgtctatccacaatcagcagttagaggaagaggtgaaggacctggccgacaaaaaagagtcggttgcacactgggaggcacagattacagaaataattcaatgggtaagtgatgaaaaggacgcacgtggctacttgcaggctctcgcttccaagatgacggaggagctggaagccttgcgcaattctagcttaggaacccgcgctacagatatgccatggaagatgcggagattcgcgaagttggatatgagtgccagattagagttacaaagcgctctggatgcagaaatccgcgcaaaacaagctattcaagaggagctcaataaggtcaaggcatctaatatcatcacggagtgcaagctaaaagattcagagaaaaagaatctagaattgcttagcgagatcgaacagttgataaaggacactgaggagctgaggtctgaaaaaggaattgagcaccaggatagtcaacattcttttttggcttttctcaatactcctactgacgctcttgaccagtttgagaccgttgactctacgcctctgagcgttcatacgccaaccttgcggaagaaggggtgccctggctccaccgggtttccaccaaaaaggaagacccaccagttcttcgttaagtcatttaccactcccactaagtgccatcagtgcacatctctgatggttgggctgattagacagggttgctcttgcgaagtctgtggtttctcatgtcatatcacatgtgtgaacaaagcacctaccacttgtcccgtgccccctgaacagaccaagggcccactggggatcgaccctcagaaggggatcggaacagcttatgagggccatgtcagaatacccaagccagcaggtgttaaaaagggctggcaaagagcacttgcaatcgtttgtgatttcaagctattcctgtatgatatcgccgagggcaaagcaagccaaccgtcagtagtcatctctcaagtaatcgatatgcgtgacgaagaattttccgtttcttcagtcctggctagcgacgtaatccatgctagtagaaaggacattccctgcatttttcgcgtgacagctagtcaactatctgcaagcaacaacaagtgctcgattcttatgctcgccgacactgaaaatgagaaaaacaaatgggttggcgtcctgtctgaattacataagattctgaaaaaaaataaattccgggatcgctctgtttacgtacctaaggaagcatacgacagtactctgcccttgatcaagacaactcaagctgccgcaataatagaccatgagcgtattgccctgggaaacgaagaaggcctgttcgtcgtccatgtgaccaaagacgaaataattcgcgtgggggacaacaagaaaatacatcaaatcgaactcattcccaacgatcagctcgtggcagtgataagcggcagaaacagacatgtccggttattcccgatgagcgccctggacggtcgtgagacagatttctataagttgtccgaaacaaaaggatgccagactgtgacaagtggcaaagtgagacacggggctctgacttgcctctgcgtagccatgaaacggcaggtgctctgttacgaactgttccagtccaagacccgacaccgaaaatttaaagaaattcaggtcccctacaatgtccaatggatggccatctttagcgaacaactgtgcgtgggcttccagagcgggttcttgagatacccactgaatggtgaaggcaatccttactcgatgcttcactctaacgatcacacactgtcgttcatcgcccatcaacccatggatgctatctgcgctgtcgaaattagctctaaggagtaccttctgtgcttcaatagtatcggcatctacacagattgtcagggaagacggtctaggcaacaggaactcatgtggccagcaaatccatccagctgctgttataacgccccatacctcagcgtgtattccgagaacgcggttgacatctttgatgtgaattcaatggagtggattcaaactttgcccttaaaaaaggtgcggccattgaataatgagggttcgctgaacttgctggggttggaaactattcggctcatttatttcaagaataagatggccgagggcgacgagctggtagtgcctgaaacttccgacaactctcgcaagcagatggtgagaaacatcaacaacaagagacgctattcatttcgggtgccagaagaagaaagaatgcagcagaggagggaaatgttacgagaccccgagatgagaaacaaattaatttctaatcccacaaacttcaaccacattgcgcacatgggacccggtgacggcatccagatcctgaaggacctgccgatgaaccccagaccacaagagtcccggacggtgttcagcggctcagtctcaattcccagcatcacaaagagtaggccggagcctggcagaagcatgagtgcctcatcagggctgagcgccaggagtagtgcccaaaatggatctgcactgaagcgggaattctcagggggatcatacagtgccaaacgccagcccatgccctctccatctgaaggatcactctcctcgggcggaatggatcaggggtccgacgctcctgccagagacttcgatggagaagactcagattcacccagacatagtactgcttcaaatagttccaatctgtcatctccacctagccccgcaagtccacgaaagactaaatccttgagcctggagagtactgatcgagggagctgggacccgtac

SEQ ID NO: 139474 - DNA, 1641 bp, Artificial Sequence
  derived and/or modified sequence
tgagacattgcagaaggaaaagcctcacagccttcagtcgtgatcagccaggtgattgatatgcgtgacgaggaatttagtgtgtcctctgtcttggcttcagacgtgatccacgctagcagaaaagacattccgtgtatattcagggttacagcctcacaattatcagcatccaataacaaatgctcaattctgatgctggctgacacggagaatgaaaaaaacaaatgggtgggggtcctttctgaacttcataagattctaaaaaagaacaaatttagggacaggtctgtgtacgtgccgaaggaggcttatgactccacactgccactgattaaaactacacaagcagctgccataattgatcacgaaaggatcgccctcggtaatgaggaaggcctgtttgtcgtacacgttaccaaggacgaaattatccgcgttggcgataataaaaaaattcaccagattgagctcattccaaacgaccagcttgtggccgtgatctctggaaggaacagacatgtaagactgttccctatgtctgcccttgatggacgcgaaacggacttctacaagctttcagagaccaaaggatgccagacagttacttcaggtaaggttcggcatggggcattgacatgtctatgcgtcgctatgaaaagacaagtgctgtgctatgaactgtttcagtccaaaacgcgacacaggaagttcaaggagatccaggtgccatacaacgtgcagtggatggcgatattcagtgagcaattgtgcgtcggatttcaatcaggatttctgcgttatcccctcaacggcgaaggcaatccgtattcaatgcttcactcaaatgaccacactttgtcatttattgctcaccagcccatggatgccatttgtgccgtggaaatctcttctaaagaatacctgttatgcttcaatagtatcggcatctatacagactgtcaaggcaggcgaagccgccagcaggagctgatgtggccggctaaccccagctcgtgctgctacaatgccccatacttgagcgtgtactcggagaacgccgttgacatcttcgatgttaattccatggagtggatccagacccttcctctgaagaaggtccggcctcttaataatgaggggtccctgaatctgctgggcctcgaaacgatacgcctgatctatttcaagaacaaaatggccgagggcgacgaactggtcgtaccagagacctctgacaattccagaaaacagatggtgcggaacataaataacaaacggaggtatagcttccgtgtgcccgaagaggaacgcatgcaacagcggagggagatgctgagagacccagaaatgaggaacaagctcatcagtaacccaacaaactttaatcacatcgcacacatgggccctggagacggcattcagatactgaaggatttgcccatgaatcctagaccccaggaatcgcggacagtgttctcaggaagcgtgtccatcccaagtatcaccaaatctagacccgaacccggaagatctatgtccgcttcttctggtctctccgccagcaagtgtagaggctaccgcaaagtccccctaaggcaaggggatcctcagctcccccctcttctgagtagaggctag

SEQ ID NO: 139475 - DNA, 10421 bp, Artificial Sequence
  derived and/or modified sequence
gcggcccggtgcgggtgtcggggagaccgggctctctgcccggcgcggcgcggcgcggctcggcccacgagcgaccaccgacatggagtgggctcgggcggccaagtagccgcttctccggagcccggtgccagtgccgcccgcagcccgccttccacccccggccgcgccgccggtcaggccctagggtgaagccgggaggaaaatgaagagttttcaccggaatccgttgaaaataggactgactgcaaagccttaaagaaagaaggacctcgggaggagaaacgaaaagccgcctccgggcaagacttggcgtgctccgagccgaggggctgcttcagggacctcgccccctccctttcccgctggagaaattgccgctgatgcattatccaagtggtggttgggaggatttgcagcaacatttttggttttccctcccccttctatgcattctgtttttttcctcccttttctgtttttcttcttcccgggaagtgaattgctgatgcaaatcggactttattcattaatgatgcaaccggattcgtttcaggattacgttgcacgagttgaattttgaatgaaggagaagagtttttttttttttttttaaagaagtgttgactctctagttcgttgtacttttaattattattttatttaaatatacgacttaattgtattcttttaaaaatgcattaagtatatattttatggtaatttaccctcaaaatatatgtatatgggtgaaattgaagacgcttcagttaagtgaggttactggtgtgttggatgtttaattcagcaccagcattgcatgacagttgtttgaataacaagtggtttatttttaaaaccataccttttaaaatttaggttcagataatagtaaaagtcatcataataatttaaaggaaaaccagcagaaatcgaagcaaacatgtctggagaagtgcgtttgaggcagttggagcagtttattttggacgggcccgctcagaccaatgggcagtgcttcagtgtggagacattactggatatactcatctgcctttatgatgaatgcaataattctccattgagaagagagaagaacattctcgaatacctagaatgggctaaaccatttacttctaaagtgaaacaaatgcgattacatagagaagactttgaaatattaaaggtgattggtcgaggagcttttggggaggttgctgtagtaaaactaaaaaatgcagataaagtgtttgccatgaaaatattgaataaatgggaaatgctgaaaagagctgagacagcatgttttcgtgaagaaagggatgtattagtgaatggagacaataaatggattacaaccttgcactatgctttccaggatgacaataacttatacctggttatggattattatgttggtggggatttgcttactctactcagcaaatttgaagatagattgcctgaagatatggctagattttacttggctgagatggtgatagcaattgactcagttcatcagctacattatgtacacagagacattaaacctgacaatatactgatggatatgaatggacatattcggttagcagattttggttcttgtctgaagctgatggaagatggaacggttcagtcctcagtggctgtaggaactccagattatatctctcctgaaatccttcaagccatggaagatggaaaagggagatatggacctgaatgtgactggtggtctttgggggtctgtatgtatgaaatgctttacggagaaacaccattttatgcagaatcgctggtggagacatacggaaaaatcatgaaccacaaagagaggtttcagtttccagcccaagtgactgatgtgtctgaaaatgctaaggatcttattcgaaggctcatttgtagcagagaacatcgacttggtcaaaatggaatagaagactttaagaaacacccatttttcagtggaattgattgggataatattcggaactgtgaagcaccttatattccagaagttagtagcccaacagatacatcgaattttgatgtagatgatgattgtttaaaaaattctgaaacgatgcccccaccaacacatactgcattttctggccaccatctgccatttgttggttttacatatactagtagctgtgtactttctgatcggagctgtttaagagttacggctggtcccacctcactggatcttgatgttaatgttcagaggactctagacaacaacttagcaactgaagcttatgaaagaagaattaagcgccttgagcaagaaaaacttgaactcagtagaaaacttcaagagtcaacacagactgtccaagctctgcagtattcaactgttgatggtccactaacagcaagcaaagatttagaaataaaaaacttaaaagaagaaattgaaaaactaagaaaacaagtaacagaatcaagtcatttggaacagcaacttgaagaagctaatgctgtgaggcaagaactagatgatgcttttagacaaatcaaggcttatgaaaaacaaatcaaaacgttacaacaagaaagagaagatctaaataaggaactagtccaggctagtgagcgattaaaaaaccaatccaaagagctgaaagacgcacactgtcagaggaaactggccatgcaggaattcatggagatcaatgagcggctaacagaattgcacacccaaaaacagaaacttgctcgccatgtccgagataaggaagaagaggtggacctggtgatgcaaaaagttgaaagcttaaggcaagaactgcgcagaacagaaagagccaaaaaagagctggaagttcatacagaagctctagctgctgaagcatctaaagacaggaagctacgtgaacagagtgagcactattctaagcaactggaaaatgaattggagggactgaagcaaaaacaaattagttactcaccaggagtatgcagcatagaacatcagcaagagataaccaaactaaagactgatttggaaaagaaaagtatcttttatgaagaagaattatctaaaagagaaggaatacatgcaaatgaaataaaaaatcttaagaaagaactgcatgattcagaaggtcagcaacttgctctcaacaaagaaattatgattttaaaagacaaattggaaaaaaccagaagagaaagtcaaagtgaaagggaggaatttgaaagtgagttcaaacaacaatatgaacgagaaaaagtgttgttaactgaagaaaataaaaagctgacgagtgaacttgataagcttactactttgtatgagaacttaagtatacacaaccagcagttagaagaagaggttaaagatctagcagacaagaaagaatcagttgcacattgggaagcccaaatcacagaaataattcagtgggtcagcgatgaaaaggatgcacgagggtatcttcaggccttagcttctaaaatgactgaagaattggaggcattaagaaattccagcttgggtacacgagcaacagatatgccctggaaaatgcgtcgttttgcgaaactggatatgtcagctagactggagttgcagtcggctctggatgcagaaataagagccaaacaggccatccaagaagagttgaataaagttaaagcatctaatatcataacagaatgtaaactaaaagattcagagaagaagaacttggaactactctcagaaatcgaacagctgataaaggacactgaagagcttagatctgaaaagggtatagagcaccaagactcacagcattctttcttggcatttttgaatacgcctaccgatgctctggatcaatttgaacgcaagactcaccagttttttgtaaaatcttttactactcctaccaagtgtcatcagtgtacctccttgatggtgggtttaataagacagggctgttcatgtgaagtgtgtggattctcatgccatataacttgtgtaaacaaagctccaaccacttgtccagttcctcctgaacagacaaaaggtcccctgggtatagatcctcagaaaggaataggaacagcatatgaaggtcatgtcaggattcctaagccagctggagtgaagaaagggtggcagagagcactggctatagtgtgtgacttcaaactctttctgtacgatattgctgaaggaaaagcatctcagcccagtgttgtcattagtcaagtgattgacatgagggatgaagaattttctgtgagttcagtcttggcttctgatgttatccatgcaagtcggaaagatataccctgtatatttagggtcacagcttcccagctctcagcatctaataacaaatgttcaatcctgatgctagcagacactgagaatgagaagaataagtgggtgggagtgctgagtgaattgcacaagattttgaagaaaaacaaattcagagaccgctcagtctatgttcccaaagaggcttatgacagcactctacccctcattaaaacaacccaggcagccgcaatcatagatcatgaaagaattgctttgggaaacgaagaagggttatttgttgtacatgtcaccaaagatgaaattattagagttggtgacaataagaagattcatcagattgaactcattccaaatgatcagcttgttgctgtgatctcaggacgaaatcgtcatgtacgactttttcctatgtcagcattggatgggcgagagaccgatttttacaagctgtcagaaactaaagggtgtcaaaccgtaacttctggaaaggtgcgccatggagctctcacatgcctgtgtgtggctatgaaaaggcaggtcctctgttatgaactatttcagagcaagacccgtcacagaaaatttaaagaaattcaagtcccatataatgtccagtggatggcaatcttcagtgaacaactctgtgtgggattccagtcaggatttctaagataccccttgaatggagaaggaaatccatacagtatgctccattcaaatgaccatacactatcatttattgcacatcaaccaatggatgctatctgcgcagttgagatctccagtaaagaatatctgctgtgttttaacagcattgggatatacactgactgccagggccgaagatctagacaacaggaattgatgtggccagcaaatccttcctcttgttgttacaatgcaccatatctctcggtgtacagtgaaaatgcagttgatatctttgatgtgaactccatggaatggattcagactcttcctctcaaaaaggttcgacccttaaacaatgaaggatcattaaatcttttagggttggagaccattagattaatatatttcaaaaataagatggcagaaggggacgaactggtagtacctgaaacatcagataatagtcggaaacaaatggttagaaacattaacaataagcggcgttattccttcagagtcccagaagaggaaaggatgcagcagaggagggaaatgctacgagatccagaaatgagaaataaattaatttctaatccaactaattttaatcacatagcacacatgggtcctggagatggaatacagatcctgaaagatctgcccatgaaccctcggcctcaggaaagtcggacagtattcagtggctcagtcagtattccatctatcaccaaatcccgccctgagccaggccgctccatgagtgctagcagtggcttgtcagcaaggtcatccgcacagaatggcagcgcattaaagagggaattctctggaggaagctacagtgccaagcggcagcccatgccctccccgtcagagggctctttgtcctctggaggcatggaccaaggaagtgatgccccagcgagggactttgacggagaggactctgactctccgaggcattccacagcttccaacagttccaacctaagcagccccccaagcccagcttcaccccgaaaaaccaagagcctctccctggagagcactgaccgcgggagctgggacccgtgagctgcctcagcactgggacctctcgctctccgctccctgccactcgcctcctctcactttcatctcttccctccacctcgcctgctcggcctgaaagccaccaggggctggcagcagtagcaggacagggattcaggagttctgacgacacgactctcagatccacgcccccagcctaacagcaacaacaaagacagactttccgtagcagcttagattaacgttgatttcattccatgcacttagagttgctttcagtaacattttacccctactcccaaaggtagcttaaatagacagattacacaaatgtaagtgataagaataagattagacagattttgctttcacagtagagtctcattatagtcctaaaatagctcatgggcttctccgcatccagaagggagaattggtccctggagtggctcactaagctcttaatcagcaaacgcagtgagtatcaacctgattgttgccaggaaatccttatgaattaaaacaatgcatattttactacagtacagagtttaaatgaatacataaatgtagaagtactgaatgtatatatttaaaaggagcctcttgtattcaacaaaagatggatgcatatataagagagatgatttaatttaaagaaatatgttgtttcttgtctgtaatgtaatgtaaagggtggaaaggcctcaagctcacatttgtagagagagagcgagagaaatcagagttccctttattgccctgtcctcaaactggtcataggctctagtcacctggggagctgtagaaaacacttgcagagccaggttttgctggtttggggcatgccctgggcaccagagctttaacatttgaagccacttcagcagcagcagcaaaaggcgaactcatctctacccaagatgtttcttttcctagtggtggaatttgaacacttctcactttttattgtattttatcttccgcagataaatgtagaaatacacgattctgtcacctctgatcccttccatctgaaaggttacaaggagtgttgtagcttctgaaggtgcagaaaacaatttctaaaaatgcttttattcctgggctaatcctgtccctccctaagtcacagcgaggtgtctgtcccagggctggagatgcttcccaaggaggagtctgttttgttgagagtgggcgtgggcttcttcacataagcctggggaaggaagaaaaaacggctttcattaccaaataatgtaaaacctcaaaagcaagggcttcaacagccttaaccaaatattattccccatagccagtggaaaatggatgtgacaaccccagtgcgcaggccagagtgagtgagcccagcacggcgctccgactggcttcctctctcaggtgctggattgtggggttagtggcatttccagctggattcctcctgttgtagttgccataaggaaatgagatgcagaatcagaaggatctatttctacagaatcatttcaccagttaagcacatgagtagagaaagagataaaaataaaagtatctcatgaaggaaagagattttgcctctcttttacttttcacctaagtttctctgagaaatagagacaggattctctctttaaaattcagtgaaaatgaagaaagttttcctgcagttgctaacctgagttgcagtgtttaaggccatcatttcactgctgctgtctgtgactccacgtctgtgtcactgaggtgacctgcgtgtcactgaggtggccaccatgctggcctgcggcatgtgcagggagctgaggctgtttccaggtgatgctgctgtgtggagaaggttctgagatgcagtgagggaagaaaggatcctgctggggattccattgtaagcacctataatcgggaattttcatgtaacagctttgacatttaaacattctgagtttggtgccagctcagatttgattatattttattttggatgggtgtaattcacagcacagttctaatctcccaaatctttctgctttttagaatgaagtataaaaatacttttctcacctgaataccaagggttggccctttagttggatcattgtcatatgacttggtagatccttgtcctcagcacctcacgtgagagaagggagtcagccagccggccccctgcttggtgctcgtgaccagctcgcaccccttctgtccacccttctctcctctcctccccactctccccaccctcctcactctccccaccctcctcactctccccaccctcccctcctctcctcctcactcttcccaccctccccatccccaccctccccatcctcctcttccctttccccttgccttctcctctctcccttctcttctcaggcagggaggaggccatcccaagccgagattaacaggacttgacataagccattagtttgtagctttgacaagtaattatgaatttttgttgcttataggtgcttattttgcaaaggatgcttttaagatcaaaataataaccctacctaaagtctagctccactgctatgggtcatactcttcagcctcccaacagggcagagagagagagctactgaggcttgtctaggttgccaggctaactgggcgacttgtccatattcaccccatggattgcaccatggcactctttgatttttccactgcaatggcaagtaatctcatcagtcataatagagcagtcccgaatgcgtgcagattctaaaagcagggctttaggagagaaacactgccagggggaatagttttggggagggttttcccaaaataacggtcatcctactgggtttatcccacccttaaatatgaagcctgttacctccagaagcttctgagaagaatgatgtgaaaagacagggagtgggttctaggcaaagaaaacataatgaccattcagaggagtcagtagcacagctcacagataaagtattttattactatctgaagttttcttttgttttcatgcaggacattttaaaaacgtatatggcagcagaaacctgtttctcaatagaaaaaatacattcagaggcatttctgggatagtctatctgtgttagtatttggtgctatctatgtccagccaagttatctaccctcaaattctgactaatcatgtttgtgctttgggtatttaaaattacatacatatatattctttttgccaaaaacaaaagtcttgcttcttgtcaaatgattgctaaagtagatcttacattttttgttattatgtatgtatttatacacatccccaacacacttagtgatttctgttatttcctagggagcacagctttaaggctatgagatacaactaaaaggagcccatctatttggttttccagccaattattgtactcacatttcaggggagaatctgaaattcctgtcatgtttacagcaacaatctatcattcctggctagctctcagcctctctctccttccataggttagaattatgtcattttgttacttagtggccacgtctatttctgagaaagactggttacatttatgtggcatctcaggtatcattaaggaaaagccagagcaggggtgagcagaggtcaaaaccacagacgcagcagggccatttgccgcctttggccgggatcacaaccactgcagtctcccagcaggtaggccttgccaagcctaaggctccccatccaatctagacagaggggcgctcagagcagactttgccgtagcccatgtctggtgagcacaacagggaatgaattgggcactccactcccccgtctctctggcccagccctgaactagatgagctgcatttcatggagcccattttaaaatctctttccttatgactttgttactcaagtccagagttctctgtgcacttctgctagataaggagtgtaagccctgccccccagcactggcagcacgctgggccctccccacacaggacaccgtgcagttccgggggaagctgactcaaatcaaccttgaaatctcatgaaaacaaaatgacttgtctttttatttgatagtgtaatatcattcattttataaattttttagggtttttctcgtaatattgtacagttttgcatggcctggtgtgatcattttttggttagaatataatgctgacaaatgtggatggaggggaagatactgctttagcctatcactccttattttattttgtttggttttatgccctcagtgtcttagggaactttttaagagatcctctgctaccaaacaatgatgtggattcttttgcacagaaatatttaaggtgggatggtaaaaaatgtcacaaaagactcctcaccaatactttatgttgatatcacttaatattaaccagactttgctgtattgcaataaaacagagaactgtt

SEQ ID NO: 139476 - DNA, 10855 bp, Artificial Sequence
  derived and/or modified sequence
tccgcaagcctccgcctctgtgcggcgggactggaggagcctcgctgagcccagggcgcgagcgcgagaggagagggaaggcgggggagggctggaagggagaggaagggagtggttgggagccgggctgccgcagcctctagtctcctcagccgcggaagcgacccctcctcctgcgccgggccgcctccctcctcgctgtggaaagatgcccttagcccaggggtgtgaagaagggggagaagtagctgccagagccgcccgcgccgccgccgcagctgctgctgcttgtgtcctttgaattcagagaagcacccccccgcctggggcgtcgggagcctccggcgcggcggcccggtgcgggtgtcggggagaccgggctctctgcccggcgcggcgcggcgcggctcggcccacgagcgaccaccgacatggagtgggctcgggcggccaagtagccgcttctccggagcccggtgccagtgccgcccgcagcccgccttccacccccggccgcgccgccggtcaggccctagggtgaagccgggaggaaaatgaagagttttcaccggaatccgttgaaaataggactgactgcaaagccttaaagaaagaaggacctcgggaggagaaacgaaaagccgcctccgggcaagacttggcgtgctccgagccgaggggctgcttcagggacctcgccccctccctttcccgctggagaaattgccgctgatgcattatccaagtggtggttgggaggatttgcagcaacatttttggttttccctcccccttctatgcattctgtttttttcctcccttttctgtttttcttcttcccgggaagtgaattgctgatgcaaatcggactttattcattaatgatgcaaccggattcgtttcaggattacgttgcacgagttgaattttgaatgaaggagaagagtttttttttttttttttaaagaagtgttgactctctagttcgttgtacttttaattattattttatttaaatatacgacttaattgtattcttttaaaaatgcattaagtatatattttatggtaatttaccctcaaaatatatgtatatgggtgaaattgaagacgcttcagttaagtgaggttactggtgtgttggatgtttaattcagcaccagcattgcatgacagttgtttgaataacaagtggtttatttttaaaaccataccttttaaaatttaggttcagataatagtaaaagtcatcataataatttaaaggaaaaccagcagaaatcgaagcaaacatgtctggagaagtgcgtttgaggcagttggagcagtttattttggacgggcccgctcagaccaatgggcagtgcttcagtgtggagacattactggatatactcatctgcctttatgatgaatgcaataattctccattgagaagagagaagaacattctcgaatacctagaatgggctaaaccatttacttctaaagtgaaacaaatgcgattacatagagaagactttgaaatattaaaggtgattggtcgaggagcttttggggaggttgctgtagtaaaactaaaaaatgcagataaagtgtttgccatgaaaatattgaataaatgggaaatgctgaaaagagctgagacagcatgttttcgtgaagaaagggatgtattagtgaatggagacaataaatggattacaaccttgcactatgctttccaggatgacaataacttatacctggttatggattattatgttggtggggatttgcttactctactcagcaaatttgaagatagattgcctgaagatatggctagattttacttggctgagatggtgatagcaattgactcagttcatcagctacattatgtacacagagacattaaacctgacaatatactgatggatatgaatggacatattcggttagcagattttggttcttgtctgaagctgatggaagatggaacggttcagtcctcagtggctgtaggaactccagattatatctctcctgaaatccttcaagccatggaagatggaaaagggagatatggacctgaatgtgactggtggtctttgggggtctgtatgtatgaaatgctttacggagaaacaccattttatgcagaatcgctggtggagacatacggaaaaatcatgaaccacaaagagaggtttcagtttccagcccaagtgactgatgtgtctgaaaatgctaaggatcttattcgaaggctcatttgtagcagagaacatcgacttggtcaaaatggaatagaagactttaagaaacacccatttttcagtggaattgattgggataatattcggaactgtgaagcaccttatattccagaagttagtagcccaacagatacatcgaattttgatgtagatgatgattgtttaaaaaattctgaaacgatgcccccaccaacacatactgcattttctggccaccatctgccatttgttggttttacatatactagtagctgtgtactttctgatcggagctgtttaagagttacggctggtcccacctcactggatcttgatgttaatgttcagaggactctagacaacaacttagcaactgaagcttatgaaagaagaattaagcgccttgagcaagaaaaacttgaactcagtagaaaacttcaagagtcaacacagactgtccaagctctgcagtattcaactgttgatggtccactaacagcaagcaaagatttagaaataaaaaacttaaaagaagaaattgaaaaactaagaaaacaagtaacagaatcaagtcatttggaacagcaacttgaagaagctaatgctgtgaggcaagaactagatgatgcttttagacaaatcaaggcttatgaaaaacaaatcaaaacgttacaacaagaaagagaagatctaaataaggaactagtccaggctagtgagcgattaaaaaaccaatccaaagagctgaaagacgcacactgtcagaggaaactggccatgcaggaattcatggagatcaatgagcggctaacagaattgcacacccaaaaacagaaacttgctcgccatgtccgagataaggaagaagaggtggacctggtgatgcaaaaagttgaaagcttaaggcaagaactgcgcagaacagaaagagccaaaaaagagctggaagttcatacagaagctctagctgctgaagcatctaaagacaggaagctacgtgaacagagtgagcactattctaagcaactggaaaatgaattggagggactgaagcaaaaacaaattagttactcaccaggagtatgcagcatagaacatcagcaagagataaccaaactaaagactgatttggaaaagaaaagtatcttttatgaagaagaattatctaaaagagaaggaatacatgcaaatgaaataaaaaatcttaagaaagaactgcatgattcagaaggtcagcaacttgctctcaacaaagaaattatgattttaaaagacaaattggaaaaaaccagaagagaaagtcaaagtgaaagggaggaatttgaaagtgagttcaaacaacaatatgaacgagaaaaagtgttgttaactgaagaaaataaaaagctgacgagtgaacttgataagcttactactttgtatgagaacttaagtatacacaaccagcagttagaagaagaggttaaagatctagcagacaagaaagaatcagttgcacattgggaagcccaaatcacagaaataattcagtgggtcagcgatgaaaaggatgcacgagggtatcttcaggccttagcttctaaaatgactgaagaattggaggcattaagaaattccagcttgggtacacgagcaacagatatgccctggaaaatgcgtcgttttgcgaaactggatatgtcagctagactggagttgcagtcggctctggatgcagaaataagagccaaacaggccatccaagaagagttgaataaagttaaagcatctaatatcataacagaatgtaaactaaaagattcagagaagaagaacttggaactactctcagaaatcgaacagctgataaaggacactgaagagcttagatctgaaaagggtatagagcaccaagactcacagcattctttcttggcatttttgaatacgcctaccgatgctctggatcaatttgaaactgtagactccactccactttcagttcacacaccaaccttaaggaaaaaaggatgtcctggttcaactggctttccacctaagcgcaagactcaccagttttttgtaaaatcttttactactcctaccaagtgtcatcagtgtacctccttgatggtgggtttaataagacagggctgttcatgtgaagtgtgtggattctcatgccatataacttgtgtaaacaaagctccaaccacttgtccagttcctcctgaacagacaaaaggtcccctgggtatagatcctcagaaaggaataggaacagcatatgaaggtcatgtcaggattcctaagccagctggagtgaagaaagggtggcagagagcactggctatagtgtgtgacttcaaactctttctgtacgatattgctgaaggaaaagcatctcagcccagtgttgtcattagtcaagtgattgacatgagggatgaagaattttctgtgagttcagtcttggcttctgatgttatccatgcaagtcggaaagatataccctgtatatttagggtcacagcttcccagctctcagcatctaataacaaatgttcaatcctgatgctagcagacactgagaatgagaagaataagtgggtgggagtgctgagtgaattgcacaagattttgaagaaaaacaaattcagagaccgctcagtctatgttcccaaagaggcttatgacagcactctacccctcattaaaacaacccaggcagccgcaatcatagatcatgaaagaattgctttgggaaacgaagaagggttatttgttgtacatgtcaccaaagatgaaattattagagttggtgacaataagaagattcatcagattgaactcattccaaatgatcagcttgttgctgtgatctcaggacgaaatcgtcatgtacgactttttcctatgtcagcattggatgggcgagagaccgatttttacaagctgtcagaaactaaagggtgtcaaaccgtaacttctggaaaggtgcgccatggagctctcacatgcctgtgtgtggctatgaaaaggcaggtcctctgttatgaactatttcagagcaagacccgtcacagaaaatttaaagaaattcaagtcccatataatgtccagtggatggcaatcttcagtgaacaactctgtgtgggattccagtcaggatttctaagataccccttgaatggagaaggaaatccatacagtatgctccattcaaatgaccatacactatcatttattgcacatcaaccaatggatgctatctgcgcagttgagatctccagtaaagaatatctgctgtgttttaacagcattgggatatacactgactgccagggccgaagatctagacaacaggaattgatgtggccagcaaatccttcctcttgttgttacaatgcaccatatctctcggtgtacagtgaaaatgcagttgatatctttgatgtgaactccatggaatggattcagactcttcctctcaaaaaggttcgacccttaaacaatgaaggatcattaaatcttttagggttggagaccattagattaatatatttcaaaaataagatggcagaaggggacgaactggtagtacctgaaacatcagataatagtcggaaacaaatggttagaaacattaacaataagcggcgttattccttcagagtcccagaagaggaaaggatgcagcagaggagggaaatgctacgagatccagaaatgagaaataaattaatttctaatccaactaattttaatcacatagcacacatgggtcctggagatggaatacagatcctgaaagatctgcccatgaaccctcggcctcaggaaagtcggacagtattcagtggctcagtcagtattccatctatcaccaaatcccgccctgagccaggccgctccatgagtgctagcagtggcttgtcagcaaggtcatccgcacagaatggcagcgcattaaagagggaattctctggaggaagctacagtgccaagcggcagcccatgccctccccgtcagagggctctttgtcctctggaggcatggaccaaggaagtgatgccccagcgagggactttgacggagaggactctgactctccgaggcattccacagcttccaacagttccaacctaagcagccccccaagcccagcttcaccccgaaaaaccaagagcctctccctggagagcactgaccgcgggagctgggacccgtgagctgcctcagcactgggacctctcgctctccgctccctgccactcgcctcctctcactttcatctcttccctccacctcgcctgctcggcctgaaagccaccaggggctggcagcagtagcaggacagggattcaggagttctgacgacacgactctcagatccacgcccccagcctaacagcaacaacaaagacagactttccgtagcagcttagattaacgttgatttcattccatgcacttagagttgctttcagtaacattttacccctactcccaaaggtagcttaaatagacagattacacaaatgtaagtgataagaataagattagacagattttgctttcacagtagagtctcattatagtcctaaaatagctcatgggcttctccgcatccagaagggagaattggtccctggagtggctcactaagctcttaatcagcaaacgcagtgagtatcaacctgattgttgccaggaaatccttatgaattaaaacaatgcatattttactacagtacagagtttaaatgaatacataaatgtagaagtactgaatgtatatatttaaaaggagcctcttgtattcaacaaaagatggatgcatatataagagagatgatttaatttaaagaaatatgttgtttcttgtctgtaatgtaatgtaaagggtggaaaggcctcaagctcacatttgtagagagagagcgagagaaatcagagttccctttattgccctgtcctcaaactggtcataggctctagtcacctggggagctgtagaaaacacttgcagagccaggttttgctggtttggggcatgccctgggcaccagagctttaacatttgaagccacttcagcagcagcagcaaaaggcgaactcatctctacccaagatgtttcttttcctagtggtggaatttgaacacttctcactttttattgtattttatcttccgcagataaatgtagaaatacacgattctgtcacctctgatcccttccatctgaaaggttacaaggagtgttgtagcttctgaaggtgcagaaaacaatttctaaaaatgcttttattcctgggctaatcctgtccctccctaagtcacagcgaggtgtctgtcccagggctggagatgcttcccaaggaggagtctgttttgttgagagtgggcgtgggcttcttcacataagcctggggaaggaagaaaaaacggctttcattaccaaataatgtaaaacctcaaaagcaagggcttcaacagccttaaccaaatattattccccatagccagtggaaaatggatgtgacaaccccagtgcgcaggccagagtgagtgagcccagcacggcgctccgactggcttcctctctcaggtgctggattgtggggttagtggcatttccagctggattcctcctgttgtagttgccataaggaaatgagatgcagaatcagaaggatctatttctacagaatcatttcaccagttaagcacatgagtagagaaagagataaaaataaaagtatctcatgaaggaaagagattttgcctctcttttacttttcacctaagtttctctgagaaatagagacaggattctctctttaaaattcagtgaaaatgaagaaagttttcctgcagttgctaacctgagttgcagtgtttaaggccatcatttcactgctgctgtctgtgactccacgtctgtgtcactgaggtgacctgcgtgtcactgaggtggccaccatgctggcctgcggcatgtgcagggagctgaggctgtttccaggtgatgctgctgtgtggagaaggttctgagatgcagtgagggaagaaaggatcctgctggggattccattgtaagcacctataatcgggaattttcatgtaacagctttgacatttaaacattctgagtttggtgccagctcagatttgattatattttattttggatgggtgtaattcacagcacagttctaatctcccaaatctttctgctttttagaatgaagtataaaaatacttttctcacctgaataccaagggttggccctttagttggatcattgtcatatgacttggtagatccttgtcctcagcacctcacgtgagagaagggagtcagccagccggccccctgcttggtgctcgtgaccagctcgcaccccttctgtccacccttctctcctctcctccccactctccccaccctcctcactctccccaccctcctcactctccccaccctcccctcctctcctcctcactcttcccaccctccccatccccaccctccccatcctcctcttccctttccccttgccttctcctctctcccttctcttctcaggcagggaggaggccatcccaagccgagattaacaggacttgacataagccattagtttgtagctttgacaagtaattatgaatttttgttgcttataggtgcttattttgcaaaggatgcttttaagatcaaaataataaccctacctaaagtctagctccactgctatgggtcatactcttcagcctcccaacagggcagagagagagagctactgaggcttgtctaggttgccaggctaactgggcgacttgtccatattcaccccatggattgcaccatggcactctttgatttttccactgcaatggcaagtaatctcatcagtcataatagagcagtcccgaatgcgtgcagattctaaaagcagggctttaggagagaaacactgccagggggaatagttttggggagggttttcccaaaataacggtcatcctactgggtttatcccacccttaaatatgaagcctgttacctccagaagcttctgagaagaatgatgtgaaaagacagggagtgggttctaggcaaagaaaacataatgaccattcagaggagtcagtagcacagctcacagataaagtattttattactatctgaagttttcttttgttttcatgcaggacattttaaaaacgtatatggcagcagaaacctgtttctcaatagaaaaaatacattcagaggcatttctgggatagtctatctgtgttagtatttggtgctatctatgtccagccaagttatctaccctcaaattctgactaatcatgtttgtgctttgggtatttaaaattacatacatatatattctttttgccaaaaacaaaagtcttgcttcttgtcaaatgattgctaaagtagatcttacattttttgttattatgtatgtatttatacacatccccaacacacttagtgatttctgttatttcctagggagcacagctttaaggctatgagatacaactaaaaggagcccatctatttggttttccagccaattattgtactcacatttcaggggagaatctgaaattcctgtcatgtttacagcaacaatctatcattcctggctagctctcagcctctctctccttccataggttagaattatgtcattttgttacttagtggccacgtctatttctgagaaagactggttacatttatgtggcatctcaggtatcattaaggaaaagccagagcaggggtgagcagaggtcaaaaccacagacgcagcagggccatttgccgcctttggccgggatcacaaccactgcagtctcccagcaggtaggccttgccaagcctaaggctccccatccaatctagacagaggggcgctcagagcagactttgccgtagcccatgtctggtgagcacaacagggaatgaattgggcactccactcccccgtctctctggcccagccctgaactagatgagctgcatttcatggagcccattttaaaatctctttccttatgactttgttactcaagtccagagttctctgtgcacttctgctagataaggagtgtaagccctgccccccagcactggcagcacgctgggccctccccacacaggacaccgtgcagttccgggggaagctgactcaaatcaaccttgaaatctcatgaaaacaaaatgacttgtctttttatttgatagtgtaatatcattcattttataaattttttagggtttttctcgtaatattgtacagttttgcatggcctggtgtgatcattttttggttagaatataatgctgacaaatgtggatggaggggaagatactgctttagcctatcactccttattttattttgtttggttttatgccctcagtgtcttagggaactttttaagagatcctctgctaccaaacaatgatgtggattcttttgcacagaaatatttaaggtgggatggtaaaaaatgtcacaaaagactcctcaccaatactttatgttgatatcacttaatattaaccagactttgctgtattgcaataaaacagagaactgtta

SEQ ID NO: 139477 - DNA, 2501 bp, Artificial Sequence
  derived and/or modified sequence
cgatattgctgaaggaaaagcatctcagcccagtgttgtcattagtcaagtgattgacatgagggatgaagaattttctgtgagttcagtcttggcttctgatgttatccatgcaagtcggaaagatataccctgtatatttagggtcacagcttcccagctctcagcatctaataacaaatgttcaatcctgatgctagcagacactgagaatgagaagaataagtgggtgggagtgctgagtgaattgcacaagattttgaagaaaaacaaattcagagaccgctcagtctatgttcccaaagaggcttatgacagcactctacccctcattaaaacaacccaggcagccgcaatcatagatcatgaaagaattgctttgggaaacgaagaagggttatttgttgtacatgtcaccaaagatgaaattattagagttggtgacaataagaagattcatcagattgaactcattccaaatgatcagcttgttgctgtgatctcaggacgaaatcgtcatgtacgactttttcctatgtcagcattggatgggcgagagaccgatttttacaagctgtcagaaactaaagggtgtcaaaccgtaacttctggaaaggtgcgccatggagctctcacatgcctgtgtgtggctatgaaaaggcaggtcctctgttatgaactatttcagagcaagacccgtcacagaaaatttaaagaaattcaagtcccatataatgtccagtggatggcaatcttcagtgaacaactctgtgtgggattccagtcaggatttctaagataccccttgaatggagaaggaaatccatacagtatgctccattcaaatgaccatacactatcatttattgcacatcaaccaatggatgctatctgcgcagttgagatctccagtaaagaatatctgctgtgttttaacagcattgggatatacactgactgccagggccgaagatctagacaacaggaattgatgtggccagcaaatccttcctcttgttgttacaatgcaccatatctctcggtgtacagtgaaaatgcagttgatatctttgatgtgaactccatggaatggattcagactcttcctctcaaaaaggttcgacccttaaacaatgaaggatcattaaatcttttagggttggagaccattagattaatatatttcaaaaataagatggcagaaggggacgaactggtagtacctgaaacatcagataatagtcggaaacaaatggttagaaacattaacaataagcggcgttattccttcagagtcccagaagaggaaaggatgcagcagaggagggaaatgctacgagatccagaaatgagaaataaattaatttctaatccaactaattttaatcacatagcacacatgggtcctggagatggaatacagatcctgaaagatctgcccatgaaccctcggcctcaggaaagtcggacagtattcagtggctcagtcagtattccatctatcaccaaatcccgccctgagccaggccgctccatgagtgctagcagtggcttgtcagcaagtaagtgccggggctacaggaaggtgcctctgagacagggtgacccccagctccctcccctcctgtcccgtgggtgacatgtccttcacttacgtgtgcccattgcattctcaagtggctgcagtgtctcagaccctgctgggtaatgcctaataggcacaaatgcagttgttaagaaaatagtcccagagtccttctagagtgtacaggccatctgggagacagacaaatatgattacaaattgtgatgataaaggctctgaaggaagtaaacagcatacattaatagagaataacaaggggtagctgttagggatgaatccctacttggcagaataattaggaaaatcactccctagaggtggagtcatgtttgagtaatgtttggttaactgaaagaaggctagtatggctacatggtagtggtgaggaagtaacaaaaattagagcggggtagcaggtaagggtcagaccagcagggacttgaagaccaaggtaagacattttttactttattcaaaaggaaaaggaagacttttaagtagggaagaattttctttcaatttacattcttaaaacaatcctgcgggctgccaagtggagaatggactagaggcaggaagagtggaagccagcatccagataggagactcctagagtggtcccaatggaaaccaatgagggcttgggatgcagcaggggcagaaggagagaagatggtagattctccagatatattttcagagttaaaagcagtaagacttgatgatgaattagtcatggaaaagtaagggagagagttaaagatgactcccagacttcctgctagggccttagtatgataccatttactcccatttaccaccgtttaagaaggggctgaggcaggacattccacgcatgtccaaaggtcccgaggtagcaaaaaaaaaaaaaaaa

SEQ ID NO: 139478 - DNA, 5076 bp, Artificial Sequence
  derived and/or modified sequence
atgagcggcgaggtgagactgagacagctggagcagttcatcctggacggccccgcccagaccaacggccagtgcttcagcgtggagaccctgctggacatcctgatctgcctgtacgacgagtgcaacaacagccccctgagaagagagaagaacatcctggagtacctggagtgggccaagcccttcaccagcaaggtgaagcagatgagactgcacagagaggacttcgagatcctgaaggtgatcggcagaggcgccttcggcgaggtggccgtggtgaagctgaagaacgccgacaaggtgttcgccatgaagatcctgaacaagtgggagatgctgaagagagccgagaccgcctgcttcagagaggagagagacgtgctggtgaacggcgacaacaagtggatcaccaccctgcactacgccttccaggacgacaacaacctgtacctggtgatggactactacgtgggcggcgacctgctgaccctgctgagcaagttcgaggacagactgcccgaggacatggccagattctacctggccgagatggtgatcgccatcgacagcgtgcaccagctgcactacgtgcacagagacatcaagcccgacaacatcctgatggacatgaacggccacatcagactggccgacttcggcagctgcctgaagctgatggaggacggcaccgtgcagagcagcgtggccgtgggcacccccgactacatcagccccgagatcctgcaggccatggaggacggcaagggcagatacggccccgagtgcgactggtggagcctgggcgtgtgcatgtacgagatgctgtacggcgagacccccttctacgccgagagcctggtggagacctacggcaagatcatgaaccacaaggagagattccagttccccgcccaggtgaccgacgtgagcgagaacgccaaggacctgatcagaagactgatctgcagcagagagcacagactgggccagaacggcatcgaggacttcaagaagcaccccttcttcagcggcatcgactgggacaacatcagaaactgcgaggccccctacatccccgaggtgagcagccccaccgacaccagcaacttcgacgtggacgacgactgcctgaagaacagcgagaccatgcccccccccacccacaccgccttcagcggccaccacctgcccttcgtgggcttcacctacaccagcagctgcgtgctgagcgacagaagctgcctgagagtgaccgccggccccaccagcctggacctggacgtgaacgtgcagagaaccctggacaacaacctggccaccgaggcctacgagagaagaatcaagagactggagcaggagaagctggagctgagcagaaagctgcaggagagcacccagaccgtgcaggccctgcagtacagcaccgtggacggccccctgaccgccagcaaggacctggagatcaagaacctgaaggaggagatcgagaagctgagaaagcaggtgaccgagagcagccacctggagcagcagctggaggaggccaacgccgtgagacaggagctggacgacgccttcagacagatcaaggcctacgagaagcagatcaagaccctgcagcaggagagagaggacctgaacaaggagctggtgcaggccagcgagagactgaagaaccagagcaaggagctgaaggacgcccactgccagagaaagctggccatgcaggagttcatggagatcaacgagagactgaccgagctgcacacccagaagcagaagctggccagacacgtgagagacaaggaggaggaggtggacctggtgatgcagaaggtggagagcctgagacaggagctgagaagaaccgagagagccaagaaggagctggaggtgcacaccgaggccctggccgccgaggccagcaaggacagaaagctgagagagcagagcgagcactacagcaagcagctggagaacgagctggagggcctgaagcagaagcagatcagctacagccccggcgtgtgcagcatcgagcaccagcaggagatcaccaagctgaagaccgacctggagaagaagagcatcttctacgaggaggagctgagcaagagagagggcatccacgccaacgagatcaagaacctgaagaaggagctgcacgacagcgagggccagcagctggccctgaacaaggagatcatgatcctgaaggacaagctggagaagaccagaagagagagccagagcgagagagaggagttcgagagcgagttcaagcagcagtacgagagagagaaggtgctgctgaccgaggagaacaagaagctgaccagcgagctggacaagctgaccaccctgtacgagaacctgagcatccacaaccagcagctggaggaggaggtgaaggacctggccgacaagaaggagagcgtggcccactgggaggcccagatcaccgagatcatccagtgggtgagcgacgagaaggacgccagaggctacctgcaggccctggccagcaagatgaccgaggagctggaggccctgagaaacagcagcctgggcaccagagccaccgacatgccctggaagatgagaagattcgccaagctggacatgagcgccagactggagctgcagagcgccctggacgccgagatcagagccaagcaggccatccaggaggagctgaacaaggtgaaggccagcaacatcatcaccgagtgcaagctgaaggacagcgagaagaagaacctggagctgctgagcgagatcgagcagctgatcaaggacaccgaggagctgagaagcgagaagggcatcgagcaccaggacagccagcacagcttcctggccttcctgaacacccccaccgacgccctggaccagttcgagagaaagacccaccagttcttcgtgaagagcttcaccacccccaccaagtgccaccagtgcaccagcctgatggtgggcctgatcagacagggctgcagctgcgaggtgtgcggcttcagctgccacatcacctgcgtgaacaaggcccccaccacctgccccgtgccccccgagcagaccaagggccccctgggcatcgacccccagaagggcatcggcaccgcctacgagggccacgtgagaatccccaagcccgccggcgtgaagaagggctggcagagagccctggccatcgtgtgcgacttcaagctgttcctgtacgacatcgccgagggcaaggccagccagcccagcgtggtgatcagccaggtgatcgacatgagagacgaggagttcagcgtgagcagcgtgctggccagcgacgtgatccacgccagcagaaaggacatcccctgcatcttcagagtgaccgccagccagctgagcgccagcaacaacaagtgcagcatcctgatgctggccgacaccgagaacgagaagaacaagtgggtgggcgtgctgagcgagctgcacaagatcctgaagaagaacaagttcagagacagaagcgtgtacgtgcccaaggaggcctacgacagcaccctgcccctgatcaagaccacccaggccgccgccatcatcgaccacgagagaatcgccctgggcaacgaggagggcctgttcgtggtgcacgtgaccaaggacgagatcatcagagtgggcgacaacaagaagatccaccagatcgagctgatccccaacgaccagctggtggccgtgatcagcggcagaaacagacacgtgagactgttccccatgagcgccctggacggcagagagaccgacttctacaagctgagcgagaccaagggctgccagaccgtgaccagcggcaaggtgagacacggcgccctgacctgcctgtgcgtggccatgaagagacaggtgctgtgctacgagctgttccagagcaagaccagacacagaaagttcaaggagatccaggtgccctacaacgtgcagtggatggccatcttcagcgagcagctgtgcgtgggcttccagagcggcttcctgagataccccctgaacggcgagggcaacccctacagcatgctgcacagcaacgaccacaccctgagcttcatcgcccaccagcccatggacgccatctgcgccgtggagatcagcagcaaggagtacctgctgtgcttcaacagcatcggcatctacaccgactgccagggcagaagaagcagacagcaggagctgatgtggcccgccaaccccagcagctgctgctacaacgccccctacctgagcgtgtacagcgagaacgccgtggacatcttcgacgtgaacagcatggagtggatccagaccctgcccctgaagaaggtgagacccctgaacaacgagggcagcctgaacctgctgggcctggagaccatcagactgatctacttcaagaacaagatggccgagggcgacgagctggtggtgcccgagaccagcgacaacagcagaaagcagatggtgagaaacatcaacaacaagagaagatacagcttcagagtgcccgaggaggagagaatgcagcagagaagagagatgctgagagaccccgagatgagaaacaagctgatcagcaaccccaccaacttcaaccacatcgcccacatgggccccggcgacggcatccagatcctgaaggacctgcccatgaaccccagaccccaggagagcagaaccgtgttcagcggcagcgtgagcatccccagcatcaccaagagcagacccgagcccggcagaagcatgagcgccagcagcggcctgagcgccagaagcagcgcccagaacggcagcgccctgaagagagagttcagcggcggcagctacagcgccaagagacagcccatgcccagccccagcgagggcagcctgagcagcggcggcatggaccagggcagcgacgcccccgccagagacttcgacggcgaggacagcgacagccccagacacagcaccgccagcaacagcagcaacctgagcagcccccccagccccgccagccccagaaagaccaagagcctgagcctggagagcaccgacagaggcagctgggacccctag

SEQ ID NO: 139479 - DNA, 5160 bp, Artificial Sequence
  derived and/or modified sequence
atgagcggcgaggtgagactgagacagctggagcagttcatcctggacggccccgcccagaccaacggccagtgcttcagcgtggagaccctgctggacatcctgatctgcctgtacgacgagtgcaacaacagccccctgagaagagagaagaacatcctggagtacctggagtgggccaagcccttcaccagcaaggtgaagcagatgagactgcacagagaggacttcgagatcctgaaggtgatcggcagaggcgccttcggcgaggtggccgtggtgaagctgaagaacgccgacaaggtgttcgccatgaagatcctgaacaagtgggagatgctgaagagagccgagaccgcctgcttcagagaggagagagacgtgctggtgaacggcgacaacaagtggatcaccaccctgcactacgccttccaggacgacaacaacctgtacctggtgatggactactacgtgggcggcgacctgctgaccctgctgagcaagttcgaggacagactgcccgaggacatggccagattctacctggccgagatggtgatcgccatcgacagcgtgcaccagctgcactacgtgcacagagacatcaagcccgacaacatcctgatggacatgaacggccacatcagactggccgacttcggcagctgcctgaagctgatggaggacggcaccgtgcagagcagcgtggccgtgggcacccccgactacatcagccccgagatcctgcaggccatggaggacggcaagggcagatacggccccgagtgcgactggtggagcctgggcgtgtgcatgtacgagatgctgtacggcgagacccccttctacgccgagagcctggtggagacctacggcaagatcatgaaccacaaggagagattccagttccccgcccaggtgaccgacgtgagcgagaacgccaaggacctgatcagaagactgatctgcagcagagagcacagactgggccagaacggcatcgaggacttcaagaagcaccccttcttcagcggcatcgactgggacaacatcagaaactgcgaggccccctacatccccgaggtgagcagccccaccgacaccagcaacttcgacgtggacgacgactgcctgaagaacagcgagaccatgcccccccccacccacaccgccttcagcggccaccacctgcccttcgtgggcttcacctacaccagcagctgcgtgctgagcgacagaagctgcctgagagtgaccgccggccccaccagcctggacctggacgtgaacgtgcagagaaccctggacaacaacctggccaccgaggcctacgagagaagaatcaagagactggagcaggagaagctggagctgagcagaaagctgcaggagagcacccagaccgtgcaggccctgcagtacagcaccgtggacggccccctgaccgccagcaaggacctggagatcaagaacctgaaggaggagatcgagaagctgagaaagcaggtgaccgagagcagccacctggagcagcagctggaggaggccaacgccgtgagacaggagctggacgacgccttcagacagatcaaggcctacgagaagcagatcaagaccctgcagcaggagagagaggacctgaacaaggagctggtgcaggccagcgagagactgaagaaccagagcaaggagctgaaggacgcccactgccagagaaagctggccatgcaggagttcatggagatcaacgagagactgaccgagctgcacacccagaagcagaagctggccagacacgtgagagacaaggaggaggaggtggacctggtgatgcagaaggtggagagcctgagacaggagctgagaagaaccgagagagccaagaaggagctggaggtgcacaccgaggccctggccgccgaggccagcaaggacagaaagctgagagagcagagcgagcactacagcaagcagctggagaacgagctggagggcctgaagcagaagcagatcagctacagccccggcgtgtgcagcatcgagcaccagcaggagatcaccaagctgaagaccgacctggagaagaagagcatcttctacgaggaggagctgagcaagagagagggcatccacgccaacgagatcaagaacctgaagaaggagctgcacgacagcgagggccagcagctggccctgaacaaggagatcatgatcctgaaggacaagctggagaagaccagaagagagagccagagcgagagagaggagttcgagagcgagttcaagcagcagtacgagagagagaaggtgctgctgaccgaggagaacaagaagctgaccagcgagctggacaagctgaccaccctgtacgagaacctgagcatccacaaccagcagctggaggaggaggtgaaggacctggccgacaagaaggagagcgtggcccactgggaggcccagatcaccgagatcatccagtgggtgagcgacgagaaggacgccagaggctacctgcaggccctggccagcaagatgaccgaggagctggaggccctgagaaacagcagcctgggcaccagagccaccgacatgccctggaagatgagaagattcgccaagctggacatgagcgccagactggagctgcagagcgccctggacgccgagatcagagccaagcaggccatccaggaggagctgaacaaggtgaaggccagcaacatcatcaccgagtgcaagctgaaggacagcgagaagaagaacctggagctgctgagcgagatcgagcagctgatcaaggacaccgaggagctgagaagcgagaagggcatcgagcaccaggacagccagcacagcttcctggccttcctgaacacccccaccgacgccctggaccagttcgagaccgtggacagcacccccctgagcgtgcacacccccaccctgagaaagaagggctgccccggcagcaccggcttcccccccaagagaaagacccaccagttcttcgtgaagagcttcaccacccccaccaagtgccaccagtgcaccagcctgatggtgggcctgatcagacagggctgcagctgcgaggtgtgcggcttcagctgccacatcacctgcgtgaacaaggcccccaccacctgccccgtgccccccgagcagaccaagggccccctgggcatcgacccccagaagggcatcggcaccgcctacgagggccacgtgagaatccccaagcccgccggcgtgaagaagggctggcagagagccctggccatcgtgtgcgacttcaagctgttcctgtacgacatcgccgagggcaaggccagccagcccagcgtggtgatcagccaggtgatcgacatgagagacgaggagttcagcgtgagcagcgtgctggccagcgacgtgatccacgccagcagaaaggacatcccctgcatcttcagagtgaccgccagccagctgagcgccagcaacaacaagtgcagcatcctgatgctggccgacaccgagaacgagaagaacaagtgggtgggcgtgctgagcgagctgcacaagatcctgaagaagaacaagttcagagacagaagcgtgtacgtgcccaaggaggcctacgacagcaccctgcccctgatcaagaccacccaggccgccgccatcatcgaccacgagagaatcgccctgggcaacgaggagggcctgttcgtggtgcacgtgaccaaggacgagatcatcagagtgggcgacaacaagaagatccaccagatcgagctgatccccaacgaccagctggtggccgtgatcagcggcagaaacagacacgtgagactgttccccatgagcgccctggacggcagagagaccgacttctacaagctgagcgagaccaagggctgccagaccgtgaccagcggcaaggtgagacacggcgccctgacctgcctgtgcgtggccatgaagagacaggtgctgtgctacgagctgttccagagcaagaccagacacagaaagttcaaggagatccaggtgccctacaacgtgcagtggatggccatcttcagcgagcagctgtgcgtgggcttccagagcggcttcctgagataccccctgaacggcgagggcaacccctacagcatgctgcacagcaacgaccacaccctgagcttcatcgcccaccagcccatggacgccatctgcgccgtggagatcagcagcaaggagtacctgctgtgcttcaacagcatcggcatctacaccgactgccagggcagaagaagcagacagcaggagctgatgtggcccgccaaccccagcagctgctgctacaacgccccctacctgagcgtgtacagcgagaacgccgtggacatcttcgacgtgaacagcatggagtggatccagaccctgcccctgaagaaggtgagacccctgaacaacgagggcagcctgaacctgctgggcctggagaccatcagactgatctacttcaagaacaagatggccgagggcgacgagctggtggtgcccgagaccagcgacaacagcagaaagcagatggtgagaaacatcaacaacaagagaagatacagcttcagagtgcccgaggaggagagaatgcagcagagaagagagatgctgagagaccccgagatgagaaacaagctgatcagcaaccccaccaacttcaaccacatcgcccacatgggccccggcgacggcatccagatcctgaaggacctgcccatgaaccccagaccccaggagagcagaaccgtgttcagcggcagcgtgagcatccccagcatcaccaagagcagacccgagcccggcagaagcatgagcgccagcagcggcctgagcgccagaagcagcgcccagaacggcagcgccctgaagagagagttcagcggcggcagctacagcgccaagagacagcccatgcccagccccagcgagggcagcctgagcagcggcggcatggaccagggcagcgacgcccccgccagagacttcgacggcgaggacagcgacagccccagacacagcaccgccagcaacagcagcaacctgagcagcccccccagccccgccagccccagaaagaccaagagcctgagcctggagagcaccgacagaggcagctgggacccctag

SEQ ID NO: 139480 - DNA, 1641 bp, Artificial Sequence
  derived and/or modified sequence
tgagacatcgccgagggcaaggccagccagcccagcgtggtgatcagccaggtgatcgacatgagagacgaggagttcagcgtgagcagcgtgctggccagcgacgtgatccacgccagcagaaaggacatcccctgcatcttcagagtgaccgccagccagctgagcgccagcaacaacaagtgcagcatcctgatgctggccgacaccgagaacgagaagaacaagtgggtgggcgtgctgagcgagctgcacaagatcctgaagaagaacaagttcagagacagaagcgtgtacgtgcccaaggaggcctacgacagcaccctgcccctgatcaagaccacccaggccgccgccatcatcgaccacgagagaatcgccctgggcaacgaggagggcctgttcgtggtgcacgtgaccaaggacgagatcatcagagtgggcgacaacaagaagatccaccagatcgagctgatccccaacgaccagctggtggccgtgatcagcggcagaaacagacacgtgagactgttccccatgagcgccctggacggcagagagaccgacttctacaagctgagcgagaccaagggctgccagaccgtgaccagcggcaaggtgagacacggcgccctgacctgcctgtgcgtggccatgaagagacaggtgctgtgctacgagctgttccagagcaagaccagacacagaaagttcaaggagatccaggtgccctacaacgtgcagtggatggccatcttcagcgagcagctgtgcgtgggcttccagagcggcttcctgagataccccctgaacggcgagggcaacccctacagcatgctgcacagcaacgaccacaccctgagcttcatcgcccaccagcccatggacgccatctgcgccgtggagatcagcagcaaggagtacctgctgtgcttcaacagcatcggcatctacaccgactgccagggcagaagaagcagacagcaggagctgatgtggcccgccaaccccagcagctgctgctacaacgccccctacctgagcgtgtacagcgagaacgccgtggacatcttcgacgtgaacagcatggagtggatccagaccctgcccctgaagaaggtgagacccctgaacaacgagggcagcctgaacctgctgggcctggagaccatcagactgatctacttcaagaacaagatggccgagggcgacgagctggtggtgcccgagaccagcgacaacagcagaaagcagatggtgagaaacatcaacaacaagagaagatacagcttcagagtgcccgaggaggagagaatgcagcagagaagagagatgctgagagaccccgagatgagaaacaagctgatcagcaaccccaccaacttcaaccacatcgcccacatgggccccggcgacggcatccagatcctgaaggacctgcccatgaaccccagaccccaggagagcagaaccgtgttcagcggcagcgtgagcatccccagcatcaccaagagcagacccgagcccggcagaagcatgagcgccagcagcggcctgagcgccagcaagtgcagaggctacagaaaggtgcccctgagacagggcgacccccagctgccccccctgctgagcagaggctag

SEQ ID NO: 139481 - protein, 337 aa, Artificial Sequence
  derived and/or modified sequence
MNSTCIEEQHDLDHYLFPIVYIFVIIVSIPANIGSLCVSFLQAKKESELGIYLFSLSLSDLLYALTLPLWIDYTWNKDNWTFSPALCKGSAFLMYMNFYSSTAFLTCIAVDRYLAVVYPLKFFFLRTRRFALMVSLSIWILETIFNAVMLWEDETVVEYCDAEKSNFTLCYDKYPLEKWQINLNLFRTCTGYAIPLVTILICNRKVYQAVRHNKATENKEKKRIIKLLVSITVTFVLCFTPFHVMLLIRCILEHAVNFEDHSNSGKRTYTMYRITVALTSLNCVADPILYCFVTETGRYDMWNILKFCTGRCNTSQRQRKRILSVSTKDTMELEVLE

SEQ ID NO: 139482 - DNA, 1786 bp, Artificial Sequence
  derived and/or modified sequence
cctgtcccctcagcagtgttggtttctcttcttgacttgatgcaggcacagatttatcaagctcctcagtcaacaaacacatcaccggaagaaatatggaaggaaaggaattttaaaaggaaataccaatctctgtgcaaacaaagccttgtatattcatgtttgcaccaatctactgtgagatttatgaagaaaaacaaattgcggacaactctctatgtacacttacaaatgcctcagttgatgcttgtgggctgtttgtcagcgttctgtgataatgaacacatggacttctgtttattaaattcagttgacccctttagccaattgccaggagcctggatttttacttccaactgctgatatctgtgtaaaaattgatctacatccaccctttaaaagcattgatgaattaattagaactttagacaacaaagaaaaattgaaaaagaattctcagtaaaagcgaattcgatgttcaaaacaaactacaaagagacaagacttctctgtttactttctaagaactaatataattgctaccttaaaaaggaaaaaatgaacagcacatgtattgaagaacagcatgacctggatcactatttgtttcccattgtttacatctttgtgattatagtcagcattccagccaatattggatctctgtgtgtgtctttcctgcaagcaaagaaggaaagtgaactaggaatttacctcttcagtttgtcactatcagatttactctatgcattaactctccctttatggattgattatacctggaataaagacaactggactttctctcctgccttgtgcaaagggagtgcttttctcatgtacatgaatttttacagcagcacagcattcctcacctgcattgccgttgatcggtatttggctgttgtctaccctttgaagttttttttcctaaggacaagaagatttgcactcatggtcagcctgtccatctggatattggaaaccatcttcaatgctgtcatgttgtgggaagatgaaacagttgttgaatattgcgatgccgaaaagtctaattttactttatgctatgacaaataccctttagagaaatggcaaatcaacctcaacttgttcaggacgtgtacaggctatgcaatacctttggtcaccatcctgatctgcaaccggaaagtctaccaagctgtgcggcacaataaagccacggaaaacaaggaaaagaagagaatcataaaactacttgtcagcatcacagttacttttgtcttatgctttactccctttcatgtgatgttgctgattcgctgcattttagagcatgctgtgaacttcgaagaccacagcaattctgggaagcgaacttacacaatgtatagaatcacggttgcattaacaagtttaaattgtgttgctgatccaattctgtactgttttgtaaccgaaacaggaagatatgatatgtggaatatattaaaattctgcactgggaggtgtaatacatcacaaagacaaagaaaacgcatactttctgtgtctacaaaagatactatggaattagaggtccttgagtagaaccaaggatgttttgaagggaagggaagtttaagttatgcattattatatcatcaagattacattttgaaaaggaaatctagcatgtgaggggactaagtgttctcagagtgatgttttaatccagtccaataaaaatatcttaaaactgcattgtacagctccctccctgcgttttattaaatgatgtatattaaacaaagatcaatatttt

SEQ ID NO: 139483 - DNA, 1014 bp, Artificial Sequence
  derived and/or modified sequence
atgaattccacatgtatcgaggaacagcacgacctggaccactacctgttcccgattgtctacatcttcgtaattatcgtctccatcccagcaaacattggatctttatgtgtctcttttctccaggctaaaaaagaaagcgaactaggaatttacctgttcagccttagcctgtctgaccttctgtacgcgctgacacttcctctttggattgattacacctggaataaggataactggactttttctcccgccctctgcaaaggcagtgcatttttaatgtatatgaatttttactcaagcaccgccttccttacgtgcattgcagtggaccgttatctagctgtcgtgtatcccctgaaattttttttccttcggaccaggagatttgcgctgatggtctcactttcaatttggatccttgaaactatcttcaatgcagtgatgctgtgggaggacgagaccgtggtcgagtactgcgatgctgaaaaatcaaacttcaccctctgttacgacaaataccccttggaaaagtggcagattaacctgaatctcttcaggacgtgcaccggttacgctatccccctggtcactatattaatttgtaacaggaaggtctatcaagctgttaggcataataaggccactgagaataaggaaaagaaacggattattaagctcttggtaagcataacagttacctttgttctttgctttacaccttttcacgtgatgctgctaataagatgcatcctggagcacgccgtaaacttcgaagaccatagtaatagcggcaagcgtacatatactatgtatcgcatcaccgtggcgctgacttccctcaactgcgtcgctgacccaattctctattgcttcgtgacagagacagggcgctatgatatgtggaacatcctgaagttctgtaccggcaggtgtaacacctcacagcggcaacgaaagagaatcttatccgtgagtacaaaggatacaatggaactggaggtgctcgagtag

SEQ ID NO: 139484 - DNA, 1014 bp, Artificial Sequence
  derived and/or modified sequence
atgaacagcacctgcatcgaggagcagcacgacctggaccactacctgttccccatcgtgtacatctttgtgatcatcgtgtccatcccagccaacatcggcagcctgtgtgtgtccttcctgcaggccaagaaggagagcgagctgggcatctacctgttcagcctgagcctgagtgacctgctgtatgccctgaccctgcccctgtggattgactacacctggaacaaggacaactggaccttcagccctgccctgtgcaagggcagcgccttcctgatgtacatgaacttctacagcagcacagccttcctgacctgcatcgctgtggaccgctacctggccgtggtgtaccccctgaagttcttcttcctgcggaccaggagatttgccctgatggtgtccctgagcatctggatcctggagaccatcttcaatgctgtgatgctgtgggaggatgaaacagtggtggagtactgtgatgctgagaagagcaacttcaccctgtgctatgacaagtaccccctggagaagtggcagatcaacctgaacctcttccgcacctgcaccggctacgccatccccctggtgaccatcctgatctgcaacaggaaggtgtaccaggccgtgcgccacaacaaggccacagagaacaaggagaagaagaggatcatcaagctgctggtgtccatcaccgtgacctttgtgctgtgcttcacccccttccacgtgatgctgctgatccgctgcatcctggagcacgctgtgaactttgaggaccacagcaacagcggcaagaggacctacaccatgtaccgcatcaccgtggccctgaccagcctgaactgtgtggccgaccccatcctgtactgctttgtgacagagaccggccgctatgacatgtggaacatcctgaagttctgcaccggccgctgcaacaccagccagaggcagaggaagaggatcctgtctgtgtccaccaaggacaccatggagctggaggtgctggagtag

SEQ ID NO: 139485 - DNA, 1014 bp, Artificial Sequence
  derived and/or modified sequence
atgaacagcacctgcatcgaggagcagcacgacctggaccactacctgttccctatcgtttacatcttcgtcattatcgtgtctataccagccaatataggaagcctgtgcgttagctttctgcaggccaagaaagaatctgagttgggcatctatctattcagtctgtccctcagcgacctgctgtacgctctgaccctccctctttggatcgactatacttggaataaagacaactggacattttctcccgccctgtgcaagggatcagcgtttctgatgtatatgaacttctactctagtacagctttcctcacctgtatcgctgtggatcgctacctcgcggtggtttaccccttgaagttcttttttctgcgcacccggcgctttgccctgatggtctcattgtccatttggatcctggagaccatctttaatgccgtcatgctttgggaagatgagactgtggtggaatactgcgacgccgagaaatctaacttcaccctgtgctatgataagtacccactcgaaaagtggcagataaatttgaacctgttcagaacatgtactggttatgcaattccgttggttacaatcttgatttgcaatcgcaaggtgtatcaagccgtacgccataataaggctactgaaaacaaggagaagaagcggattataaaactgctggtgagtataacggtgacttttgtcctgtgcttcacgccatttcatgtcatgctcctgattagatgcatactggagcacgccgtgaatttcgaagaccactcaaacagtggaaagcgcacgtatacgatgtatagaataacagtcgcccttacatcactgaattgcgtggcggatccaatcctctattgttttgtgaccgaaacaggacgatatgacatgtggaacatcctgaagttctgcaccgggagatgcaatactagtcaacgccagagaaagcggatcctctccgtcagcactaaagacaccatggagttagaagtgctagagtag

SEQ ID NO: 139486 - DNA, 1014 bp, Artificial Sequence
  derived and/or modified sequence
atgaactccacatgcatcgaggaacaacatgacctggaccactatctgtttccgatcgtatacattttcgtgatcatcgtctctatccctgccaatatcgggtccctttgtgtgagctttttacaggcaaagaaggagtcagagttagggatttacctgttctcactgtctctatccgacctgctgtacgctcttactctgccattatggatagactacacctggaataaggacaattggactttcagcccggcattatgtaaggggtcggccttcttgatgtacatgaatttttatagcagcaccgcttttctgacctgcatcgcagtggaccgttatttggccgtggtatacccacttaagttttttttcctgcggacccggagatttgccctcatggtgagcttgtccatttggatccttgaaacaattttcaatgcagtgatgctgtgggaagacgaaacagtcgtggagtactgcgacgctgagaaatctaattttaccctgtgctatgataaatacccactggagaaatggcagattaatttaaaccttttccgcacctgcacaggctatgctattcctctcgtgaccatactaatctgcaacagaaaggtctaccaagcagtccggcacaacaaggctacagagaacaaagagaaaaagaggatcattaaactgctggtttcaatcacggtcacctttgttctatgcttcacgccttttcacgtgatgttactgatccgttgcatactggaacacgctgtgaatttcgaagaccattcgaatagtggcaagaggacctataccatgtatagaattacagttgccctgacttcacttaactgtgtggccgaccctattctctattgctttgtcacggaaactggtagatacgacatgtggaacatcctgaagttctgtacgggacggtgcaatacatctcagagacagagaaaaaggatcttatcagtgtctacgaaagacactatggaattagaggtgctcgaatag

SEQ ID NO: 139487 - DNA, 1014 bp, Artificial Sequence
  derived and/or modified sequence
atgaacagcacctgcatcgaggagcagcacgacctggaccactacctgttccccatcgtgtacatcttcgtgatcatcgtgagcatccccgccaacatcggcagcctgtgcgtgagcttcctgcaggccaagaaggagagcgagctgggcatctacctgttcagcctgagcctgagcgacctgctgtacgccctgaccctgcccctgtggatcgactacacctggaacaaggacaactggaccttcagccccgccctgtgcaagggcagcgccttcctgatgtacatgaacttctacagcagcaccgccttcctgacctgcatcgccgtggacagatacctggccgtggtgtaccccctgaagttcttcttcctgagaaccagaagattcgccctgatggtgagcctgagcatctggatcctggagaccatcttcaacgccgtgatgctgtgggaggacgagaccgtggtggagtactgcgacgccgagaagagcaacttcaccctgtgctacgacaagtaccccctggagaagtggcagatcaacctgaacctgttcagaacctgcaccggctacgccatccccctggtgaccatcctgatctgcaacagaaaggtgtaccaggccgtgagacacaacaaggccaccgagaacaaggagaagaagagaatcatcaagctgctggtgagcatcaccgtgaccttcgtgctgtgcttcacccccttccacgtgatgctgctgatcagatgcatcctggagcacgccgtgaacttcgaggaccacagcaacagcggcaagagaacctacaccatgtacagaatcaccgtggccctgaccagcctgaactgcgtggccgaccccatcctgtactgcttcgtgaccgagaccggcagatacgacatgtggaacatcctgaagttctgcaccggcagatgcaacaccagccagagacagagaaagagaatcctgagcgtgagcaccaaggacaccatggagctggaggtgctggagtag

SEQ ID NO: 139488 - protein, 556 aa, Artificial Sequence
  derived and/or modified sequence
MAREKEMQEFTRSFFRGRPDLSTLTHSIVRRRYLAHSGRSHLEPEEKQALKRLVEEELLKMQVDEAASREDKLDLTKKGKRPPTPCSDPERKRFRFNSESESGSEASSPDYFGPPAKNGVAAEVSPAKEENPRRASKAVEESSDEERQRDLPAQRGEESSEEEEKGYKGKTRKKPVVKKQAPGKASVSRKQAREESEESEAEPVQRTAKKVEGNKGTKSLKESEQESEEEILAQKKEQREEEVEEEEKEEDEEKGDWKPRTRSNGRRKSAREERSCKQKSQAKRLLGDSDSEEEQKEAASSGDDSGRDREPPVQRKSEDRTQLKGGKRLSGSSEDEEDSGKGEPTAKGSRKMARLGSTSGEESDLEREVSDSEAGGGPQGERKNRSSKKSSRKGRTRSSSSSSDGSPEAKGGKAGSGRRGEDHPAVMRLKRYIRACGAHRNYKKLLGSCCSHKERLSILRAELEALGMKGTPSLGKCRALKEQREEAAEVASLDVANIISGSGRPRRRTAWNPLGEAAPPGELYRRTLDSDEERPRPAPPDWSHMRGIISSDGESN

SEQ ID NO: 139489 - protein, 243 aa, Artificial Sequence
  derived and/or modified sequence
MAREKEMQEFTRSFFRGRPDLSTLTHSIVRRRYLAHSGRSHLEPEEKQALKRLVEEELLKMQVDEAASREDKLDLTKKGKRPPTPCSDPERKRFRFNSESAGSGRRGEDHPAVMRLKRYIRACGAHRNYKKLLGSCCSHKERLSILRAELEALGMKGTPSLGKCRALKEQREEAAEVASLDVANIISGSGRPRRRTAWNPLGEAAPPGELYRRTLDSDEERPRPAPPDWSHMRGIISSDGESN

SEQ ID NO: 139490 - DNA, 1671 bp, Artificial Sequence
  derived and/or modified sequence
atggcaagagaaaaggagatgcaagaatttacacgatccttctttcgaggcaggcctgacctgagtactctcacccacagcattgtgagaagaaggtatctcgcccactccggtaggtcgcacctcgaacctgaagagaagcaggcccttaagcggctggttgaggaggaactgttaaagatgcaagtggatgaggctgcatctcgggaagacaaacttgatctcaccaaaaaaggaaaaaggccaccaaccccatgcagcgatcccgaaagaaaacggttcagattcaattctgagagtgagtctggcagcgaggcctcctccccagactacttcgggcctccagctaagaatggggttgccgcggaagtctcccctgctaaggaagagaatcctcggagagccagcaaggcagtcgaggaatcttctgacgaagagcggcagcgcgacttaccagcccagaggggcgaggaatcctccgaagaggaggagaagggctacaagggaaagacacggaagaagcctgtggtaaaaaagcaggcccccggcaaagcctcagtgagcagaaagcaggccagggaggaatccgaggaatccgaggccgagccagtgcagcgaacggccaagaaagtggaaggaaacaaaggaacgaagagtctcaaagagtcagaacaggagagcgaagaagagattttggcccaaaagaaagagcagcgcgaagaagaggtggaggaggaagagaaggaggaggacgaagaaaagggagactggaagccccggactcggtcgaatggccgtagaaagagcgctcgcgaagagaggagttgcaagcagaagtcccaagccaagaggttactaggagatagtgactccgaagaagaacagaaggaggccgcaagcagcggcgatgatagcggcagagaccgagaacccccagtgcagagaaaatccgaagaccgcactcagctcaagggtgggaagaggctctcggggtcatccgaggatgaggaggattcaggtaagggagagcctacggcaaaaggcagcaggaagatggccaggctggggtccacaagtggtgaagagagcgacctggaacgggaggtgtccgactctgaggctggggggggaccccagggggagcggaaaaaccggagctcaaagaagagttccaggaagggtcggacccggtcgagctcctcctcaagtgacggatctccagaggctaaaggagggaaggccggaagcggcagaaggggggaggaccaccccgccgtgatgcgactgaaaaggtatattcgagcatgtggagcacacaggaattacaaaaaattgttaggctcatgctgtagtcataaagaaagattgagtattctgcgagctgaattggaagcattggggatgaagggaaccccatcacttgggaaatgtagagcgttgaaagagcagcgcgaggaagctgccgaagtggcgagtctcgacgtggccaacataatctccgggtctgggaggccaaggcgtcgcacggcgtggaacccactcggtgaggccgccccacccggagagctgtaccgacggaccctggactccgatgaagagcgcccccggcccgcccctcccgattggtcacatatgcgagggattatatcatccgatggtgagtctaattag

SEQ ID NO: 139491 - DNA, 732 bp, Artificial Sequence
  derived and/or modified sequence
atggcgagagaaaaagagatgcaggagtttacgcgctccttctttaggggtcgaccagatctcagcactctcactcactctattgtacgcagaagatatttagcccacagcggccgctcacaccttgaaccggaggagaaacaggcacttaaaaggcttgtggaggaagaattactgaagatgcaagtggatgaggctgcctcacgggaggacaagctcgacctaacaaaaaagggaaaaagacctccaaccccctgttctgaccccgagaggaagagatttagatttaattctgaatcggcagggagcggacggcggggtgaggaccacccggcggtaatgaggcttaagaggtacattcgagcttgcggtgcccaccggaattacaaaaaacttctcggatcctgttgcagtcataaggaaagattgtctatactgcgggccgagctcgaagccctcgggatgaagggcacgccatcacttggcaagtgtcgggccctgaaagaacagcgagaggaggccgccgaggtggctagtctggatgttgctaacatcatctctggctccggtcggccacggcgacgcacagcttggaaccctttaggcgaggccgccccccctggcgagctatatagacggacactggacagcgacgaggaaagacctcgtcctgctccgcccgactggtcccacatgcggggaatcatctcatcagacggagagtccaattag

SEQ ID NO: 139492 - DNA, 1671 bp, Artificial Sequence
  derived and/or modified sequence
atggcccgggagaaggagatgcaggagttcaccaggagcttcttccggggccgcccagacctgagcaccctgacccacagcatcgtgagaagacgctacctggcccacagcggccgcagccacctggagcctgaggagaagcaggccctgaagaggctggtggaggaggagctgctgaagatgcaggtggatgaggccgccagccgggaggacaagctggacctgaccaagaagggcaagaggcctcccaccccctgcagcgaccctgagaggaagcgcttccgcttcaacagcgagagcgagagcggcagcgaggccagcagcccagactacttcggccccccagccaagaatggagtggccgctgaggtgtccccagccaaggaggagaacccccggcgggccagcaaggctgtggaggagagcagtgatgaggagcggcagagggacctgcctgcccagagaggagaggagagcagcgaggaggaggagaagggctacaagggcaagaccaggaagaagcctgtggtgaagaagcaggcccctgggaaggcctctgtgtccaggaagcaggcccgggaggagagcgaggagagcgaggccgagcctgtgcagaggacagccaagaaggtggagggcaacaagggcaccaagagcctgaaggagagcgagcaggagagcgaggaggagatcctggcccagaagaaggagcagcgggaggaggaggtggaggaggaggagaaggaggaggatgaggagaagggggactggaagcccaggaccaggagcaatggccgcaggaagagcgcccgggaggagaggagctgcaagcagaagagccaggccaagaggctgctgggggacagcgacagcgaggaggagcagaaggaggccgccagcagtggagatgattctggccgggaccgggagccccctgtgcagaggaagtctgaggacaggacccagctgaagggcggcaagaggctgagcggcagcagtgaagatgaagaagattctggaaaaggagagcccacagccaagggcagcaggaagatggcccggctgggcagcaccagcggggaggagagtgacctggagcgggaggtgtctgacagcgaggccggcggcggcccccagggcgagaggaagaacagaagcagcaagaagagcagcaggaaaggaagaaccaggagcagcagcagcagcagtgatggcagccctgaggccaagggcggcaaggccggcagcggcagaagaggagaggaccaccctgctgtgatgaggctgaagcgctacatccgggcctgtggggcccacaggaactacaagaagctgctgggcagctgctgcagccacaaggagcggctgagcatcctgcgggcagagctggaggccctgggcatgaagggcacccccagcctgggcaagtgccgggccctgaaggagcagcgggaggaggccgctgaggtggccagcctggatgtggccaacatcatcagcggcagcggccggcccaggagaagaacagcctggaaccccctgggggaggccgcccctcctggagagctgtacagaaggaccctggacagtgatgaggagcggcccaggcctgcccccccagactggagccacatgaggggcatcatcagcagtgatggagagagcaactag

SEQ ID NO: 139493 - DNA, 732 bp, Artificial Sequence
  derived and/or modified sequence
atggcccgggagaaggagatgcaggagttcaccaggagcttcttccggggccgcccagacctgagcaccctgacccacagcatcgtgagaagacgctacctggcccacagcggccgcagccacctggagcctgaggagaagcaggccctgaagaggctggtggaggaggagctgctgaagatgcaggtggatgaggccgccagccgggaggacaagctggacctgaccaagaagggcaagaggcctcccaccccctgcagcgaccctgagaggaagcgcttccgcttcaacagcgagagcgctggcagcggcagaagaggagaggaccaccctgctgtgatgaggctgaagcgctacatccgggcctgtggggcccacaggaactacaagaagctgctgggcagctgctgcagccacaaggagcggctgagcatcctgcgggcagagctggaggccctgggcatgaagggcacccccagcctgggcaaatgtcgggccctgaaggagcagcgggaggaggccgctgaggtggccagcctggatgtggccaacatcatcagcggcagcggccggcccaggagaagaacagcctggaaccccctgggggaggccgcccctcctggagagctgtacagaaggaccctggacagtgatgaggagcggcccaggcctgcccccccagactggagccacatgaggggcatcatcagcagtgatggagagagcaactag

SEQ ID NO: 139494 - DNA, 1671 bp, Artificial Sequence
  derived and/or modified sequence
atggcccgggagaaggagatgcaggagttcacccggagcttcttccggggacgccccgacctgtcaactctaacacattccattgtgaggcgccgttacctggcccactctgggagaagccacttggaacccgaagaaaaacaggccttgaaaagactcgtcgaggaagagttgctaaagatgcaggttgatgaggccgcgtccagagaggacaaattggacttgaccaaaaaaggaaagaggccacccacaccttgcagcgaccctgaaaggaaacgtttccggtttaattccgaatcagagtcgggttcagaagcgagtagccctgattacttcggtccacccgcaaaaaacggtgtggccgcagaagtatcacctgctaaggaagaaaacccccgacgtgcatccaaagccgtggaggaaagcagcgatgaagaaaggcaacgagacttgccggcacaacgcggagaagagtcgtcagaagaggaggaaaaaggatacaaaggaaagaccagaaaaaagccagtggtgaagaaacaggctcctgggaaagcgtccgtcagcaggaagcaggcccgtgaggagagcgaagaatccgaagccgaacccgtccagagaacagccaaaaaggtggaaggcaacaaggggacaaagtcactgaaggagtccgagcaagaatccgaggaggagatattggcccagaaaaaagaacagcgagaggaggaagtggaggaagaggagaaagaggaagatgaggagaaaggagactggaaaccccggacgagatcaaacgggaggagaaaatccgcgagggaggagcgttcatgcaaacaaaaatcacaggcaaaacggctcctgggcgattccgacagtgaggaagagcagaaggaagctgcatcttcaggagatgactctggtcgggatagggaacctccagtgcaacgaaaatccgaggaccgcacccagctcaaaggcggtaagcggctcagtggcagctctgaggatgaggaagatagcggcaagggcgagcctaccgcaaaaggatctcgcaagatggccaggctcgggagcactagtggtgaagagtcagacctggagagggaagtgagcgactctgaggctggcggcggaccccaaggcgagcgtaaaaaccgcagtagtaaaaagtcttcccgcaaagggcgaactcgctccagttcgtctagttcagatggaagcccagaagcgaaaggtggtaaagctggaagtggacgcagaggggaagatcatcctgctgtgatgcggctcaagcgatatatcagggcctgcggagcacacagaaattacaaaaagctattggggtcttgctgttcccacaaggagagactgtccatcttgagagccgaattagaggccctgggcatgaaaggtactcctagtctcggcaaatgccgagccctgaaagagcagcgcgaggaagccgccgaagtggcatctcttgacgtggctaatataattagcggcagcggcaggcctcggagacgcacagcttggaatcctttaggggaagcagcaccccctggtgagttgtaccgtaggacccttgactctgatgaggagaggccaaggcccgcacccccagactggtcacacatgcggggtatcatctcatcagacggggagtcaaactag

SEQ ID NO: 139495 - DNA, 732 bp, Artificial Sequence
  derived and/or modified sequence
atggcccgggagaaggagatgcaggagttcacccggagcttcttccgtgggcgccctgacttatccactctgactcattccattgtgcgacgcaggtatctagcgcacagtggaagatctcacctagagccagaagagaagcaggccctcaaaaggctggtcgaggaagaactgctgaagatgcaagtcgacgaagcagcctcccgggaggataagcttgatttgaccaagaaaggaaagaggccaccaaccccctgcagcgaccctgaaagaaagcgtttccgattcaattccgagtcagccggctccggcaggaggggtgaggatcatcccgctgtcatgagactgaaaaggtatataagagcttgtggggctcatcgcaattacaaaaaactcctcggatcctgctgctcccataaagaacgtctgtccatcctgagagcggagctcgaggccctaggtatgaaaggcacccccagcctcgggaaatgtcgcgccttaaaagagcagagggaagaagccgcagaagtggctagcctggacgtggcaaatattatctcaggctccggtcgcccaaggcgtaggaccgcctggaacccattaggtgaggcagcgccccccggtgaactttacagacggaccttggatagtgacgaagagcgccctcggcctgctcctcctgattggtctcacatgaggggcattataagcagtgacggggagtccaactag

SEQ ID NO: 139496 - DNA, 1671 bp, Artificial Sequence
  derived and/or modified sequence
atggctcgagaaaaagaaatgcaggagtttacgcggtcttttttccgaggacggcctgacctgtccaccctgactcatagcatcgtccggagacggtatctggcacatagcggacgcagccacttagagcccgaggaaaaacaagccttaaagagactggtcgaggaagagctgctaaagatgcaggtcgacgaggcagcaagtcgtgaggataagcttgatctgactaaaaaggggaagcggcctcccacaccatgtagcgatccagagaggaagcgtttcagattcaactccgaaagtgagagcggcagtgaggcatcttctcctgactactttggaccaccagctaaaaacggtgtggcagctgaagtgagccccgctaaggaagaaaaccctcggagagcatccaaagcggttgaagagtcctccgacgaggaaaggcagagagacctgcctgctcagcgaggagaagaatcttcagaggaagaagagaaaggatacaagggaaaaacaagaaagaaacctgtggtgaagaaacaagcccctggcaaggctagtgtctcaagaaaacaagcacgggaggagtctgaggagtctgaagccgaacctgtccaacgcacagccaaaaaggtcgagggaaacaagggaacaaagagcctaaaagaaagcgagcaggagtccgaggaagagattcttgcacagaaaaaggagcaacgcgaggaagaggtggaagaagaagagaaggaagaagacgaggaaaagggagactggaaacctaggacacgatcgaatggcagacgcaagtcagctagggaggagaggagctgcaaacaaaagtcccaggcgaaacgcttactgggcgacagtgacagcgaggaagaacaaaaagaagcagcgtcatctggagacgattcaggtcgtgatcgcgaaccacctgtccagcgcaagagtgaagatcgcactcagctcaaaggcggaaagaggctcagcggaagtagtgaagatgaagaagattctgggaaaggcgaaccgactgctaagggaagcagaaagatggcaaggctgggatcgacgagcggagaggaatccgatttagagagagaagtgtctgactcagaggcgggtgggggacctcagggagagcggaagaaccgatccagtaaaaaatcctcaagaaagggtcggacaagaagttcctcctcaagcagcgacggatctccagaggcaaaaggaggaaaagccggaagcgggagacgaggggaggaccacccagccgtgatgaggctcaagcgttacatccgcgcttgtggcgctcacagaaactacaaaaagctgctaggcagttgttgcagccacaaagagaggttgagcattctgcgggcagagctggaagctttaggtatgaaagggactccaagtttgggcaagtgccgggctctgaaggagcagcgtgaagaagccgctgaggtggcctctctggacgtggccaatatcatcagcgggagcggcagaccccgtagaagaacagcgtggaacccactgggagaagctgcaccaccgggtgagctctaccggcgaactcttgactcagatgaggagaggccacgccctgctcctcccgactggtcacacatgcggggaatcatctctagcgacggcgagtccaactag

SEQ ID NO: 139497 - DNA, 732 bp, Artificial Sequence
  derived and/or modified sequence
atggcccgtgagaaggagatgcaggaattcacaagaagcttcttccgcggacggccagatctgagtaccctcactcattcaattgtgagacgacgctacctagctcattccggaaggtctcacctggaacctgaagaaaaacaggctctgaagcgcctggtggaggaagaactgcttaagatgcaggtcgatgaggccgcatcacgagaggacaagctcgacctgacgaagaaaggaaagaggccgccaaccccctgtagtgatccggaacggaaaaggttcaggttcaactctgaaagcgccggatctggaagacggggtgaagatcatcccgcagtgatgaggctgaaaaggtatattagagcctgtggcgctcatcgcaactacaaaaaacttctcggctcatgttgcagccacaaggaacggttgagtatattacgcgcagagctcgaggctctggggatgaaaggaacaccatccctgggcaaatgccgggcactgaaagaacagcgggaggaggcagccgaggtggcatctctcgatgttgcgaacatcatctccggatctggtcggccaaggcgtcgcaccgcctggaacccattgggggaagctgccccacctggagaactctaccgacgaacgctggactctgacgaggagcgacctaggccggctcccccagattggtcgcatatgcgagggatcattagttctgatggagaaagtaactag

SEQ ID NO: 139498 - DNA, 1671 bp, Artificial Sequence
  derived and/or modified sequence
atggccagagagaaggagatgcaggagttcaccagaagcttcttcagaggcagacccgacctgagcaccctgacccacagcatcgtgagaagaagatacctggcccacagcggcagaagccacctggagcccgaggagaagcaggccctgaagagactggtggaggaggagctgctgaagatgcaggtggacgaggccgccagcagagaggacaagctggacctgaccaagaagggcaagagaccccccaccccctgcagcgaccccgagagaaagagattcagattcaacagcgagagcgagagcggcagcgaggccagcagccccgactacttcggcccccccgccaagaacggcgtggccgccgaggtgagccccgccaaggaggagaaccccagaagagccagcaaggccgtggaggagagcagcgacgaggagagacagagagacctgcccgcccagagaggcgaggagagcagcgaggaggaggagaagggctacaagggcaagaccagaaagaagcccgtggtgaagaagcaggcccccggcaaggccagcgtgagcagaaagcaggccagagaggagagcgaggagagcgaggccgagcccgtgcagagaaccgccaagaaggtggagggcaacaagggcaccaagagcctgaaggagagcgagcaggagagcgaggaggagatcctggcccagaagaaggagcagagagaggaggaggtggaggaggaggagaaggaggaggacgaggagaagggcgactggaagcccagaaccagaagcaacggcagaagaaagagcgccagagaggagagaagctgcaagcagaagagccaggccaagagactgctgggcgacagcgacagcgaggaggagcagaaggaggccgccagcagcggcgacgacagcggcagagacagagagccccccgtgcagagaaagagcgaggacagaacccagctgaagggcggcaagagactgagcggcagcagcgaggacgaggaggacagcggcaagggcgagcccaccgccaagggcagcagaaagatggccagactgggcagcaccagcggcgaggagagcgacctggagagagaggtgagcgacagcgaggccggcggcggcccccagggcgagagaaagaacagaagcagcaagaagagcagcagaaagggcagaaccagaagcagcagcagcagcagcgacggcagccccgaggccaagggcggcaaggccggcagcggcagaagaggcgaggaccaccccgccgtgatgagactgaagagatacatcagagcctgcggcgcccacagaaactacaagaagctgctgggcagctgctgcagccacaaggagagactgagcatcctgagagccgagctggaggccctgggcatgaagggcacccccagcctgggcaagtgcagagccctgaaggagcagagagaggaggccgccgaggtggccagcctggacgtggccaacatcatcagcggcagcggcagacccagaagaagaaccgcctggaaccccctgggcgaggccgccccccccggcgagctgtacagaagaaccctggacagcgacgaggagagacccagacccgccccccccgactggagccacatgagaggcatcatcagcagcgacggcgagagcaactag

SEQ ID NO: 139499 - DNA, 732 bp, Artificial Sequence
  derived and/or modified sequence
atggccagagagaaggagatgcaggagttcaccagaagcttcttcagaggcagacccgacctgagcaccctgacccacagcatcgtgagaagaagatacctggcccacagcggcagaagccacctggagcccgaggagaagcaggccctgaagagactggtggaggaggagctgctgaagatgcaggtggacgaggccgccagcagagaggacaagctggacctgaccaagaagggcaagagaccccccaccccctgcagcgaccccgagagaaagagattcagattcaacagcgagagcgccggcagcggcagaagaggcgaggaccaccccgccgtgatgagactgaagagatacatcagagcctgcggcgcccacagaaactacaagaagctgctgggcagctgctgcagccacaaggagagactgagcatcctgagagccgagctggaggccctgggcatgaagggcacccccagcctgggcaagtgcagagccctgaaggagcagagagaggaggccgccgaggtggccagcctggacgtggccaacatcatcagcggcagcggcagacccagaagaagaaccgcctggaaccccctgggcgaggccgccccccccggcgagctgtacagaagaaccctggacagcgacgaggagagacccagacccgccccccccgactggagccacatgagaggcatcatcagcagcgacggcgagagcaactag

SEQ ID NO: 139500 - DNA, 2349 bp, Artificial Sequence
  derived and/or modified sequence
ggcggacgctggaaagcgccgttcctgactctaatgtacttagacacttgaagccacaaaaggatttatccccgaggttcctcatctgctcgcgaggatgccttttctcttctgccttgcgaaataacagcagcctagctgttgcccgtgaccagtgagaaaggcagcgtcgcgggctgattaggtttcacccaaagggtgccggcgccgaattggtttctaacgagaacttttaaaatgatccgttccaaaaaagggtaggagccgcgagaccctccaactgcccagagaaaacaagtctcgtctggcaaagttctcggcccacgcggtccgcggccaagggccaacggtccctcgccccacgttgccgcagcactgcgcgtgcgcgagccgctgtcaaacgcgctgacggaggccgagaagaaaaaaaggcgggagccgtcaatcccgggttgagcaaaatggcgcgggagaaggagatgcaggagttcacccgtagcttcttccgaggccgcccggacctcagcacgcttacgcattccatcgtgcggcggaggtacttagctcactcgggccgcagccacctggagcccgaggagaagcaggcactgaagcggctggtggaggaggagctgctgaagatgcaggtggatgaagccgcttccagggaagacaaactggaccttaccaagaagggcaagaggcctcccaccccttgtagcgacccggagagaaaaaggttccgcttcaattcagagtcggagtccggctctgaagcctccagcccagactactttggacccccagcaaagaatggggtggcagcagaagtcagcccagccaaagaggagaatccaaggcgagcctcaaaggcagttgaggagagcagtgatgaggaacggcagagggacctgcccgcacagaggggagaggagagcagtgaggaggaggaaaaggggtacaaggggaagactaggaagaaacctgtggtaaagaagcaggcaccaggcaaggcctcagtcagtaggaagcaggccagggaagaaagtgaggagagcgaggcagaacccgttcagaggacagcaaagaaggtggagggaaataaaggaactaaaagcctgaaggaaagtgaacaggagagtgaagaggagatcctagcccagaagaaagagcagagagaggaggaagtggaggaggaagagaaagaagaggatgaggaaaagggggattggaaacccagaaccaggagcaatggccggagaaagtcagctagggaggagaggagctgtaagcagaaaagccaggcaaagaggctcttgggagactcagacagcgaggaagagcagaaagaggcagccagcagtggggatgacagtgggagagatagagaacccccagtgcagaggaagagtgaggacaggacccagcttaagggtgggaagaggttgagtggaagcagcgaggacgaggaagacagtgggaagggggaacccacagctaaaggctctagaaagatggccagactgggcagcaccagtggtgaggaaagtgacttggagagggaggtaagtgacagcgaggcagggggaggcccccagggggagaggaagaaccgctcttccaagaagagctccaggaaaggcaggacacgaagctcctcttcctcctcagatggaagtccagaggccaaaggagggaaggctggctcaggtcgccgtggagaggaccacccggctgtgatgaggctgaagcgctacattcgggcctgtggtgcccatcgaaactacaagaagctgttgggctcctgttgctcacacaaggagcgcctgagtatcctccgggcagaactggaagcgctaggcatgaagggtaccccttccctagggaagtgtcgggccctgaaggagcagagggaggaggcagctgaggtggcctccttggatgttgcgaacatcatcagtggctcgggccggccacgcagacgtacagcctggaaccctttaggagaagcagcacccccaggggagctgtaccgacggaccctggactcagatgaagagcggccccgtcccgcacccccagactggtcacatatgcgtggcatcatcagcagtgatggcgagagtaactgagctctgccacccccaggagggacccttgatacatgtacaaagcatacatagcaccccttgccctgtgtctgtggaacagaagcagcttccttcagagaagactgcagctcccaaggacacaagctgttgggatgctacttctcagcttcacgctgtccctttaaggtgtttattttttaagactcaataaaggagtgtttttaatcacctcatcaaa

SEQ ID NO: 139501 - DNA, 1404 bp, Artificial Sequence
  derived and/or modified sequence
ggcggacgctggaaagcgccgttcctgactctaatgtacttagacacttgaagccacaaaaggatttatccccgaggttcctcatctgctcgcgaggatgccttttctcttctgccttgcgaaataacagcagcctagctgttgcccgtgaccagtgagaaaggcagcgtcgcgggctgattaggtttcacccaaagggtgccggcgccgaattggtttctaacgagaacttttaaaatgatccgttccaaaaaagggtaggagccgcgagaccctccaactgcccagagaaaacaagtctcgtctggcaaagttctcggcccacgcggtccgcggccaagggccaacggtccctcgccccacgttgccgcagcactgcgcgtgcgcgagccgctgtcaaacgcgctgacggaggccgagaagaaaaaaaggcgggagccgtcaatcccgggttgagcaaaatggcgcgggagaaggagatgcaggagttcacccgtagcttcttccgaggccgcccggacctcagcacgcttacgcattccatcgtgcggcggaggtacttagctcactcgggccgcagccacctggagcccgaggagaagcaggcactgaagcggctggtggaggaggagctgctgaagatgcaggtggatgaagccgcttccagggaagacaaactggaccttaccaagaagggcaagaggcctcccaccccttgtagcgacccggagagaaaaaggttccgcttcaattcagagtcggctggctcaggtcgccgtggagaggaccacccggctgtgatgaggctgaagcgctacattcgggcctgtggtgcccatcgaaactacaagaagctgttgggctcctgttgctcacacaaggagcgcctgagtatcctccgggcagaactggaagcgctaggcatgaagggtaccccttccctagggaagtgtcgggccctgaaggagcagagggaggaggcagctgaggtggcctccttggatgttgcgaacatcatcagtggctcgggccggccacgcagacgtacagcctggaaccctttaggagaagcagcacccccaggggagctgtaccgacggaccctggactcagatgaagagcggccccgtcccgcacccccagactggtcacatatgcgtggcatcatcagcagtgatggcgagagtaactgagctctgccacccccaggagggacccttgatacatgtacaaagcatacatagcaccccttgccctgtgtctgtggaacagaagcagcttccttcagagaagactgcagctcccaaggacacaagctgttgggatgctacttctcagcttcacgctgtccctttaaggtgtttattttttaagactcaataaaggagtgtttttaatcacctc

SEQ ID NO: 139502 - protein, 1012 aa, Artificial Sequence
  derived and/or modified sequence
MMAQSNMFTVADVLSQDELRKKLYQTFKDRGILDTLKTQLRNQLIHELMHPVLSGELQPRSISVEGSSLLIGASNSLVADHLQRCGYEYSLSVFFPESGLAKEKVFTMQDLLQLIKINPTSSLYKSLVSGSDKENQKGFLMHFLKELAEYHQAKESCNMETQTSSTFNRDSLAEKLQLIDDQFADAYPQRIKFESLEIKLNEYKREIEEQLRAEMCQKLKFFKDTEIAKIKMEAKKKYEKELTMFQNDFEKACQAKSEALVLREKSTLERIHKHQEIETKEIYAQRQLLLKDMDLLRGREAELKQRVEAFELNQKLQEEKHKSITEALRRQEQNIKSFEETYDRKLKNELLKYQLELKDDYIIRTNRLIEDERKNKEKAVHLQEELIAINSKKEELNQSVNRVKELELELESVKAQSLAITKQNHMLNEKVKEMSDYSLLKEEKLELLAQNKLLKQQLEESRNENLRLLNRLAQPAPELAVFQKELRKAEKAIVVEHEEFESCRQALHKQLQDEIEHSAQLKAQILGYKASVKSLTTQVADLKLQLKQTQTALENEVYCNPKQSVIDRSVNGLINGNVVPCNGEISGDFLNNPFKQENVLARMVASRITNYPTAWVEGSSPDSDLEFVANTKARVKELQQEAERLEKAFRSYHRRVIKNSAKSPLAAKSPPSLHLLEAFKNITSSSPERHIFGEDRVVSEQPQVGTLEERNDVVEALTGSAASRLRGGTSSRRLSSTPLPKAKRSLESEMYLEGLGRSHIASPSPCPDRMPLPSPTESRHSLSIPPVSSPPEQKVGLYRRQTELQDKSEFSDVDKLAFKDNEEFESSFESAGNMPRQLEMGGLSPAGDMSHVDAAAAAVPLSYQHPSVDQKQIEEQKEEEKIREQQVKERRQREERRQSNLQEVLERERRELEKLYQERKMIEESLKIKIKKELEMENELEMSNQEIKDKSAHSENPLEKYMKIIQQEQDQESADKSSKKMVQEGSLVDTLQSSDKVESLTGFSHEELDDSW

SEQ ID NO: 139503 - protein, 367 aa, Artificial Sequence
  derived and/or modified sequence
MMAQSNMFTVADVLSQDELRKKLYQTFKDRGILDTLKTQLRNQLIHELMHPVLSGELQPRSISVEGSSLLIGASNSLVADHLQRCGYEYSLSVFFPESGLAKEKVFTMQDLLQLIKINPTSSLYKSLVSGSDKENQKGFLMHFLKELAEYHQAKESCNMETQTSSTFNRDSLAEKLQLIDDQFADAYPQRIKFESLEIKLNEYKREIEEQLRAEMCQKLKFFKDTEIAKIKMEAKKKYEKELTMFQNDFEKACQAKSEALVLREKSTLERIHKHQEIETKEIYAQRQLLLKDMDLLRGREAELKQRVEAFELNQKLQEEKHKSITEALRRQEQNIKSFEETYDRKLKNELLNFHRLHGVCLALGILI

SEQ ID NO: 139504 - DNA, 3039 bp, Artificial Sequence
  derived and/or modified sequence
atgatggcccaatcgaatatgtttactgtggccgatgtactctcgcaagatgagctgaggaaaaaactgtatcaaaccttcaaagataggggcattctggatacccttaaaacgcaacttcggaaccagctcattcacgaactgatgcaccctgtactctccggggagctccaaccccgctccatttctgttgaggggtcttcccttttgattggcgccagcaactccttggtggctgatcatctccaaagatgcgggtatgagtattccttgtctgtttttttccccgaatccggtctggcgaaggaaaaagtgttcactatgcaggatctgcttcagcttatcaagatcaacccaacttcaagtctatacaaaagcctggtgtccggatccgacaaggagaaccagaaggggtttctgatgcatttcttgaaggaactggccgaataccatcaagcaaaagaatcttgcaatatggagacccagacctcttctacctttaatcgggattcactcgctgagaaacttcagctgatcgacgatcaattcgccgatgcatacccccaaagaattaaatttgagagcctcgaaatcaagttaaacgaatacaagcgcgagatagaagagcagttacgggccgagatgtgtcagaaactgaaatttttcaaagatacagaaattgccaaaatcaagatggaagctaagaagaagtacgagaaagagctcaccatgtttcagaacgattttgagaaagcatgccaagccaagtccgaggcactggtgctgcgcgagaaatccactctcgagcgcattcacaagcaccaagagatcgagacaaaggaaatatacgcacagcggcagttgctgttgaaggatatggacctcctgagagggagagaagcagagttgaaacagagggtcgaggcttttgagttgaaccagaagctgcaagaagaaaagcataagtctatcacagaggcactacgaaggcaggagcagaatatcaaatcgtttgaggagacctacgatcggaaattgaaaaatgagctgcttaaatatcaactcgagctaaaggacgactatatcattcgcaccaaccgccttatcgaggacgagcgcaagaacaaggaaaaggcagttcacctacaggaggagctaatcgccataaattcaaaaaaggaggagttaaatcagagtgtgaatagagtaaaggagcttgagctggagctggaatctgtaaaagcccaatcgctggcgatcacaaagcagaatcatatgctcaatgagaaagtcaaggaaatgtcagattacagcctgctgaaggaggaaaaactagaactcctcgcccagaataaactccttaagcagcaactggaggagagcaggaatgagaacctacgcctcctgaatcgactggcccagcccgcccccgagctggcagtgttccagaaggaattgcgcaaagctgagaaagcgatcgtagtggaacatgaagagtttgagtcttgccgtcaggcactccataagcagctgcaagatgagatcgagcatagtgcccagctgaaggcacagatcctgggctacaaggccagcgtcaaatctttgaccacacaggtggcggaccttaagcttcagctgaaacagacccaaaccgcgctggagaatgaggtgtactgtaatcctaagcagtccgtcatcgacaggtctgtaaatggcctgattaacgggaatgtggtgccttgtaatggggaaatcagtggggatttcctgaacaaccccttcaagcaggaaaatgttctggcccgaatggtggctagcaggataactaactatcccacagcctgggtggaggggtcaagccccgatagcgatctggagtttgtggccaataccaaagctcgggtaaaggagctccagcaggaggcagagcgccttgagaaggccttccgctcatatcaccgccgcgtcatcaaaaacagtgctaaaagccccttggctgctaaaagtccaccaagtttgcatctgctcgaggcctttaaaaacatcacttcctccagccctgagagacacattttcggtgaggacagggtggtgtccgaacagccacaggtgggaacgctggaagaaagaaatgacgtagtggaagcgctgaccggcagcgcagcctccaggttacggggcggaaccagctcaagacgactatcctcaactcccctgcccaaggccaaacgaagcctggaaagcgaaatgtatctggagggacttggccgctctcacatcgcttcgcctagcccttgccctgatcgaatgcccctgcctagcccaacagagtcgaggcacagcctgtctatcccgcccgtgtcttccccccccgagcagaaggtgggcctctaccgcaggcagacggaattacaggataagtccgaattttcagacgtcgataaacttgcttttaaggacaacgaagagtttgaaagctcttttgagagtgctgggaatatgccccgccagttagaaatgggtggacttagccccgccggagacatgtcacacgtggacgccgctgcagcagccgtacccctaagctatcagcatccgtccgtggaccagaagcaaatagaggagcagaaagaagaggaaaaaattcgtgagcaacaggtcaaagaacgtcgccaacgggaggaacgcaggcaaagcaatttacaggaggttttagagagggagaggagggaactggagaaattgtaccaggagaggaaaatgatcgaggagtcactgaaaattaaaataaaaaaggagcttgaaatggaaaacgagctggaaatgagtaaccaggaaattaaggataagtctgcacatagtgagaatccactcgagaaatacatgaaaatcatccagcaggaacaggaccaggagtccgcagataagagctcaaaaaaaatggtgcaagagggatccctggtcgatacacttcaatcctccgacaaggtagagagtcttacgggcttttcacatgaagagctagacgactcttggtag

SEQ ID NO: 139505 - DNA, 1104 bp, Artificial Sequence
  derived and/or modified sequence
atgatggcccaaagcaatatgtttaccgtggctgacgtgctttcccaagacgagctcaggaaaaagctgtatcagacattcaaagacaggggcatcctggacacactgaaaactcaattgcgcaaccagcttatacatgagctgatgcaccctgtgctgagcggcgagctgcaaccgcgaagcatctctgtggagggcagcagcttgttgattggcgcatctaactctctggtcgccgaccaccttcagcggtgcggttatgagtacagtttgagcgtgttttttcctgagagcggtcttgctaaggaaaaggtgtttacaatgcaggatctgcttcagctcattaagattaatcccaccagctctttatataagagtctggtcagcgggtctgacaaagagaatcagaaaggatttttaatgcatttcctgaaggagcttgcagagtaccaccaagcgaaggaaagctgcaatatggaaacacagacaagctctaccttcaatcgcgactctcttgctgaaaaactacagctcattgatgaccaattcgcagatgcttatccacagcggataaagttcgagtcacttgagattaagctgaatgagtataaacgagaaatcgaagaacaacttcgggcagagatgtgtcagaagctgaaattttttaaggacaccgagatcgcaaagatcaagatggaagccaaaaagaagtacgaaaaagagttgacaatgtttcagaatgatttcgagaaggcatgccaggctaaatcagaggcattagtcctgcgtgaaaagagtacactggagaggattcacaagcatcaggagatagaaacaaaggagatctatgcacagagacagctcctactcaaggacatggacctgttacgggggcgggaggccgagttaaagcaacgggtggaggccttcgaactgaatcagaagctgcaggaagaaaagcacaagtctatcacggaagctctccggagacaggaacagaatattaaatcattcgaggaaacctatgaccgtaagctcaaaaacgagctcctgaacttccaccgtttgcacggagtgtgtctggctctgggtattctgatctag

SEQ ID NO: 139506 - DNA, 3039 bp, Artificial Sequence
  derived and/or modified sequence
atgatggcccagagcaacatgttcaccgtggctgatgtgctgagccaggatgagctgaggaagaagctgtaccagaccttcaaggaccggggcatcctggacaccctgaagacccagctgaggaaccagctgatccacgagctgatgcaccctgtgctgagcggggagctgcagcccaggagcatctctgtggagggcagcagcctgctgattggagccagcaacagcctggtggccgaccacctgcagagatgtggctatgagtacagcctgagcgtcttcttccctgagagcggcctggccaaggagaaggtgttcaccatgcaggacctgctgcagctgatcaagatcaaccccaccagcagcctgtacaagagcctggtgtctggcagtgacaaggagaaccagaagggcttcctgatgcacttcctgaaggagctggccgagtaccaccaggccaaggagagctgcaacatggagacccagaccagcagcaccttcaacagagacagcctggccgagaagctgcagctgattgatgaccagtttgctgatgcctacccccagaggatcaagtttgagagcctggagatcaagctgaatgagtacaagcgggagattgaggagcagctgcgggcagagatgtgccagaagctgaagttcttcaaggacacagaaattgccaagatcaagatggaggccaagaagaagtatgagaaggagctgaccatgttccagaatgactttgagaaggcctgccaggccaagtctgaggccctggtgctgcgggagaagagcaccctggagcgcatccacaagcaccaggagattgagaccaaggagatctatgcccagaggcagctgctgctgaaggacatggacctgctgcggggccgggaggccgagctgaagcagagggtggaggcctttgagctgaaccagaagctgcaggaggagaagcacaagagcatcacagaggccctgcggcggcaggagcagaacatcaagagctttgaggagacctatgacaggaagctgaagaatgagctgctgaagtaccagctggagctgaaggatgactacatcatccgcaccaaccggctgattgaagatgagaggaagaacaaggagaaggctgtgcacctgcaggaggagctgattgccatcaacagcaagaaggaggagctgaaccagagcgtgaacagagtgaaggagctggagctggagctggagagcgtgaaggcccagagcctggccatcaccaagcagaaccacatgctgaatgagaaggtgaaggagatgtctgactacagcctgctgaaggaggagaagctggagctgctggcccagaacaagctgctgaagcagcagctggaggagagcagaaatgaaaacctgcggctgctgaaccggctggcccagcctgcccctgagctggccgtgttccagaaggagctgaggaaggccgagaaggccatcgtggtggagcacgaggagtttgagagctgccggcaggccctgcacaagcagctgcaggatgaaattgagcacagcgcccagctgaaggcccagatcctgggctacaaggcctctgtgaagagcctgaccacccaggtggccgacctgaagctgcagctgaagcagacccagacagccctggagaatgaggtgtactgcaaccccaagcagagcgtcatcgacagatctgtgaatggcctcatcaatggaaatgtggtgccctgcaatggagagatcagcggggacttcctgaacaaccccttcaagcaggagaatgtgctggccaggatggtggccagccgcatcaccaactaccccacagcctgggtggagggcagcagcccagacagcgacctggagtttgtggccaacaccaaggcccgggtgaaggagctgcagcaggaggccgagcggctggagaaggccttccgcagctaccaccggcgggtcatcaagaacagcgccaagagccccctggccgccaagagcccccccagcctgcacctgctggaggccttcaagaacatcaccagcagcagccctgagcggcacatctttggagaggacagagtggtgtctgagcagccccaggtgggcaccctggaggagagaaatgatgtggtggaggccctgaccggcagcgctgccagccggctgcggggcggcaccagcagccggcggctgagcagcacccccctgcccaaggccaagaggagcctggagagcgagatgtacctggagggcctgggccgcagccacatcgccagccccagcccctgcccagacaggatgcccctgcccagccccacagagagccgccacagcctgagcatcccccctgtgagcagccccccagagcagaaggtgggcctgtaccgccggcagacagagctgcaggacaagtctgagttcagtgatgtggacaagctggccttcaaggacaatgaggagtttgagagcagctttgagagcgctggcaacatgccccggcagctggagatgggcggcctgagccctgctggggacatgagccacgtggatgctgctgctgctgctgtgcccctgagctaccagcaccccagcgtggaccagaagcagatcgaggagcagaaggaggaggagaagatccgggagcagcaggtgaaggagcggcggcagcgggaggagcggcggcagagcaacctgcaggaggtgctggagcgggagcggcgggagctggagaagctgtaccaggagaggaagatgattgaggagagcctgaagatcaagatcaagaaggagctggagatggagaatgagctggagatgagcaaccaggagatcaaggacaagagcgcccacagcgagaaccccctggagaagtacatgaagatcatccagcaggagcaggaccaggagagcgctgacaagagcagcaagaagatggtgcaggagggcagcctggtggacaccctgcagagcagtgacaaggtggagagcctgaccggcttcagccatgaggagctggatgacagctggtag

SEQ ID NO: 139507 - DNA, 1104 bp, Artificial Sequence
  derived and/or modified sequence
atgatggcccagagcaacatgttcaccgtggctgatgtgctgagccaggatgagctgaggaagaagctgtaccagaccttcaaggaccggggcatcctggacaccctgaagacccagctgaggaaccagctgatccacgagctgatgcaccctgtgctgagcggggagctgcagcccaggagcatctctgtggagggcagcagcctgctgattggagccagcaacagcctggtggccgaccacctgcagagatgtggctatgagtacagcctgagcgtcttcttccctgagagcggcctggccaaggagaaggtgttcaccatgcaggacctgctgcagctgatcaagatcaaccccaccagcagcctgtacaagagcctggtgtctggcagtgacaaggagaaccagaagggcttcctgatgcacttcctgaaggagctggccgagtaccaccaggccaaggagagctgcaacatggagacccagaccagcagcaccttcaacagagacagcctggccgagaagctgcagctgattgatgaccagtttgctgatgcctacccccagaggatcaagtttgagagcctggagatcaagctgaatgagtacaagcgggagattgaggagcagctgcgggcagagatgtgccagaagctgaagttcttcaaggacacagaaattgccaagatcaagatggaggccaagaagaagtatgagaaggagctgaccatgttccagaatgactttgagaaggcctgccaggccaagtctgaggccctggtgctgcgggagaagagcaccctggagcgcatccacaagcaccaggagattgagaccaaggagatctatgcccagaggcagctgctgctgaaggacatggacctgctgcggggccgggaggccgagctgaagcagagggtggaggcctttgagctgaaccagaagctgcaggaggagaagcacaagagcatcacagaggccctgcggcggcaggagcagaacatcaagagctttgaggagacctatgacaggaagctgaagaatgagctgctgaacttccaccggctgcatggagtgtgcctggccctgggcatcctgatctag

SEQ ID NO: 139508 - DNA, 3039 bp, Artificial Sequence
  derived and/or modified sequence
atgatggcccagagcaacatgttcaccgtggccgacgtgctgagccaggatgagcttaggaagaagttataccagacattcaaagataggggcatcctcgatactttgaaaacacaactgcggaatcaactgatccatgagcttatgcaccccgtgctcagcggcgaactgcaaccgaggagtatttcggttgagggctccagccttctaattggtgcctccaacagtctagtggctgatcacctgcagcgatgtgggtacgaatattccctgtctgtgttttttcccgaaagcggactggcgaaggagaaagttttcactatgcaagacctcctccaactgattaaaatcaatcctacatcctccctctacaaaagcctggtgtctggatctgacaaagagaatcagaaaggcttcctgatgcattttttgaaagaactggctgagtaccatcaagcgaaggagagctgtaacatggagacccagacctcaagcacgtttaatcgggatagtctcgctgagaaacttcagctgatcgacgaccagtttgcggatgcatatcctcagcggatcaaattcgagagcttagagatcaagctcaacgagtacaagcgggagatcgaagagcagttacgggccgagatgtgccagaagctcaagttctttaaggacacggaaatcgctaaaatcaaaatggaggccaagaagaagtacgagaaagagctgaccatgttccaaaatgacttcgagaaggcctgtcaggcaaagtccgaagctcttgttctgagagagaaatctaccttagagaggattcataaacaccaagagatagagactaaagagatctacgctcagaggcaactcttgcttaaggacatggatctgcttaggggccgtgaggccgaactcaaacaaagggttgaagccttcgagcttaatcagaagctgcaagaagaaaagcacaaaagcatcactgaagccctgcgccgccaggagcagaatatcaagtcctttgaagaaacatatgatagaaagctgaagaatgagctgctgaagtaccagttggagctcaaggacgactacatcatacgaacaaatcgccttatcgaggacgaacggaaaaacaaggaaaaagcggtgcacttacaagaagagctcatagcaatcaacagcaagaaagaagaactgaaccagagcgtcaaccgggttaaggaactggaactcgaactcgagtccgtgaaggcccagtctctggccatcaccaaacagaaccatatgttgaacgagaaagtgaaggagatgtccgactattctctgttaaaggaggagaagctggaattgctggctcaaaataagctgcttaagcaacagctggaagagagccggaacgagaacctgcggctactgaataggctcgcccaacccgcacccgagctcgcagtattccagaaggaactacgcaaggctgagaaggcaattgttgtggagcatgaggagtttgagagttgtcggcaagctctgcataaacaactgcaagatgagattgaacactcggcacaactcaaagcccaaatactgggctataaagcctccgtgaaaagcctgaccacccaggtggctgatctgaaattgcagctcaaacagacacagacggcactggagaacgaggtttattgcaatcccaagcagagcgtgattgaccggagtgttaacggactcatcaacgggaacgtcgtaccatgtaatggtgaaatcagcggcgacttcctcaacaatcccttcaaacaggagaacgttctcgcacggatggtggcctcccgtatcactaactaccctactgcctgggttgaaggttcatcccccgatagtgacctcgaatttgttgctaacaccaaagccagagtcaaagaattacaacaagaagccgagcgactggagaaggccttcagatcctatcatagacgcgtgattaagaattctgccaagtcaccactcgcggctaagagccctccttctctgcatctgctagaagctttcaagaatattacatcctcttcacccgaaagacacatcttcggggaggaccgagtggtgagcgaacagccacaagtgggcactctggaggagcgaaatgatgttgtcgaggcgctaacgggttctgccgctagtaggttacgcgggggtacaagctcacggagattatcaagcacgcccctacccaaagcaaagcgcagtctggagtccgaaatgtatctggaggggcttgggaggtcacacatcgcatcaccctcaccatgcccagaccgcatgccactgccaagcccaacagagagtaggcacagcttgagtatacccccggtctcctcgccccccgaacagaaggtaggactctacaggaggcagaccgagctccaggataaatcagaattttccgatgtggacaagctcgcgtttaaagataacgaagagttcgaatcatcatttgagagtgccgggaatatgcctaggcagttggagatggggggcctctctcctgcgggcgacatgtcacacgtggatgccgcagcagcagctgtccctctgtcctaccagcacccctctgtagatcaaaagcagatagaggagcagaaggaggaagaaaaaataagggaacagcaggtgaaggagcggcgacagcgggaggagcgccggcaatcaaatcttcaggaggtgctggagcgagaaagaagagagctcgaaaagctctatcaagaacgcaagatgatcgaagagtcactcaagatcaagattaaaaaggaactcgagatggagaacgagcttgagatgagcaaccaggaaatcaaggacaagtccgcccattccgagaatcccttggaaaaatacatgaagattatccagcaggaacaggaccaagagtccgcggacaaatcaagcaaaaagatggtgcaggagggatcgttggtggacaccttacagagctcagacaaagtggagtccctcactggcttttcacatgaggaacttgacgactcttggtag

SEQ ID NO: 139509 - DNA, 1104 bp, Artificial Sequence
  derived and/or modified sequence
atgatggcccagagcaacatgttcaccgtggccgacgtgctgagccaggatgagctgcgcaagaaattgtatcagaccttcaaggacaggggaatcctagacaccctgaagacgcagctccgtaatcagctcatccacgaactgatgcacccagtcttgagcggcgaactgcaacctcgaagtatttccgtcgaaggtagctctctgttgattggcgcctccaatagtctcgtggcagatcacttgcagcggtgtggatacgagtattcactgtcggtcttcttccccgagtctggcctggctaaagagaaagtctttacaatgcaagacctcctccaattgattaaaatcaatcccacctcctcactatacaagtcccttgtctcaggctccgacaaagaaaatcagaagggatttcttatgcactttctcaaggagctagctgaatatcaccaggccaaagagagctgtaatatggaaacccagacaagttccacattcaacagagattccctggccgagaagctgcagctgattgacgaccaattcgcagacgcctacccgcagcgcatcaaatttgagagtttagagattaagttgaatgaatataaaagggaaatcgaggagcagcttcgcgcagaaatgtgtcaaaagttgaagttcttcaaggatactgagattgccaagattaagatggaagccaagaaaaaatacgaaaaggagctcactatgtttcagaacgattttgagaaagcctgccaagccaaaagtgaagccctggtgctgcgcgagaagagcacgctggagcggatccataaacatcaggaaatcgaaacaaaagagatttatgcacagcgccagttgttgctcaaggacatggatctgctccgcggccgcgaagcggagcttaagcagcgagtggaggctttcgagctgaaccagaaactgcaggaggagaagcataagagcatcaccgaagctctgcgtcggcaggagcagaatatcaaatcctttgaggaaacgtacgaccggaagttgaagaacgaattgctgaatttccatagattgcacggggtctgcttagctctgggtattcttatatag

SEQ ID NO: 139510 - DNA, 3611 bp, Artificial Sequence
  derived and/or modified sequence
cggactggctgtgaggcggtcctgcctcgctgccttcagtccctagtgtctgggtccccgccctccagccgcctttgagtcgtgcctgggtcctcgcccttgcctcagaaccgcgaagaaaggaagctcgcgtgtttgctagaaaacctagttgggagtgcgaggcagagaacgttcagcacctttgttcctcccgaaccctcgggacagaggcagggttctgagggcagggattccccctcgtcttggccccaccgcccgggctgggcactaaactcgggccgcggcggggcgagcgaggcgggctccggagggagctgacgcctgatgatggcgcagtccaacatgtttaccgtggctgatgtgttgagtcaagatgaactgcgcaaaaagctataccagacgtttaaggatcggggtatactggatacactcaagacacaacttcgaaaccagctaattcatgagttgatgcaccctgtattgagtggagaactgcagcctcggtccatttcagtagaagggagctccctcttaataggcgcctctaactctttagtggcagatcacttacaaagatgtggctatgaatattcactttctgttttctttccagaaagtggtttggcaaaagaaaaggtatttactatgcaggatctattacaactcattaaaatcaaccctacttccagtctctacaaatcactggtttcaggatctgataaagaaaatcaaaaaggttttcttatgcattttttaaaagaattggcagaatatcatcaagctaaagagagttgtaatatggaaactcagacaagttcgacatttaacagagattctctggctgagaagcttcagcttattgatgatcagtttgcagatgcttaccctcagcgtatcaagttcgaatctttagaaataaagctaaatgagtataagagagaaatagaagagcaacttcgggcagaaatgtgtcaaaagttgaagttttttaaagataccgagatagcaaaaattaaaatggaagcaaaaaaaaagtatgaaaaggagttaaccatgttccagaatgattttgaaaaagcttgtcaagcaaaatctgaagctctcgttcttcgggaaaagagtacccttgaaagaattcacaagcaccaagagattgaaacaaaagaaatttatgctcaaaggcaacttttactaaaagatatggatttgctaagaggaagagaagcagagctgaagcaaagagttgaagcttttgaattgaaccagaagctccaggaagaaaaacataaaagcataactgaggcacttaggagacaggagcagaatataaagagttttgaggagacctatgaccgaaagctcaagaatgaacttctaaagtatcaacttgaactgaaggatgactacatcattagaactaatcgactgattgaagatgaaaggaagaataaagaaaaagctgttcatttgcaagaggagctcatagctattaattcaaaaaaggaggaactcaatcaatctgtaaatcgtgtgaaagaacttgagcttgaattagagtctgtcaaagcccagtctttggcaataacaaaacaaaaccatatgctgaatgaaaaggttaaagagatgagtgattattcactactaaaagaagagaaactggagcttctggcacaaaataaattacttaaacaacaactggaagagagtagaaatgaaaacctgcgtctcctaaaccgcctagctcagccggctcctgaacttgcagtctttcagaaagaactacggaaagccgaaaaggctatagtggttgagcatgaggagttcgaaagctgcaggcaagctctgcacaaacaactgcaagacgaaattgagcattctgcacagctgaaggcccagattctaggttacaaagcttctgtaaagagtttaactactcaggttgccgatttaaaattgcaactgaagcaaactcagacagccctagagaatgaagtgtactgcaatccaaagcagtctgtgatcgatcgttctgtcaatggattaataaatggcaatgtggtgccttgcaatggtgagataagtggggatttcttgaacaatccttttaaacaggaaaacgttctagcacgtatggttgcatcaaggatcacaaattatccaactgcatgggtggagggtagttcccctgattctgaccttgagtttgtagccaatactaaggcaagggtcaaagagcttcagcaagaggccgaacgcttggaaaaggctttcagaagttaccatcggagagtcattaaaaactctgccaaaagcccactagcagcaaagagcccaccatctctgcacttgctggaagccttcaaaaacattacttccagttccccggaaagacatatttttggagaggacagagttgtctctgagcagcctcaagtgggcacacttgaagaaaggaatgacgtcgtggaagcactgacaggcagtgcagcctcgaggctccgcgggggcacttcctccagacgcctctcttccacaccccttccaaaagcaaaaagaagcctcgaaagtgaaatgtatctggaaggtctgggcagatcacacattgcttcccccagtccttgtcctgacagaatgcccctaccatcacccactgagtctaggcacagcctctccatccctcctgtctccagccctccggagcagaaagtgggtctttatcgaagacaaactgaacttcaagacaaaagtgaattttcagatgtggacaagctagcttttaaggataatgaggagtttgaatcatcttttgaatctgcagggaacatgccaaggcagttggaaatgggcgggctttctcctgccggggatatgtctcatgtggacgctgctgcagctgctgtgcccctctcatatcagcacccaagtgtagatcagaaacaaattgaagaacaaaaggaagaagaaaaaatacgggaacagcaagtgaaagaacgaaggcagagagaagaaagaaggcagagtaacctacaagaagttttagaaagggaacgaagagaactagaaaaactgtatcaggaaaggaagatgattgaagaatcactgaagattaaaataaaaaaggaattagaaatggaaaatgaattagaaatgagtaatcaagaaataaaagacaaatctgctcacagtgaaaatcctttagagaaatacatgaaaatcatccagcaggagcaagaccaggagtcggcagataagagctcaaaaaagatggtccaagaaggctccctagtggacacgctgcaatctagtgacaaagtcgaaagtttaacaggcttttctcatgaagaactagacgactcttggtaaccatgtttgctgcccagcttctaacttacataccgtgagaagttacgtaacatttactcctttgtaaatgtttccctatcatcagacaaaactcaataaaaatgtgtgtaatccaatgtgggtttttttttccataattaattttgataccatagtgtgtgaaccaagaataatctagtcacgtgaaacctcttctccagtcatagtatttctcattcattataataaaagtaactggcttttaa

SEQ ID NO: 139511 - DNA, 1597 bp, Artificial Sequence
  derived and/or modified sequence
ttccggaagttgccggactggctgtgaggcggtcctgcctcgctgccttcagtccctagtgtctgggtccccgccctccagccgcctttgagtcgtgcctgggtcctcgcccttgcctcagaaccgcgaagaaaggaagctcgcgtgtttgctagaaaacctagttgggagtgcgaggcagagaacgttcagcacctttgttcctcccgaaccctcgggacagaggcagggttctgagggcagggattccccctcgtcttggccccaccgcccgggctgggcactaaactcgggccgcggcggggcgagcgaggcgggctccggagggagctgacgcctgatgatggcgcagtccaacatgtttaccgtggctgatgtgttgagtcaagatgaactgcgcaaaaagctataccagacgtttaaggatcggggtatactggatacactcaagacacaacttcgaaaccagctaattcatgagttgatgcaccctgtattgagtggagaactgcagcctcggtccatttcagtagaagggagctccctcttaataggcgcctctaactctttagtggcagatcacttacaaagatgtggctatgaatattcactttctgttttctttccagaaagtggtttggcaaaagaaaaggtatttactatgcaggatctattacaactcattaaaatcaaccctacttccagtctctacaaatcactggtttcaggatctgataaagaaaatcaaaaaggttttcttatgcattttttaaaagaattggcagaatatcatcaagctaaagagagttgtaatatggaaactcagacaagttcgacatttaacagagattctctggctgagaagcttcagcttattgatgatcagtttgcagatgcttaccctcagcgtatcaagttcgaatctttagaaataaagctaaatgagtataagagagaaatagaagagcaacttcgggcagaaatgtgtcaaaagttgaagttttttaaagataccgagatagcaaaaattaaaatggaagcaaaaaaaaagtatgaaaaggagttaaccatgttccagaatgattttgaaaaagcttgtcaagcaaaatctgaagctctcgttcttcgggaaaagagtacccttgaaagaattcacaagcaccaagagattgaaacaaaagaaatttatgctcaaaggcaacttttactaaaagatatggatttgctaagaggaagagaagcagagctgaagcaaagagttgaagcttttgaattgaaccagaagctccaggaagaaaaacataaaagcataactgaggcacttaggagacaggagcagaatataaagagttttgaggagacctatgaccgaaagctcaagaatgaacttctaaacttccacaggctgcatggtgtctgcctggctttgggaatcctcatatgactttggcaggtgttggagtttggaggctcttcgccacaggagtgcttctatttccttttggaaccaaaagggcagctggtaacagctgggaaagggaagtgaaactgtgaaaatgtgccttttggtattgctaatccggatataatgctcttg

SEQ ID NO: 139512 - DNA, 3039 bp, Artificial Sequence
  derived and/or modified sequence
atgatggcacagtctaatatgttcactgtcgccgatgtcttgagccaagatgagctcagaaagaagctctaccagaccttcaaggaccgcggaatcctggacaccttgaagactcaacttcgcaatcaactgatccacgagctgatgcaccctgtattgtctggtgaactgcagccgaggagcatttcggtggagggatctagtctgctgatcggagcttctaattctttggttgccgatcacctccaacggtgtggctatgagtacagcttaagcgtgtttttcccggagagtggtctggcgaaggaaaaagtgtttactatgcaggatctgctgcaattgattaaaataaatcccacttcatctctgtacaagagcttagtgagcggttcggataaggagaaccagaaggggttcctgatgcactttctgaaagagttagcagagtatcatcaggccaaggaaagttgtaatatggagactcagacttcgagcacgtttaatcgcgactcactggctgagaagttgcagctgatagatgaccagtttgcggacgcctatcctcagagaattaagttcgaaagcctcgagatcaagctcaatgaatataaaagggagatcgaggaacagttacgcgcagaaatgtgtcaaaaactgaagtttttcaaggacaccgaaattgcaaaaatcaagatggaagccaagaagaaatacgaaaaggaattaacgatgtttcaaaacgatttcgaaaaagcttgccaagcaaaatctgaagctctggttctgcgggagaagtccacgctggagagaatacacaaacaccaggaaattgaaactaaagagatctatgcccagcggcagctcctgttaaaagatatggacctgcttaggggaagagaggcagaactgaagcagagagtggaggcttttgaactaaatcagaaactccaggaagagaaacacaagtcaattactgaagctctccggagacaggaacagaatataaaatcctttgaagagacctacgaccggaagctgaagaacgagttgttgaaatatcagctcgagctgaaagatgattacattatccgaaccaatcgcttgatagaggacgagcgaaaaaacaaggaaaaagctgtgcaccttcaagaagaacttattgccatcaattccaagaaggaagagctcaatcagtcagtcaatagagtcaaagaacttgagctggaattggagagtgtgaaggcccagagtttggccatcactaagcaaaaccatatgttaaatgagaaggtgaaggagatgtcagattattcattgcttaaagaagagaagctcgagctcctagctcagaataagctcctcaagcagcagctcgaggagtctaggaatgagaatcttcgcctgctgaataggcttgcccagcctgccccagagctagccgtgttccagaaagaacttcggaaggccgagaaagctatagtggttgaacacgaagaattcgagtcatgcagacaggctcttcacaaacaactccaagacgaaattgaacattctgcccagctaaaagcccagatccttggttacaaagctagcgtcaaatcacttacgactcaggtggcagacttgaaactgcagttaaagcagacccagaccgccctggagaacgaagtgtactgtaacccgaaacagagcgtaattgatagatcagttaacggcttgattaacggcaacgtggttccttgcaacggcgagatttccggagattttctcaacaaccccttcaagcaggagaacgtgctcgcccgtatggtggcctccaggattacaaactacccaaccgcctgggtggagggatcttcacctgactccgacttggaattcgtggcaaataccaaggcaagagtaaaagaactgcagcaggaagctgagaggctagaaaaagccttccgatcttaccacagacgagtgattaaaaactccgcgaagagccctttggccgcaaagtccccaccatccctccacctcctcgaggcctttaaaaatataacctcttctagcccagaacggcacatctttggcgaagacagggtggtgagcgaacagccgcaagtcggcaccttggaagaaaggaatgatgtcgtcgaagctttgacaggatccgccgcatccaggctgagaggaggtacaagctcccggagattgagttcaactcccttacccaaagctaaacgatctctggaatccgagatgtacctggaggggttaggcaggagtcatattgcctccccatccccttgcccagatcgtatgcccctgccgtctcccaccgagtctcgtcactccctgtccatcccgccagtttcgagtccccctgagcaaaaggttgggctgtaccgtcgacaaaccgaattacaggacaagagcgagttctctgacgttgacaagttggccttcaaagacaatgaggagtttgaaagcagtttcgagtccgcgggtaatatgccccgacaactcgagatgggaggtttatcacctgccggtgacatgtcccatgtagacgcagcagccgcagccgtgcctcttagctaccagcacccaagcgtcgaccaaaaacagattgaggagcagaaggaggaggagaagatccgagagcaacaggtgaaggagcggcgacaacgcgaagaaagacggcagagcaatcttcaggaagtgctggaacgtgaacggagagaacttgaaaaactgtatcaggagcgtaagatgattgaagagagtctgaaaattaaaattaagaaagagttggagatggaaaatgagctggagatgagtaatcaagaaattaaagacaagtccgcccatagtgaaaaccccttggagaagtatatgaaaatcattcagcaagaacaggaccaggaatcagccgataaatctagcaagaaaatggtccaggaaggtagtttggtggatacactacagagttccgataaggtagaatctctcactggattctcccatgaggaactggacgactcctggtag

SEQ ID NO: 139513 - DNA, 1104 bp, Artificial Sequence
  derived and/or modified sequence
atgatggctcagagtaacatgtttaccgtggccgatgtgctgtcccaggatgaactccggaagaaattataccagacttttaaagatcgaggcatcttagacaccttgaaaactcaactacgcaatcagctgatccatgaactgatgcatcccgtgctttctggcgaactgcagcctaggagtatttctgtggagggatcctcactgcttataggtgcaagcaattccctggttgccgatcacttgcagcgatgcgggtacgaatactcactgtccgttttttttcctgaatcaggccttgccaaggaaaaagtgtttacaatgcaggatctattacagttgatcaagatcaaccctacatcttccctctataaaagcctcgtttcgggcagtgataaagaaaatcagaaaggtttcctcatgcactttctcaaagaattagcggagtatcatcaggcaaaggaaagctgcaacatggaaacacagacaagctcaacgttcaatcgcgatagcctggccgaaaagctgcagcttatcgatgaccaattcgcagacgcctaccctcagcgaatcaagtttgagtccctagaaatcaagttgaatgaatacaagcgcgagattgaagaacagctccgggctgaaatgtgtcagaaactgaaattcttcaaggacaccgaaatcgctaaaatcaagatggaagcaaaaaagaagtacgagaaggaactcacaatgtttcagaatgattttgaaaaggcctgccaggctaaatcagaggccttggtgctcagggagaagtctacactggagagaatacacaagcatcaagagattgaaactaaggagatctacgctcagagacagctgctacttaaggacatggatctcctgagaggtcgcgaggctgaattaaaacagcgtgtagaggcatttgaattgaaccaaaaactgcaggaggagaaacataaaagcataaccgaagcactgagacgccaagagcagaacattaaatcctttgaggaaacctacgatagaaaactgaaaaatgagctgttaaacttccataggctccacggtgtctgcttggctctggggatattaatctag

SEQ ID NO: 139514 - DNA, 3039 bp, Artificial Sequence
  derived and/or modified sequence
atgatggcccagagcaacatgttcaccgtggccgacgtgctgagccaggacgagctgagaaagaagctgtaccagaccttcaaggacagaggcatcctggacaccctgaagacccagctgagaaaccagctgatccacgagctgatgcaccccgtgctgagcggcgagctgcagcccagaagcatcagcgtggagggcagcagcctgctgatcggcgccagcaacagcctggtggccgaccacctgcagagatgcggctacgagtacagcctgagcgtgttcttccccgagagcggcctggccaaggagaaggtgttcaccatgcaggacctgctgcagctgatcaagatcaaccccaccagcagcctgtacaagagcctggtgagcggcagcgacaaggagaaccagaagggcttcctgatgcacttcctgaaggagctggccgagtaccaccaggccaaggagagctgcaacatggagacccagaccagcagcaccttcaacagagacagcctggccgagaagctgcagctgatcgacgaccagttcgccgacgcctacccccagagaatcaagttcgagagcctggagatcaagctgaacgagtacaagagagagatcgaggagcagctgagagccgagatgtgccagaagctgaagttcttcaaggacaccgagatcgccaagatcaagatggaggccaagaagaagtacgagaaggagctgaccatgttccagaacgacttcgagaaggcctgccaggccaagagcgaggccctggtgctgagagagaagagcaccctggagagaatccacaagcaccaggagatcgagaccaaggagatctacgcccagagacagctgctgctgaaggacatggacctgctgagaggcagagaggccgagctgaagcagagagtggaggccttcgagctgaaccagaagctgcaggaggagaagcacaagagcatcaccgaggccctgagaagacaggagcagaacatcaagagcttcgaggagacctacgacagaaagctgaagaacgagctgctgaagtaccagctggagctgaaggacgactacatcatcagaaccaacagactgatcgaggacgagagaaagaacaaggagaaggccgtgcacctgcaggaggagctgatcgccatcaacagcaagaaggaggagctgaaccagagcgtgaacagagtgaaggagctggagctggagctggagagcgtgaaggcccagagcctggccatcaccaagcagaaccacatgctgaacgagaaggtgaaggagatgagcgactacagcctgctgaaggaggagaagctggagctgctggcccagaacaagctgctgaagcagcagctggaggagagcagaaacgagaacctgagactgctgaacagactggcccagcccgcccccgagctggccgtgttccagaaggagctgagaaaggccgagaaggccatcgtggtggagcacgaggagttcgagagctgcagacaggccctgcacaagcagctgcaggacgagatcgagcacagcgcccagctgaaggcccagatcctgggctacaaggccagcgtgaagagcctgaccacccaggtggccgacctgaagctgcagctgaagcagacccagaccgccctggagaacgaggtgtactgcaaccccaagcagagcgtgatcgacagaagcgtgaacggcctgatcaacggcaacgtggtgccctgcaacggcgagatcagcggcgacttcctgaacaaccccttcaagcaggagaacgtgctggccagaatggtggccagcagaatcaccaactaccccaccgcctgggtggagggcagcagccccgacagcgacctggagttcgtggccaacaccaaggccagagtgaaggagctgcagcaggaggccgagagactggagaaggccttcagaagctaccacagaagagtgatcaagaacagcgccaagagccccctggccgccaagagcccccccagcctgcacctgctggaggccttcaagaacatcaccagcagcagccccgagagacacatcttcggcgaggacagagtggtgagcgagcagccccaggtgggcaccctggaggagagaaacgacgtggtggaggccctgaccggcagcgccgccagcagactgagaggcggcaccagcagcagaagactgagcagcacccccctgcccaaggccaagagaagcctggagagcgagatgtacctggagggcctgggcagaagccacatcgccagccccagcccctgccccgacagaatgcccctgcccagccccaccgagagcagacacagcctgagcatcccccccgtgagcagcccccccgagcagaaggtgggcctgtacagaagacagaccgagctgcaggacaagagcgagttcagcgacgtggacaagctggccttcaaggacaacgaggagttcgagagcagcttcgagagcgccggcaacatgcccagacagctggagatgggcggcctgagccccgccggcgacatgagccacgtggacgccgccgccgccgccgtgcccctgagctaccagcaccccagcgtggaccagaagcagatcgaggagcagaaggaggaggagaagatcagagagcagcaggtgaaggagagaagacagagagaggagagaagacagagcaacctgcaggaggtgctggagagagagagaagagagctggagaagctgtaccaggagagaaagatgatcgaggagagcctgaagatcaagatcaagaaggagctggagatggagaacgagctggagatgagcaaccaggagatcaaggacaagagcgcccacagcgagaaccccctggagaagtacatgaagatcatccagcaggagcaggaccaggagagcgccgacaagagcagcaagaagatggtgcaggagggcagcctggtggacaccctgcagagcagcgacaaggtggagagcctgaccggcttcagccacgaggagctggacgacagctggtag

SEQ ID NO: 139515 - DNA, 1104 bp, Artificial Sequence
  derived and/or modified sequence
atgatggcccagagcaacatgttcaccgtggccgacgtgctgagccaggacgagctgagaaagaagctgtaccagaccttcaaggacagaggcatcctggacaccctgaagacccagctgagaaaccagctgatccacgagctgatgcaccccgtgctgagcggcgagctgcagcccagaagcatcagcgtggagggcagcagcctgctgatcggcgccagcaacagcctggtggccgaccacctgcagagatgcggctacgagtacagcctgagcgtgttcttccccgagagcggcctggccaaggagaaggtgttcaccatgcaggacctgctgcagctgatcaagatcaaccccaccagcagcctgtacaagagcctggtgagcggcagcgacaaggagaaccagaagggcttcctgatgcacttcctgaaggagctggccgagtaccaccaggccaaggagagctgcaacatggagacccagaccagcagcaccttcaacagagacagcctggccgagaagctgcagctgatcgacgaccagttcgccgacgcctacccccagagaatcaagttcgagagcctggagatcaagctgaacgagtacaagagagagatcgaggagcagctgagagccgagatgtgccagaagctgaagttcttcaaggacaccgagatcgccaagatcaagatggaggccaagaagaagtacgagaaggagctgaccatgttccagaacgacttcgagaaggcctgccaggccaagagcgaggccctggtgctgagagagaagagcaccctggagagaatccacaagcaccaggagatcgagaccaaggagatctacgcccagagacagctgctgctgaaggacatggacctgctgagaggcagagaggccgagctgaagcagagagtggaggccttcgagctgaaccagaagctgcaggaggagaagcacaagagcatcaccgaggccctgagaagacaggagcagaacatcaagagcttcgaggagacctacgacagaaagctgaagaacgagctgctgaacttccacagactgcacggcgtgtgcctggccctgggcatcctgatctag

SEQ ID NO: 139516 - protein, 666 aa, Artificial Sequence
  derived and/or modified sequence
MTPPPPGRAAPSAPRARVPGPPARLGLPLRLRLLLLLWAAAASAQGHLRSGPRIFAVWKGHVGQDRVDFGQTEPHTVLFHEPGSSSVWVGGRGKVYLFDFPEGKNASVRTVNIGSTKGSCLDKRDCENYITLLERRSEGLLACGTNARHPSCWNLVNGTVVPLGEMRGYAPFSPDENSLVLFEGDEVYSTIRKQEYNGKIPRFRRIRGESELYTSDTVMQNPQFIKATIVHQDQAYDDKIYYFFREDNPDKNPEAPLNVSRVAQLCRGDQGGESSLSVSKWNTFLKAMLVCSDAATNKNFNRLQDVFLLPDPSGQWRDTRVYGVFSNPWNYSAVCVYSLGDIDKVFRTSSLKGYHSSLPNPRPGKCLPDQQPIPTETFQVADRHPEVAQRVEPMGPLKTPLFHSKYHYQKVAVHRMQASHGETFHVLYLTTDRGTIHKVVEPGEQEHSFAFNIMEIQPFRRAAAIQTMSLDAERRKLYVSSQWEVSQVPLDLCEVYGGGCHGCLMSRDPYCGWDQGRCISIYSSERSVLQSINPAEPHKECPNPKPDKAPLQKVSLAPNSRYYLSCPMESRHATYSWRHKENVEQSCEPGHQSPNCILFIENLTAQQYGHYFCEAQEGSYFREAQHWQLLPEDGIMAEHLLGHACALAASLWLGVLPTLTLGLLVH

SEQ ID NO: 139517 - DNA, 2001 bp, Artificial Sequence
  derived and/or modified sequence
atgactccccctccacctgggagggccgctccaagtgcgccaagagctagagtgcctggtcctcctgcacgcctgggactgccacttcgactgaggctcctgctgcttctctgggcagccgcggcttctgcccagggccacttgcgctccggtccccgtatttttgcagtctggaagggtcatgttgggcaggaccgcgtggacttcgggcaaaccgagccacacactgtgctgttccacgaaccgggaagcagctcggtttgggtgggtggacgcggcaaggtttatctcttcgatttccctgaaggaaaaaacgcctctgttagaacagttaatataggaagcactaaaggttcttgcttggacaagagggattgtgagaactacataaccttgctggagagacgaagcgagggcctgttggcttgcggaaccaatgcgaggcacccaagctgttggaacctggttaacggaactgtggttcccctgggggaaatgagggggtacgcaccatttagccccgacgagaacagtttagtcttattcgaaggagatgaggtgtacagcacaattcgtaaacaggaatacaacggtaagatccctagatttcgcagaattcggggggaaagcgaactgtacacaagcgataccgtaatgcaaaatccacagtttattaaggccaccattgttcatcaggatcaggcttacgatgacaaaatttactacttttttcgtgaagacaacccggacaagaaccccgaagccccgctcaacgtgagtagggtcgcgcaattgtgccgtggcgatcagggtggggaatcctcactctcggtgtcaaagtggaacacctttctcaaagctatgctggtgtgttccgacgcggctacaaacaaaaatttcaacagactccaagacgtcttcctattacccgatccatccggccagtggagggacacaagagtgtatggagtgtttagcaatccttggaactatagtgctgtttgtgtatattctcttggggatatcgacaaggtgtttcgaaccagcagcctgaaggggtatcactcctccctgccaaaccctcgccctgggaagtgcctacctgaccagcagccaatccccacggagaccttccaggtggctgaccggcatcccgaagtggcacagcgcgttgaacctatgggccctctgaagactccgctgttccactcaaaatatcattatcagaaggtggccgtacaccgtatgcaggcaagccacggtgagaccttccatgttctgtacttgacgacagaccgcgggacaatacacaaagtcgtcgaacccggcgaacaggagcattcgttcgctttcaacattatggagattcagccgttccgccgcgcagcagcaattcagaccatgagcctggatgcagagcgccggaagctgtacgtgagtagtcagtgggaagtgagccaggtacctctggacctctgtgaggtgtacggaggcgggtgtcacggttgcctcatgtctagagatccgtactgcggctgggatcagggccgatgtattagcatttatagctccgaaagaagtgtgttgcaatcgattaatccagctgagcctcacaaggagtgtcctaatcccaagccagacaaggcccccctacagaaggttagcctggctcctaattccaggtactatctttcctgtccgatggaaagcaggcatgccacttactcctggcgacataaggagaatgtggagcagagttgcgagcctgggcaccaatctcctaattgtattctgtttatcgagaatctaacagcccagcagtatggccattatttctgtgaagcccaggaagggtcatactttcgtgaggcacaacactggcaactgctgccagaagacggcataatggcagagcaccttctggggcacgcttgcgcactcgcagcgtcactgtggctaggagtgctgcctaccctcaccctggggttattagtccactag

SEQ ID NO: 139518 - DNA, 1506 bp, Artificial Sequence
  derived and/or modified sequence
atgcgtggctacgcgccgttcagcccggacgagaactcattggtgttgtttgagggcgacgaggtttacagtaccatcaggaagcaggaatacaatggcaagatcccaaggtttaggcgtattcggggagagtccgaactgtacactagcgacacagtcatgcaaaatccccagttcattaaggctaccatcgtccatcaggatcaggcttacgacgacaagatctattatttcttccgagaggataaccctgacaagaaccccgaagctccactgaatgtctccagggtggcacagctgtgcaggggtgatcagggaggcgagagtagtttaagcgtgtccaagtggaacacttttctcaaggcaatgctcgtttgctccgatgctgcaactaataaaaactttaacaggctccaagacgtctttctcctgccagatccttccggacagtggcgtgacacgcgtgtatacggtgtattctctaacccctggaattacagcgcagtgtgcgtgtactccttgggagatatagacaaggtcttcaggacgtctagcctgaaaggctaccactccagcctccccaatccccgacccgggaaatgcctcccagaccaacagcctatccccacggagacattccaggtggctgatcggcacccagaagtggcacagcgggtggagcccatgggtccactgaaaacgccattatttcactcgaaataccactaccagaaggtggctgtgcaccggatgcaggcatctcacggagaaacctttcatgttctttacctgacaaccgatcgaggcaccatccacaaagtggtggaacccggtgaacaggaacactcttttgcgttcaatatcatggagatccagcccttcagaagggccgcggccatccagacaatgtcattggatgccgagagacggaagctgtacgtgagttcacaatgggaagtctcacaggtccccctcgacctgtgtgaagtgtacggtggcggatgtcacggctgcctcatgagtcgcgacccctattgcggctgggaccagggcaggtgtatctcaatctactctagtgagaggagcgtcctgcaaagcattaaccccgccgagccccataaagagtgcccaaaccctaagcctgataaagccccgctgcaaaaagtcagcctcgcccccaattcacggtactacctatcttgtcctatggagtcaagacacgctacatattcgtggagacacaaagagaacgttgagcagtcttgcgaacccggccaccaaagccccaactgtattctgttcatcgaaaacctgacggcacaacagtacggccactacttctgcgaggcccaggagggatcctattttagggaggcccagcattggcagttgctgccagaagatggtattatggctgaacatctattaggacatgcttgcgctctggctgccagcctgtggctgggcgtgttgcctaccctgactcttggccttctcgtgcattag

SEQ ID NO: 139519 - DNA, 2001 bp, Artificial Sequence
  derived and/or modified sequence
atgaccccacctcctcctggccgggccgcccccagcgccccccgggcccgggtgcccggccccccagcccggctgggcctgcccctgcggctgcggctgctgctgctgctgtgggccgctgctgccagcgcccagggccacctgcggagcggcccccgcatctttgctgtgtggaagggccacgtgggccaggacagagtggactttggccagacagagccccacacagtgctcttccacgagcccggcagcagctctgtgtgggtgggcggccggggcaaggtgtacctgtttgacttccctgagggcaagaatgcctctgtgaggacagtgaacatcggcagcaccaagggcagctgcctggacaagagggactgtgagaactacatcaccctgctggagaggagaagtgagggcctgctggcctgtggcaccaatgcccggcaccccagctgctggaacctggtgaatggaacagtggtgcccctgggggagatgaggggctacgcccccttctccccagatgagaacagcctggtgctgtttgaaggagatgaggtgtacagcaccatcaggaagcaggagtacaacgggaagatcccccgcttccgccgcatccggggggagagcgagctgtacaccagtgacacagtgatgcagaacccccagttcatcaaggccaccatcgtgcaccaggaccaggcctatgatgacaagatctactacttcttccgggaggacaacccagacaagaaccctgaggcccccctgaatgtgtcccgggtggcccagctgtgccgcggggaccagggcggggagagcagcctgtctgtgtccaagtggaacaccttcctgaaggccatgctggtgtgcagtgatgctgccaccaacaagaacttcaaccggctgcaggatgtgttcctgctgcctgaccccagcggccagtggagggacaccagggtgtatggagtcttcagcaacccctggaactacagcgctgtgtgtgtgtacagcctgggggacatcgacaaggtgttccgcaccagcagcctgaagggctaccacagcagcctgcccaaccccaggcctgggaagtgcctgcctgaccagcagcccatccccacagagaccttccaggtggccgacagacaccctgaggtggcccagagggtggagcccatgggccccctgaagacccccctcttccacagcaagtaccactaccagaaggtggccgtgcacaggatgcaggccagccacggggagaccttccacgtgctgtacctgaccacagaccggggcaccatccacaaggtggtggagcccggggagcaggagcacagctttgccttcaacatcatggagatccagcccttccggcgggctgctgccatccagaccatgagcctggatgctgagaggaggaagctgtatgtgagcagccagtgggaggtgtcccaggtgcccctggacctgtgtgaggtgtatggaggcggctgccacggctgcctgatgagccgggacccctactgcggctgggaccagggccgctgcatcagcatctacagcagcgagaggtctgtgctgcagagcatcaacccagctgagccccacaaggagtgccccaaccccaagccagacaaggcccccctgcagaaggtgtccctggcccccaacagccgctactacctgagctgccccatggagagcagacatgccacctacagctggaggcacaaggaaaatgtggagcagagctgtgagcccggccaccagagccccaactgcatcctcttcatcgagaacctgacagcccagcagtatggccactacttctgtgaggcccaggagggcagctacttccgggaggcccagcactggcagctgctgcctgaagatggcatcatggccgagcacctgctgggccacgcctgtgccctggccgccagcctgtggctgggcgtgctgcccaccctgaccctgggcctgctggtgcactag

SEQ ID NO: 139520 - DNA, 1506 bp, Artificial Sequence
  derived and/or modified sequence
atgaggggctacgcccccttctccccagatgagaacagcctggtgctgtttgaaggagatgaggtgtacagcaccatcaggaagcaggagtacaacgggaagatcccccgcttccgccgcatccggggggagagcgagctgtacaccagtgacacagtgatgcagaacccccagttcatcaaggccaccatcgtgcaccaggaccaggcctatgatgacaagatctactacttcttccgggaggacaacccagacaagaaccctgaggcccccctgaatgtgtcccgggtggcccagctgtgccgcggggaccagggcggggagagcagcctgtctgtgtccaagtggaacaccttcctgaaggccatgctggtgtgcagtgatgctgccaccaacaagaacttcaaccggctgcaggatgtgttcctgctgcctgaccccagcggccagtggagggacaccagggtgtatggagtcttcagcaacccctggaactacagcgctgtgtgtgtgtacagcctgggggacatcgacaaggtgttccgcaccagcagcctgaagggctaccacagcagcctgcccaaccccaggcctgggaagtgcctgcctgaccagcagcccatccccacagagaccttccaggtggccgacagacaccctgaggtggcccagagggtggagcccatgggccccctgaagacccccctcttccacagcaagtaccactaccagaaggtggccgtgcacaggatgcaggccagccatggagagaccttccacgtgctgtacctgaccacagaccggggcaccatccacaaggtggtggagcctggagagcaggagcacagctttgccttcaacatcatggagatccagcccttcagaagagctgctgccatccagaccatgagcctggatgctgagaggaggaagctgtatgtgagcagccagtgggaggtgtcccaggtgcccctggacctgtgtgaggtgtatggaggcggctgccacggctgcctgatgagccgggacccctactgcggctgggaccagggccgctgcatcagcatctacagcagcgagaggtctgtgctgcagagcatcaacccagctgagccccacaaggaatgtcccaaccccaagccagacaaggcccccctgcagaaggtgtccctggcccccaacagccgctactacctgagctgccccatggagagcagacatgccacctacagctggaggcacaaggaaaatgtggagcagagctgtgagcccggccaccagagccccaactgcatcctcttcatcgagaacctgacagcccagcagtatggccactacttctgtgaggcccaggagggcagctacttccgggaggcccagcactggcagctgctgcctgaagatggcatcatggccgagcacctgctgggccacgcctgtgccctggccgccagcctgtggctgggcgtgctgcccaccctgaccctgggcctgctggtgcactag

SEQ ID NO: 139521 - DNA, 2001 bp, Artificial Sequence
  derived and/or modified sequence
atgaccccccccccccccggccgggccgcccccagcgccccccgggctagagtacccggcccccctgcccgtttaggtctgccgttgaggttaagactgcttctgttactctgggccgctgctgcttcagcccaagggcacctgcgatcagggccccgaatttttgccgtttggaaaggccatgtgggtcaggacagggtggactttggacagacagaacctcatacggtcctgtttcacgagcccggctccagctctgtgtgggtggggggaagagggaaagtgtatctgtttgatttccctgagggcaaaaacgcctcggtccggaccgtgaacattggttccaccaagggatcatgcctggataagagagactgcgagaattatatcacccttttagaaagacgctctgaaggacttctggcctgcggcaccaacgcccgccacccaagttgttggaatctggtgaacggaacagtggtcccgttaggcgaaatgcgcggttacgcccctttttcccccgacgagaactctctcgtgttatttgagggagatgaggtgtattccacaattcgtaagcaagagtataatggcaaaattcctaggttccgcaggatccgcggggagtccgaactgtacacttctgacaccgtcatgcaaaacccccagtttatcaaagccacgattgtgcaccaggatcaggcatatgatgacaagatttattactttttccgagaagataacccagacaaaaaccctgaggctcctctgaacgtatccagggtggcacagctgtgtagaggggaccaggggggtgagtctagtctgagcgtcagcaagtggaacacatttttaaaggccatgctggtctgtagtgacgccgctaccaacaagaactttaaccggctacaggatgttttcttgctccccgatccctcgggccagtggagagatactagggtatatggcgtcttctccaatccttggaactactccgctgtgtgcgtgtacagccttggcgacatagacaaggtcttcagaacttcctctttaaaaggataccacagcagcctccccaatccgaggcccggaaagtgcctccctgaccagcagcccatccctacggagaccttccaagtggcagaccggcatcctgaggtcgcacagagagtggagcccatgggacctctgaaaacccctttgttccacagcaaatatcattaccagaaagtcgccgtgcacagaatgcaggcaagccatggggaaacctttcatgtactctacctcactactgatagaggcactatccataaggtcgttgaacccggggagcaagagcacagttttgcattcaacattatggagatccagcctttccggcgagccgctgctatccagacaatgagcctggacgctgaaaggcggaagctttacgtgagttcccagtgggaggtttcacaggtgcccttagacctctgcgaggtctacggcggcggctgccacggctgcttgatgtctcgcgacccctactgtggatgggaccagggtaggtgtattagcatctactcatcggagaggagtgtgctgcagtcaatcaatcccgccgagccacacaaagagtgcccaaatccgaaaccagacaaagcgccattgcagaaggtctcattggcacccaactcacgctactatctttcatgcccaatggagagcagacacgcaacatactcttggaggcacaaggagaatgttgaacagtcctgtgaacccgggcaccagtcacccaattgcattcttttcatcgaaaacttaacggctcagcagtacggtcactatttctgcgaggcccaagaaggatcctacttccgggaagcacagcactggcagctcctgccagaggatggcatcatggcggagcacctgctcggccacgcctgcgccttggcagcctctttgtggctcggagtgctgcctacactgactttgggtctgctagtacactag

SEQ ID NO: 139522 - DNA, 1506 bp, Artificial Sequence
  derived and/or modified sequence
atgcggggctacgcccccttcagccccgacgagaacagcctggtgctttttgaaggcgatgaagtgtactccactattcgtaaacaagagtataacggcaagataccccggtttcgacggatcaggggcgaaagtgaactgtatacatctgataccgtgatgcagaacccacagtttattaaagccaccatcgtgcaccaagaccaggcctacgatgataaaatttactacttcttccgcgaggataaccccgataaaaatcccgaggccccactgaacgtctcccgggttgcccaattgtgccgcggtgaccaaggaggtgagtcgtcactgagtgtctctaaatggaacactttcttgaaggctatgctagtgtgtagcgatgccgccactaacaagaactttaaccgcctccaggacgtgttcttgctgccggacccctcgggccagtggcgggacacccgcgtgtacggcgtgttttctaatccatggaattactccgctgtttgtgtgtattccctcggcgacatagacaaagttttcagaacatcgtctcttaagggctatcattcctccctgccgaaccctaggcctggcaaatgtcttcccgatcaacagccaattcctaccgaaactttccaggtcgctgacagacaccctgaggtggcccagcgcgtggaaccaatgggccctctgaaaaccccgctgttccatagcaaataccactaccagaaggttgccgtgcaccgcatgcaggcctctcacggggagacttttcacgtactctatctaacaacggacaggggcacaattcacaaagttgtggaacctggggaacaagaacacagttttgcattcaacataatggaaatccagccttttaggcgggccgcagctattcaaacgatgagcctggacgcagaacgacgcaaactgtacgtaagcagccaatgggaagtttcccaggtccccctggacctttgcgaggtgtatggaggaggctgccatggatgcttaatgtcgagggacccttattgcgggtgggaccaaggaaggtgcatttccatctattcttcagagcggtcagtgttacagtctatcaaccctgccgagcctcataaagagtgtcctaaccccaaaccggataaagctcccctgcagaaagtgagcctcgctccaaacagccgttactacttaagctgcccaatggaatcacggcatgcaacatattcctggcgacataaggagaacgttgagcagagctgcgaaccaggccatcagagtcccaattgcatcctgtttatagaaaacctgacagcacagcagtacggacattacttctgtgaggctcaggagggtagctattttcgcgaggctcagcactggcagctgctccccgaggacggcattatggccgaacacctattaggacatgcctgcgcattggcagctagtctgtggctaggcgtcttgcccacactcacactggggcttctcgtgcattag

SEQ ID NO: 139523 - DNA, 2001 bp, Artificial Sequence
  derived and/or modified sequence
atgacaccacctccgccaggcagggctgcacccagcgctccgagagcacgggtccccggtcctccagccagattaggcctcccgctccggctccgtctactgctactcctctgggccgctgctgcctccgcccagggtcacctgcgtagtgggccacggatcttcgcagtctggaagggccatgtggggcaggaccgagtcgatttcggccaaacggaacctcacacggttctgttccatgaacccggatcatccagcgtgtgggtgggcggaaggggaaaggtatacctcttcgacttcccggagggaaaaaacgcctctgtgcgcaccgtgaatattggaagcaccaaggggtcatgtctggataaaagagactgtgagaattacattacccttctagagagaaggagcgagggactccttgcttgtggtactaacgcgagacatccatcgtgctggaatctggtgaatggcaccgttgtccccctgggcgaaatgagaggctatgcccctttctctccagacgaaaattccctggtgctgttcgagggcgacgaagtatattctaccattagaaagcaagagtataatggtaaaatcccccgttttcgtcgcattcggggagaaagtgaactatatacatctgacacagtcatgcagaatcctcagtttattaaagctacaattgtgcaccaggaccaggcttacgacgacaagatttattatttctttcgcgaggataaccctgacaagaatcccgaagcccctctgaatgtgagcagggttgcacagctctgtcgcggtgatcagggaggcgaatcatccctctctgtctcgaagtggaatactttcttgaaggccatgcttgtctgttcagatgcagcgaccaacaagaactttaacagactgcaagacgtgtttctcttgcccgatccatctggacagtggagagacacccgcgtctatggagtgttctctaatccgtggaactactctgctgtttgtgtgtattctctgggggacattgacaaggtgttcaggacaagttcgttgaagggctaccactcgtcattacccaaccccaggcccggtaagtgcctgcccgatcagcaacctatcccaacagagaccttccaggtggcagatagacatcctgaggtcgcccagcgagtggagccgatgggtccactgaaaactccactatttcactctaagtaccactaccaaaaggtagctgtccacaggatgcaggcttctcacggcgagactttccatgtgttatatctgactactgaccgaggcaccatccataaggtcgtggaacccggagaacaggaacactcctttgccttcaatattatggagatccagcccttccggcgagccgctgcgatccaaactatgtccctcgacgcagagaggcggaaactgtacgtgagctcccagtgggaagtttctcaggtgccactcgacctttgcgaggtgtatggcggagggtgccatggatgcttaatgtccagagatccctattgcggatgggaccagggcagatgcatctctatctatagtagcgaacgatcagtactgcagagcataaatcctgccgaacctcacaaggagtgtcctaacccaaagccagacaaagctcctctgcagaaagtgtcactggccccaaattcccggtactacctgtcctgcccaatggagagtcgtcatgccacctatagttggcggcacaaagagaatgtggaacaaagctgcgagccaggtcaccaaagccctaattgtatactgtttatcgagaatctgacagcccaacagtacggccactacttttgcgaagctcaggagggatcttacttccgcgaggctcagcactggcagctgttaccagaagatggtattatggcagagcacttgttgggacatgcttgcgctctggccgcatctctctggctgggcgtcctgcccacccttacacttgggctcctggtccattag

SEQ ID NO: 139524 - DNA, 1506 bp, Artificial Sequence
  derived and/or modified sequence
atgaggggttatgctccattttctcccgacgaaaactcccttgtactgtttgagggggatgaggtctactccactatacggaaacaggagtacaacggcaagatacctcgctttagacgcattagaggggagagcgagctgtatacctcggataccgtgatgcagaatccgcagtttatcaaggccaccattgtacaccaggaccaagcatatgatgacaaaatttattatttcttcagagaggacaacccggacaagaaccctgaggcaccactgaatgttagtcgggtggcccagctatgcagaggcgaccagggaggagaatcttctctgagtgtcagtaaatggaacacgtttctaaaagctatgcttgtgtgcagtgatgccgctacaaacaaaaattttaaccggttgcaggatgttttcttactgcctgacccgtccggccaatggagggatacccgcgtctacggagtcttctctaacccttggaactacagtgcagtgtgtgtgtacagccttggggatatagataaggtcttccgcacgtcttctctgaaggggtatcattcttcactcccaaatccaagacctgggaaatgtctgcccgaccaacagccgatcccgacggagacatttcaggttgcagacaggcacccggaggtcgcccagcgcgtggagcctatggggcctctgaaaactcccttgtttcacagtaagtatcactaccagaaagtggccgttcaccgcatgcaggcaagccatggcgagactttccacgtcctttacctcaccacagaccggggaaccatccacaaggtggtggagccaggtgagcaggaacattctttcgctttcaacatcatggagattcagccttttagacgggctgcagctatccagaccatgagcctggacgccgagcggagaaaactgtacgtttcttctcagtgggaggtctcccaggtgccgctggacctgtgcgaagtttatggaggcggttgtcatggttgcctgatgtctcgtgacccttactgcggctgggaccagggtaggtgcatttcgatctactcctccgaacgctcggtgctacagagcatcaatccagcggaaccgcataaagaatgtcctaacccaaaacctgataaagcaccattgcaaaaggtgagcctggcacctaactcccggtattacttgagctgtcctatggagtcgagacacgcaacgtactcatggagacacaaggagaacgtggagcagagttgcgagccgggacaccagagccccaactgcattctgttcatcgagaacttgacagcccaacaatatggccattatttttgcgaggcccaggaaggaagctacttcagggaggcccagcactggcagctactgccagaagatggaatcatggctgaacacttactgggacacgcctgcgccttggcagctagcctctggctaggagtccttcctaccctgactctgggactactggttcactag

SEQ ID NO: 139525 - DNA, 3377 bp, Artificial Sequence
  derived and/or modified sequence
cagtctcggctgattgccgctgtcgctcccggggccacgggatgacgcctcctccgcccggacgtgccgcccccagcgcaccgcgcgcccgcgtccctggcccgccggctcggttggggcttccgctgcggctgcggctgctgctgctgctctgggcggccgccgcctccgcccagggccacctaaggagcggaccccgcatcttcgccgtctggaaaggccatgtagggcaggaccgggtggactttggccagactgagccgcacacggtgcttttccacgagccaggcagctcctctgtgtgggtgggaggacgtggcaaggtctacctctttgacttccccgagggcaagaacgcatctgtgcgcacggtgaatatcggctccacaaaggggtcctgtctggataagcgggactgcgagaactacatcactctcctggagaggcggagtgaggggctgctggcctgtggcaccaacgcccggcaccccagctgctggaacctggtgaatggcactgtggtgccacttggcgagatgagaggctacgcccccttcagcccggacgagaactccctggttctgtttgaaggggacgaggtgtattccaccatccggaagcaggaatacaatgggaagatccctcggttccgccgcatccggggcgagagtgagctgtacaccagtgatactgtcatgcagaacccacagttcatcaaagccaccatcgtgcaccaagaccaggcttacgatgacaagatctactacttcttccgagaggacaatcctgacaagaatcctgaggctcctctcaatgtgtcccgtgtggcccagttgtgcaggggggaccagggtggggaaagttcactgtcagtctccaagtggaacacttttctgaaagccatgctggtatgcagtgatgctgccaccaacaagaacttcaacaggctgcaagacgtcttcctgctccctgaccccagcggccagtggagggacaccagggtctatggtgttttctccaacccctggaactactcagccgtctgtgtgtattccctcggtgacattgacaaggtcttccgtacctcctcactcaagggctaccactcaagccttcccaacccgcggcctggcaagtgcctcccagaccagcagccgatacccacagagaccttccaggtggctgaccgtcacccagaggtggcgcagagggtggagcccatggggcctctgaagacgccattgttccactctaaataccactaccagaaagtggccgtccaccgcatgcaagccagccacggggagacctttcatgtgctttacctaactacagacaggggcactatccacaaggtggtggaaccgggggagcaggagcacagcttcgccttcaacatcatggagatccagcccttccgccgcgcggctgccatccagaccatgtcgctggatgctgagcggaggaagctgtatgtgagctcccagtgggaggtgagccaggtgcccctggacctgtgtgaggtctatggcgggggctgccacggttgcctcatgtcccgagacccctactgcggctgggaccaaggccgctgcatctccatctacagctccgaacggtcagtgctgcaatccattaatccagccgagccacacaaggagtgtcccaaccccaaaccagacaaggccccactgcagaaggtttccctggccccaaactctcgctactacctgagctgccccatggaatcccgccacgccacctactcatggcgccacaaggagaacgtggagcagagctgcgaacctggtcaccagagccccaactgcatcctgttcatcgagaacctcacggcgcagcagtacggccactacttctgcgaggcccaggagggctcctacttccgcgaggctcagcactggcagctgctgcccgaggacggcatcatggccgagcacctgctgggtcatgcctgtgccctggccgcctccctctggctgggggtgctgcccacactcactcttggcttgctggtccactagggcctcccgaggctgggcatgcctcaggcttctgcagcccagggcactagaacgtctcacactcagagccggctggcccgggagctccttgcctgccacttcttccaggggacagaataacccagtggaggatgccaggcctggagacgtccagccgcaggcggctgctgggccccaggtggcgcacggatggtgaggggctgagaatgagggcaccgactgtgaagctggggcatcgatgacccaagactttatcttctggaaaatatttttcagactcctcaaacttgactaaatgcagcgatgctcccagcccaagagcccatgggtcggggagtgggtttggataggagagctgggactccatctcgaccctggggctgaggcctgagtccttctggactcttggtacccacattgcctccttcccctccctctctcatggctgggtggctggtgttcctgaagacccagggctaccctctgtccagccctgtcctctgcagctccctctctggtcctgggtcccacaggacagccgccttgcatgtttattgaaggatgtttgctttccggacggaaggacggaaaaagctctatttttatgttaggcttatttcatgtatagctacttccgactgcatctgtatgaaaataccaaaactacatgcgggggggtgggtgggaaagggaggggctgggaagggatgggttggggagcgggggtgatcccagtctgaggctcccggggatgagataagagtctggagacgggcatgggttcttggagagtggcatgagctggctctgccctgggagcccggtctgagggggacgttgttggagcccctagtgttgggggtggttatgggagggggtggggtgagggaaacgggagaatgaaggagaaaactgagccctagtttcaccgtgttcatttggaaggacgagccgggtcctcagggggaggttccaggactctgcccttggcgttgagggttggggggcggggggcctcctcccttcctctcagcccccttccccaggggctgtgcttccatgctcctagcctcccaccttcgctcaggacatgttataacttaggctaaactgtgaaaattccggtggggatggcctgggccgagctctccaggcaggcggccctgcccccagccctgtccatccatttcaggggggagctgggcccttctccggctgtgtctggccacccagggcagtggctggggccagtggccttccagctttggcccctgcacctcttctcaatgcactttaataatgtaacatattactaataaacaagctatttattta

SEQ ID NO: 139526 - DNA, 3228 bp, Artificial Sequence
  derived and/or modified sequence
agtgcgtgcgcgcagctctgcgggtcccgggctgtccccgcgctgtccccgcgtggagcgtgtgggtttgggccatgtagggcaggaccgggtggactttggccagactgagccgcacacggtgcttttccacgagccaggcagctcctctgtgtgggtgggaggacgtggcaaggtctacctctttgacttccccgagggcaagaacgcatctgtgcgcacggtgaatatcggctccacaaaggggtcctgtctggataagcgggactgcgagaactacatcactctcctggagaggcggagtgaggggctgctggcctgtggcaccaacgcccggcaccccagctgctggaacctggtgaatggcactgtggtgccacttggcgagatgagaggctacgcccccttcagcccggacgagaactccctggttctgtttgaaggggacgaggtgtattccaccatccggaagcaggaatacaatgggaagatccctcggttccgccgcatccggggcgagagtgagctgtacaccagtgatactgtcatgcagaacccacagttcatcaaagccaccatcgtgcaccaagaccaggcttacgatgacaagatctactacttcttccgagaggacaatcctgacaagaatcctgaggctcctctcaatgtgtcccgtgtggcccagttgtgcaggggggaccagggtggggaaagttcactgtcagtctccaagtggaacacttttctgaaagccatgctggtatgcagtgatgctgccaccaacaagaacttcaacaggctgcaagacgtcttcctgctccctgaccccagcggccagtggagggacaccagggtctatggtgttttctccaacccctggaactactcagccgtctgtgtgtattccctcggtgacattgacaaggtcttccgtacctcctcactcaagggctaccactcaagccttcccaacccgcggcctggcaagtgcctcccagaccagcagccgatacccacagagaccttccaggtggctgaccgtcacccagaggtggcgcagagggtggagcccatggggcctctgaagacgccattgttccactctaaataccactaccagaaagtggccgtccaccgcatgcaagccagccacggggagacctttcatgtgctttacctaactacagacaggggcactatccacaaggtggtggaaccgggggagcaggagcacagcttcgccttcaacatcatggagatccagcccttccgccgcgcggctgccatccagaccatgtcgctggatgctgagcggaggaagctgtatgtgagctcccagtgggaggtgagccaggtgcccctggacctgtgtgaggtctatggcgggggctgccacggttgcctcatgtcccgagacccctactgcggctgggaccaaggccgctgcatctccatctacagctccgaacggtcagtgctgcaatccattaatccagccgagccacacaaggagtgtcccaaccccaaaccagacaaggccccactgcagaaggtttccctggccccaaactctcgctactacctgagctgccccatggaatcccgccacgccacctactcatggcgccacaaggagaacgtggagcagagctgcgaacctggtcaccagagccccaactgcatcctgttcatcgagaacctcacggcgcagcagtacggccactacttctgcgaggcccaggagggctcctacttccgcgaggctcagcactggcagctgctgcccgaggacggcatcatggccgagcacctgctgggtcatgcctgtgccctggccgcctccctctggctgggggtgctgcccacactcactcttggcttgctggtccactagggcctcccgaggctgggcatgcctcaggcttctgcagcccagggcactagaacgtctcacactcagagccggctggcccgggagctccttgcctgccacttcttccaggggacagaataacccagtggaggatgccaggcctggagacgtccagccgcaggcggctgctgggccccaggtggcgcacggatggtgaggggctgagaatgagggcaccgactgtgaagctggggcatcgatgacccaagactttatcttctggaaaatatttttcagactcctcaaacttgactaaatgcagcgatgctcccagcccaagagcccatgggtcggggagtgggtttggataggagagctgggactccatctcgaccctggggctgaggcctgagtccttctggactcttggtacccacattgcctccttcccctccctctctcatggctgggtggctggtgttcctgaagacccagggctaccctctgtccagccctgtcctctgcagctccctctctggtcctgggtcccacaggacagccgccttgcatgtttattgaaggatgtttgctttccggacggaaggacggaaaaagctctatttttatgttaggcttatttcatgtatagctacttccgactgcatctgtatgaaaataccaaaactacatgcgggggggtgggtgggaaagggaggggctgggaagggatgggttggggagcgggggtgatcccagtctgaggctcccggggatgagataagagtctggagacgggcatgggttcttggagagtggcatgagctggctctgccctgggagcccggtctgagggggacgttgttggagcccctagtgttgggggtggttatgggagggggtggggtgagggaaacgggagaatgaaggagaaaactgagccctagtttcaccgtgttcatttggaaggacgagccgggtcctcagggggaggttccaggactctgcccttggcgttgagggttggggggcggggggcctcctcccttcctctcagcccccttccccaggggctgtgcttccatgctcctagcctcccaccttcgctcaggacatgttataacttaggctaaactgtgaaaattccggtggggatggcctgggccgagctctccaggcaggcggccctgcccccagccctgtccatccatttcaggggggagctgggcccttctccggctgtgtctggccacccagggcagtggctggggccagtggccttccagctttggcccctgcacctcttctcaatgcactttaataatgtaacatattactaataaacaagctatttattt

SEQ ID NO: 139527 - DNA, 2001 bp, Artificial Sequence
  derived and/or modified sequence
atgaccccccccccccccggcagagccgcccccagcgcccccagagccagagtgcccggcccccccgccagactgggcctgcccctgagactgagactgctgctgctgctgtgggccgccgccgccagcgcccagggccacctgagaagcggccccagaatcttcgccgtgtggaagggccacgtgggccaggacagagtggacttcggccagaccgagccccacaccgtgctgttccacgagcccggcagcagcagcgtgtgggtgggcggcagaggcaaggtgtacctgttcgacttccccgagggcaagaacgccagcgtgagaaccgtgaacatcggcagcaccaagggcagctgcctggacaagagagactgcgagaactacatcaccctgctggagagaagaagcgagggcctgctggcctgcggcaccaacgccagacaccccagctgctggaacctggtgaacggcaccgtggtgcccctgggcgagatgagaggctacgcccccttcagccccgacgagaacagcctggtgctgttcgagggcgacgaggtgtacagcaccatcagaaagcaggagtacaacggcaagatccccagattcagaagaatcagaggcgagagcgagctgtacaccagcgacaccgtgatgcagaacccccagttcatcaaggccaccatcgtgcaccaggaccaggcctacgacgacaagatctactacttcttcagagaggacaaccccgacaagaaccccgaggcccccctgaacgtgagcagagtggcccagctgtgcagaggcgaccagggcggcgagagcagcctgagcgtgagcaagtggaacaccttcctgaaggccatgctggtgtgcagcgacgccgccaccaacaagaacttcaacagactgcaggacgtgttcctgctgcccgaccccagcggccagtggagagacaccagagtgtacggcgtgttcagcaacccctggaactacagcgccgtgtgcgtgtacagcctgggcgacatcgacaaggtgttcagaaccagcagcctgaagggctaccacagcagcctgcccaaccccagacccggcaagtgcctgcccgaccagcagcccatccccaccgagaccttccaggtggccgacagacaccccgaggtggcccagagagtggagcccatgggccccctgaagacccccctgttccacagcaagtaccactaccagaaggtggccgtgcacagaatgcaggccagccacggcgagaccttccacgtgctgtacctgaccaccgacagaggcaccatccacaaggtggtggagcccggcgagcaggagcacagcttcgccttcaacatcatggagatccagcccttcagaagagccgccgccatccagaccatgagcctggacgccgagagaagaaagctgtacgtgagcagccagtgggaggtgagccaggtgcccctggacctgtgcgaggtgtacggcggcggctgccacggctgcctgatgagcagagacccctactgcggctgggaccagggcagatgcatcagcatctacagcagcgagagaagcgtgctgcagagcatcaaccccgccgagccccacaaggagtgccccaaccccaagcccgacaaggcccccctgcagaaggtgagcctggcccccaacagcagatactacctgagctgccccatggagagcagacacgccacctacagctggagacacaaggagaacgtggagcagagctgcgagcccggccaccagagccccaactgcatcctgttcatcgagaacctgaccgcccagcagtacggccactacttctgcgaggcccaggagggcagctacttcagagaggcccagcactggcagctgctgcccgaggacggcatcatggccgagcacctgctgggccacgcctgcgccctggccgccagcctgtggctgggcgtgctgcccaccctgaccctgggcctgctggtgcactag

SEQ ID NO: 139528 - DNA, 1506 bp, Artificial Sequence
  derived and/or modified sequence
atgagaggctacgcccccttcagccccgacgagaacagcctggtgctgttcgagggcgacgaggtgtacagcaccatcagaaagcaggagtacaacggcaagatccccagattcagaagaatcagaggcgagagcgagctgtacaccagcgacaccgtgatgcagaacccccagttcatcaaggccaccatcgtgcaccaggaccaggcctacgacgacaagatctactacttcttcagagaggacaaccccgacaagaaccccgaggcccccctgaacgtgagcagagtggcccagctgtgcagaggcgaccagggcggcgagagcagcctgagcgtgagcaagtggaacaccttcctgaaggccatgctggtgtgcagcgacgccgccaccaacaagaacttcaacagactgcaggacgtgttcctgctgcccgaccccagcggccagtggagagacaccagagtgtacggcgtgttcagcaacccctggaactacagcgccgtgtgcgtgtacagcctgggcgacatcgacaaggtgttcagaaccagcagcctgaagggctaccacagcagcctgcccaaccccagacccggcaagtgcctgcccgaccagcagcccatccccaccgagaccttccaggtggccgacagacaccccgaggtggcccagagagtggagcccatgggccccctgaagacccccctgttccacagcaagtaccactaccagaaggtggccgtgcacagaatgcaggccagccacggcgagaccttccacgtgctgtacctgaccaccgacagaggcaccatccacaaggtggtggagcccggcgagcaggagcacagcttcgccttcaacatcatggagatccagcccttcagaagagccgccgccatccagaccatgagcctggacgccgagagaagaaagctgtacgtgagcagccagtgggaggtgagccaggtgcccctggacctgtgcgaggtgtacggcggcggctgccacggctgcctgatgagcagagacccctactgcggctgggaccagggcagatgcatcagcatctacagcagcgagagaagcgtgctgcagagcatcaaccccgccgagccccacaaggagtgccccaaccccaagcccgacaaggcccccctgcagaaggtgagcctggcccccaacagcagatactacctgagctgccccatggagagcagacacgccacctacagctggagacacaaggagaacgtggagcagagctgcgagcccggccaccagagccccaactgcatcctgttcatcgagaacctgaccgcccagcagtacggccactacttctgcgaggcccaggagggcagctacttcagagaggcccagcactggcagctgctgcccgaggacggcatcatggccgagcacctgctgggccacgcctgcgccctggccgccagcctgtggctgggcgtgctgcccaccctgaccctgggcctgctggtgcactag

SEQ ID NO: 139529 - protein, 1184 aa, Artificial Sequence
  derived and/or modified sequence
MVGTKAWVFSFLVLEVTSVLGRQTMLTQSVRRVQPGKKNPSIFAKPADTLESPGEWTTWFNIDYPGGKGDYERLDAIRFYYGDRVCARPLRLEARTTDWTPAGSTGQVVHGSPREGFWCLNREQRPGQNCSNYTVRFLCPPGSLRRDTERIWSPWSPWSKCSAACGQTGVQTRTRICLAEMVSLCSEASEEGQHCMGQDCTACDLTCPMGQVNADCDACMCQDFMLHGAVSLPGGAPASGAAIYLLTKTPKLLTQTDSDGRFRIPGLCPDGKSILKITKVKFAPIVLTMPKTSLKAATIKAEFVRAETPYMVMNPETKARRAGQSVSLCCKATGKPRPDKYFWYHNDTLLDPSLYKHESKLVLRKLQQHQAGEYFCKAQSDAGAVKSKVAQLIVIASDETPCNPVPESYLIRLPHDCFQNATNSFYYDVGRCPVKTCAGQQDNGIRCRDAVQNCCGISKTEEREIQCSGYTLPTKVAKECSCQRCTETRSIVRGRVSAADNGEPMRFGHVYMGNSRVSMTGYKGTFTLHVPQDTERLVLTFVDRLQKFVNTTKVLPFNKKGSAVFHEIKMLRRKKPITLEAMETNIIPLGEVVGEDPMAELEIPSRSFYRQNGEPYIGKVKASVTFLDPRNISTATAAQTDLNFINDEGDTFPLRTYGMFSVDFRDEVTSEPLNAGKVKVHLDSTQVKMPEHISTVKLWSLNPDTGLWEEEGDFKFENQRRNKREDRTFLVGNLEIRERRLFNLDVPESRRCFVKVRAYRSERFLPSEQIQGVVISVINLEPRTGFLSNPRAWGRFDSVITGPNGACVPAFCDDQSPDAYSAYVLASLAGEELQAVESSPKFNPNAIGVPQPYLNKLNYRRTDHEDPRVKKTAFQISMAKPRPNSAEESNGPIYAFENLRACEEAPPSAAHFRFYQIEGDRYDYNTVPFNEDDPMSWTEDYLAWWPKPMEFRACYIKVKIVGPLEVNVRSRNMGGTHRQTVGKLYGIRDVRSTRDRDQPNVSAACLEFKCSGMLYDQDRVDRTLVKVIPQGSCRRASVNPMLHEYLVNHLPLAVNNDTSEYTMLAPLDPLGHNYGIYTVTDQDPRTAKEIALGRCFDGTSDGSSRIMKSNVGVALTFNCVERQVGRQSAFQYLQSTPAQSPAAGTVQGRVPSRRQQRASRGGQRQGGVVASLRFPRVAQQPLIN

SEQ ID NO: 139530 - DNA, 3555 bp, Artificial Sequence
  derived and/or modified sequence
atggtgggcacaaaagcttgggtgttttcattcttggtgcttgaggtaacttcggtgttggggcgccagaccatgcttacccaaagtgtgcgcagagtgcagcctggcaagaagaacccctccatcttcgccaaacccgctgatactctagaatccccaggcgagtggaccacatggttcaatattgattaccccggcgggaaaggagactacgagcggctggatgctatcaggttttattacggcgaccgggtttgcgctcggccactgcgactggaggcccgtactacagactggacacccgctggatccacaggccaagtggtgcatggctcaccacgcgaaggattttggtgcctgaatcgagagcaacggcccgggcagaattgttccaactacacagtgaggtttctatgccctcccggaagcctgaggagggacacagagcggatttggagtccgtggtccccttggtctaagtgtagcgcggcttgtggacagacaggcgtgcagaccagaactcgcatatgtcttgctgagatggtgagcctctgctccgaagcgtccgaagaaggacaacactgtatggggcaagactgtactgcatgtgacctgacgtgccctatgggacaagtgaacgcagattgtgatgcttgtatgtgccaggactttatgctgcatggcgccgtttcactcccaggtggagcccctgctagcggagcggccatttatctactgactaagactccaaagcttctaactcagactgattcagacggacggtttcgcatccctggactatgtccagacgggaagtctatactgaagataacgaaggttaagtttgcgcccattgttctgacaatgcccaaaacctccttaaaggcagccacaatcaaggccgagtttgtcagagctgagacaccatatatggtgatgaatccggaaacaaaggcgagacgtgccggtcaatctgtctcgttatgttgcaaagccacggggaaacctcgtcctgataagtacttctggtaccataatgacaccctgttggatccgagcctttacaaacatgagagtaagctcgtacttaggaagctgcagcagcaccaggctggggagtatttctgcaaagcgcagagtgatgctggtgccgtcaaaagcaaagtggcccaactcatagtaatagcctccgatgagactccttgtaatccggtacccgagtcgtacttgattcgcctgccacatgactgcttccagaatgctacaaactccttttactacgacgtcggccggtgccccgtgaaaacttgtgccggacagcaggataacgggatcaggtgtcgagatgctgtccagaactgctgtggaataagcaaaaccgaggagagagagatccagtgtagtgggtatactctcccaacaaaggtggcaaaagagtgtagctgccagcggtgtactgaaacccggagtatagtgaggggtcgggtaagcgccgctgataacggcgagccaatgcggttcgggcacgtgtacatggggaacagcagggtaagtatgaccgggtacaaaggtacttttacgctacacgtcccgcaggatacggagcgccttgtgcttaccttcgtggatagattgcagaaattcgtgaacaccacaaaggtgctaccatttaataagaaagggtctgctgtgtttcatgagatcaagatgctcagacggaaaaagcctataaccttggaggctatggagacaaatattatccctctgggggaggttgtgggagaggacccaatggctgaactggagatcccgagtagaagcttctatcgccaaaatggcgagccgtacatcggcaaagtaaaagcttcggtgacttttctggatcccagaaatatttccaccgccactgcagcccaaacagacctgaattttattaacgacgaaggtgacacttttcctctgagaacatacggcatgttctccgtagatttccgggatgaagtgacatccgaacctctcaacgccggtaaagtgaaagtgcatctggacagcactcaggtaaagatgcctgagcacatctctacagtgaagctttggtccctgaaccccgataccggattatgggaggaagagggggactttaagttcgagaaccaacgtcgcaataaacgcgaagatcgcacatttctggtcggaaaccttgagatcagggagagaaggctattcaacctggatgtgcccgagtcccgccgctgcttcgtaaaggtccgggcttacagaagtgagcggtttctgccaagcgagcaaattcaaggtgtcgttatttcagtgatcaacctcgaaccgcgaaccggcttcctgtcgaacccccgtgcctggggacgatttgactccgtgatcacaggccccaacggtgcctgtgtacccgcgttctgtgacgaccagagtcctgatgcttattctgcgtatgttctggcaagcttggcaggggaggagttgcaggccgtggaaagttcccccaaattcaatccgaatgccattggggtccctcagccttaccttaataagctgaactaccgcaggaccgatcacgaagatcccagggttaaaaaaacagcctttcagattagcatggccaaaccgagaccaaattcagctgaggagagcaatggaccaatttacgccttcgaaaatctgagagcatgtgaagaggctccgccttcagctgcacacttccggttctatcaaatagaaggggacagatacgactacaacacagtgccctttaacgaggacgatcctatgtcctggacagaagattatctggcatggtggcctaaacctatggagttccgagcatgctacattaaagtgaaaatcgtcggaccattagaagttaacgtgagatctagaaacatgggggggacccatcgacagacagtggggaagctgtatggcattagagatgtccggtcaacacgggacagagaccagcccaatgtgagcgctgcctgcctagagttcaaatgttccgggatgctgtacgaccaagatagggtagacagaacactggtgaaggtgatccctcaaggtagttgtaggcgcgccagcgtgaaccccatgctgcatgagtatctcgtgaaccatctacctctggccgtgaacaatgatacaagtgaatacactatgctagcaccgctggaccctcttggacataactacgggatctacactgttactgatcaggatccgcggaccgctaaggagatcgccctgggacgctgtttcgatggtactagtgacggctcaagtaggataatgaaatctaatgtgggagtcgctctgaccttcaactgtgttgagaggcaggtgggcagacagagcgccttccagtacctgcagtctacccccgcccaatctccagccgcgggaaccgtacaggggagagtgccttcccggcgccagcagcgcgcgagccgaggcggccagcgccagggcggcgtggtggcctccttgagattcccgagagtcgcacaacaacctctgatcaactag

SEQ ID NO: 139531 - DNA, 3555 bp, Artificial Sequence
  derived and/or modified sequence
atggtgggcaccaaggcctgggtgttctccttcctggtgctggaggtgacctctgtgctgggccggcagaccatgctgacccagagcgtgagaagagtgcagcccgggaagaagaaccccagcatctttgccaagccagctgacaccctggagagccctggagagtggaccacctggttcaacatcgactacccaggcggcaagggggactatgagcggctggatgccatccgcttctactatggagacagagtgtgtgcccggcccctgcggctggaggcccggaccacagactggaccccagctggcagcacaggccaggtggtgcacggcagcccccgggagggcttctggtgcctgaaccgggagcagaggcctggccagaactgcagcaactacacagtgcgcttcctgtgccccccaggcagcctgcggcgggacacagagcgcatctggagcccctggagcccctggagcaagtgcagcgctgcctgtggccagacaggagtgcagaccaggacccgcatctgcctggccgagatggtgtccctgtgcagcgaggccagcgaggagggccagcactgcatgggccaggactgcacagcctgtgacctgacctgccccatgggccaggtgaatgctgactgtgatgcctgcatgtgccaggacttcatgctgcatggagctgtgtccctgcctggaggagccccagccagcggggccgccatctacctgctgaccaagacccccaagctgctgacccagacagacagtgatggccgcttccgcatccctggcctgtgcccagatggcaagagcatcctgaagatcaccaaggtgaagtttgcccccatcgtgctgaccatgcccaagaccagcctgaaggccgccaccatcaaggccgagtttgtgcgggcagagaccccctacatggtgatgaaccctgagaccaaggcccggcgggccggccagagcgtgtccctgtgctgcaaggccaccgggaagcccaggccagacaagtacttctggtaccacaatgacaccctgctggaccccagcctgtacaagcatgagagcaagctggtgctgaggaagctgcagcagcaccaggccggggagtacttctgcaaggcccagagtgatgctggagctgtgaagagcaaggtggcccagctgattgtgattgccagtgatgagaccccctgcaaccctgtgcctgagagctacctgatccggctgccccatgactgcttccagaatgccaccaacagcttctactatgatgtgggccgctgccctgtgaagacctgtgccggccagcaggacaatggcatccgctgcagagatgctgtgcagaactgctgcggcatcagcaagacagaggagcgggagatccagtgcagcggctacaccctgcccaccaaggtggccaaggaatgtagctgccagcgctgcacagagaccaggagcatcgtgcggggccgggtgtctgctgctgacaatggagagcccatgagatttggacatgtgtacatgggcaacagccgggtgtccatgacaggctacaagggcaccttcaccctgcacgtgccccaggacacagagcggctggtgctgacctttgtggaccggctgcagaagtttgtgaacaccaccaaggtgctgcccttcaacaagaagggcagcgctgtgttccacgagatcaagatgctgcggaggaagaagcccatcaccctggaggccatggagaccaacatcatccccctgggggaggtggtgggggaggaccccatggccgagctggagatccccagccgctccttctaccggcagaatggagagccctacatcggcaaggtgaaggcctctgtgaccttcctggaccccaggaacatcagcacagccacagctgcccagacagacctgaacttcatcaatgatgaaggagacaccttccccctgcggacctacggcatgttttctgtggacttcagagatgaggtgaccagcgagcccctgaatgccggcaaggtgaaggtgcacctggacagcacccaggtgaagatgcctgagcacatcagcacagtgaagctgtggagcctgaacccagacaccggcctgtgggaggaggagggggacttcaagtttgagaaccagaggaggaacaagcgggaggacaggaccttcctggtgggcaacctggagatccgggagaggaggctcttcaacctggatgtgcctgagagccgccgctgctttgtgaaggtgcgggcctacagaagtgagcgcttcctgcccagcgagcagatccagggcgtggtgatcagcgtcatcaacctggagcccaggacaggcttcctgagcaacccccgggcctggggccgctttgacagcgtcatcaccggccccaacggggcctgtgtgcctgccttctgtgatgaccagagcccagatgcctacagcgcctacgtgctggccagcctggccggggaggagctgcaggccgtggagagcagccccaagttcaaccccaatgccatcggcgtgccccagccctacctgaacaagctgaactacagaagaacagaccacgaggacccccgggtgaagaagacagccttccagatctccatggccaagccccggcccaacagcgctgaggagagcaatggccccatctatgcctttgagaacctgcgggcctgtgaggaggccccacccagcgctgcccacttccgcttctaccagattgaaggagacagatatgactacaacacagtgcccttcaatgaagatgaccccatgtcctggacagaggactacctggcctggtggcccaagcccatggagttccgggcctgctacatcaaggtgaagatcgtgggccccctggaggtgaatgtgcgcagcaggaacatgggcggcacccaccggcagacagtgggcaagctgtatggcatcagagatgtgcgcagcacccgggaccgggaccagcccaacgtgtctgctgcctgcctggagttcaagtgcagcggcatgctgtatgaccaggacagagtggacaggaccctggtgaaggtgatcccccagggcagctgccggcgggcctctgtgaaccccatgctgcacgagtacctggtgaaccacctgcccctggccgtgaacaatgacaccagcgagtacaccatgctggcccccctggaccccctgggccacaactacggcatctacacagtgacagaccaggaccccaggacagccaaggagatcgccctgggccgctgctttgatggcaccagtgatggcagcagccgcatcatgaagagcaatgtgggcgtggccctgaccttcaactgtgtggagcggcaggtgggccggcagagcgccttccagtacctgcagagcaccccagcccagagccctgctgctggcaccgtgcagggccgggtgcccagccggcggcagcagagggccagcagaggaggccagaggcagggcggcgtggtggccagcctgcgcttcccccgggtggcccagcagcccctcatcaactag

SEQ ID NO: 139532 - DNA, 3555 bp, Artificial Sequence
  derived and/or modified sequence
atggtgggcaccaaggcctgggtgttcagcttcctggtgctggaggtgacttctgtcctagggcgccagactatgcttactcagtccgttcggagagttcagccaggcaaaaagaatccctccatctttgcaaagcctgctgacaccttagaaagccctggagagtggactacctggttcaacatcgactatcccggcggaaagggggattatgagcggcttgatgccataaggttttactacggcgaccgggtgtgcgcacgacccctgcggcttgaggcacgtactactgactggaccccagccggctcaactgggcaggtagtccatggcagccccagggaagggttttggtgcctgaaccgcgaacagcgccccggtcagaactgctcgaattacacagttcgctttctctgcccacccggaagccttcgccgggataccgagagaatatggtcaccgtggagtccttggagtaaatgtagcgctgcctgcgggcagactggagttcagactagaacccgcatatgtctagctgagatggtatcactctgttctgaagcctctgaagaaggacagcactgcatgggacaggactgcaccgcctgtgatctgacatgtcccatgggacaggtgaatgccgattgcgacgcttgtatgtgtcaggattttatgctccacggcgccgtgtcgctccccgggggagccccggcgtccggggccgcaatctacttgctcacaaagacaccgaagctgctcacccaaaccgactcagacggcagatttagaatccctggcttgtgcccagatggtaaatccatcctgaaaatcacaaaagtcaaattcgcccccatcgtgctcaccatgccgaagacatctctcaaggctgccaccatcaaagcagagttcgtgagagccgagacaccgtacatggtaatgaaccctgagactaaagcccggcgggccggccagtctgtgtccttatgctgtaaggccactggcaagccccgacccgacaagtacttttggtatcataacgataccctcctggaccctagcctgtataagcacgaatcaaagttggtcttaaggaagttacagcagcatcaagcaggggaatatttttgcaaggcccagtctgatgcaggcgccgtgaagtctaaggtggctcagctcatcgtcatagctagcgacgagacaccgtgtaacccagtccctgagagctacctcatcaggctcccacatgactgtttccagaacgcgaccaactctttctattatgatgtggggaggtgtcctgtcaagacatgtgctggacagcaggacaacggaattcgatgtagggacgctgttcagaattgctgcggcattagcaaaaccgaagagcgcgaaatccagtgttcgggctatactctgcctacaaaggtggccaaggagtgctcctgtcagcgttgtacggaaactaggtctatcgtcagaggacgcgtctcagcagccgataacggggagcccatgagattcggccatgtctacatgggaaatagccgggtgtccatgactggatataagggaacttttactctgcacgtgccccaggacactgaaagactggtgttgactttcgtcgaccggctgcaaaagtttgtgaatacaacaaaggtgctgccattcaataagaaaggaagtgcagtttttcatgaaatcaagatgctgcggcgtaagaaaccaatcaccctggaagcaatggagacaaatatcatcccactgggggaagtcgtgggcgaggatcctatggctgaattggagattccttccaggtctttttacaggcagaacggtgagccttacatcggcaaagttaaggcgtccgttacattcctggaccctaggaacatctcgacggctactgcggcccagactgacctgaactttattaatgatgagggagacacctttcctttgagaacatacgggatgttctcagtggacttccgggatgaagtgacaagtgagccactgaacgctggtaaagtgaaagttcacctcgacagtactcaagtaaagatgcccgagcacatctctactgtcaagctttggtcactcaatccggacaccgggctctgggaggaagaaggggactttaagttcgaaaatcagaggagaaacaagcgtgaagaccgcacatttttagtgggtaacctcgagattcgggagcgcaggttgtttaaccttgacgttccggagtcacgtagatgtttcgtaaaggtgagagcttacagatccgagagatttctgcccagcgagcagatacaaggcgttgtgattagtgtgattaatctggagccccggaccggcttcctctcaaacccacgcgcttggggaaggtttgattcagttattaccgggcccaatggcgcttgtgtgcctgcgttttgtgatgatcagtctccggacgcgtactctgcgtatgtcttagcttcactggccggagaggaactgcaggcagtggagagttctcccaagtttaatcctaacgcaatcggcgtgcctcaaccctaccttaacaaactgaactacaggcgaacagatcacgaagaccctagggtgaagaaaactgcattccagattagcatggcgaaaccgcgcccaaactcagccgaggagtccaacggccctatttacgctttcgaaaatctcagggcctgcgaggaagctcctccgagtgccgcacactttcgcttttaccaaatagagggcgataggtacgactacaacaccgtgccctttaacgaggacgaccccatgtcttggactgaagactatttggcttggtggccgaagcccatggagtttcgagcctgctatattaaggtgaaaatcgtgggcccgttggaggtgaacgtgcgaagccggaatatgggggggacccacagacagactgtaggcaaactgtacggcattcgtgatgttaggagtacccgggaccgggatcagccgaacgtaagcgctgcgtgccttgagttcaagtgtagtggcatgctctatgaccaggatcgggtggaccgaacgctggtcaaggtgatccctcaggggtcttgtcgaagggcgtccgtgaaccccatgctgcacgaatacctggtgaaccacctcccactggctgtgaataatgacacctccgagtatacaatgctggcccctctcgaccccctcggtcataactatggaatatacaccgtcactgaccaggatccaagaaccgctaaggaaatcgcattaggccggtgctttgacggcacaagtgacgggtcttcccggatcatgaagtccaatgtgggggtggcccttactttcaactgcgttgagagacaggtgggtcgacagagtgcgtttcagtatctgcaaagcacgcccgcacagagcccagccgcgggaacagtacaggggcgcgtaccttcccggcgtcaacaacgcgcctcacgaggcggtcagcggcaagggggtgtggtcgcatccctgaggtttcctcgcgtggcccagcagcctctcattaactag

SEQ ID NO: 139533 - DNA, 3555 bp, Artificial Sequence
  derived and/or modified sequence
atggtcggaacaaaagcgtgggttttttcattcttagtgttggaagtgacaagcgtgctcggcaggcaaactatgctaacccaatcagtgagacgggtgcagccgggtaaaaagaaccccagcatcttcgcgaagcctgccgacacattggagagccccggagagtggacgacgtggttcaatatcgactatcccggaggcaagggagactacgagcgactggacgcgataagattttactacggcgacagggtatgcgctagacccctgcggctggaggcacggactactgactggacaccagccggtagtaccggccaggttgtacatgggtctccacgtgaaggcttctggtgtctgaatcgggaacagagacctggtcagaactgttccaattacacagtcaggttcctgtgccctccaggctcactcaggcgtgacacggagaggatttggtctccatggagcccatggagtaaatgttccgctgcctgtggacagacaggggtgcagactcgtaccagaatttgcctggctgaaatggtctctctgtgttctgaggcgtccgaagaagggcagcactgcatgggccaggattgtactgcctgcgacctcacatgcccgatggggcaggttaacgctgattgtgatgcatgcatgtgccaggacttcatgttacacggagcagtcagtctacccggaggggctccagcctccggggctgcgatttaccttctgacaaagactccaaagctactgacgcagacagacagcgacggccgttttcgaatcccaggtctgtgcccagacggcaaatccattctgaaaattacgaaggtcaaattcgcgcctattgtcctgactatgcccaagacctccttgaaagccgcaacaatcaaggccgagtttgtgagggctgagactccatacatggtcatgaaccccgaaacgaaagccagacgcgcaggccaatccgtgagcctatgctgtaaggccaccggaaaacccagacctgataagtacttctggtatcacaacgatactctgctggacccgtctctgtataaacacgagtcaaagcttgtcctgcggaaattacagcagcatcaggcgggtgagtacttctgcaaagcacagagtgatgctggagcagtaaagagcaaagtggcccaacttatagtgatagctagcgacgagacaccatgtaacccagtgcctgagtcttatcttatccgtctccctcatgattgttttcagaacgcgaccaatagcttctactatgacgtaggccgatgccctgtcaaaacctgcgccggacaacaggataatgggattagatgtcgtgacgcagtccagaactgctgcggcatatcaaagacagaagaaagggagattcaatgcagcggatatacactgcctacgaaagtggcaaaggagtgttcatgccaacggtgtactgaaacacgctccatcgtgagaggccgtgtctccgcagctgacaatggagagccaatgaggtttggccatgtgtacatgggaaacagcagagtttcaatgaccggttacaaggggacgttcaccctgcacgtgccacaggacaccgaaaggctggtattaaccttcgtcgacagattgcagaagttcgtgaatactactaaggtactgcctttcaataagaagggatccgccgtgttccatgagataaagatgctccggaggaagaagccgatcacacttgaggctatggagacaaatataatacccctcggggaggttgtgggggaagatcccatggccgagcttgaaatccctagtaggagcttttaccggcaaaacggggagccctacatcggaaaggtgaaggctagcgtcacatttcttgatcctagaaacatctcaaccgcaaccgctgcccagaccgacttgaatttcattaatgatgagggggatacgttccctctgaggacctatggcatgttcagcgtagatttccgggatgaggttaccagcgaaccattgaatgccggaaaggttaaggtgcacctggattcgacccaggtcaaaatgcctgaacacatttctaccgtgaagctttggtctttgaaccccgatactgggctgtgggaagaggagggcgactttaaattcgaaaaccagaggcgcaacaagagagaggataggactttcctcgtcgggaatttggagataagggaacggagactctttaacctggatgtcccagaatcacgaaggtgttttgtgaaagtcagagcatacaggagcgagcgctttctgccatctgagcaaatacaaggcgtcgttataagcgtgattaacttggaacccagaaccgggtttcttagcaaccctagagcttggggtaggttcgattctgtcatcactggccctaacggggcatgtgtacccgcattttgcgacgaccagagtcctgacgcctattctgcctacgtcttggcatccttagcaggcgaggaactccaggctgttgaaagcagtcccaaattcaatcccaacgcgatcggcgtcccacagccttacctgaacaaattgaactaccgtagaacagaccatgaagatcctcgcgtcaaaaagaccgcattccaaatcagcatggccaagccgaggcccaattccgccgaagaatcaaacggccctatttacgctttcgagaacctgcgggcatgtgaagaggctcctcccagcgcggctcacttccgcttctatcagattgagggtgaccgatacgattacaataccgtcccatttaatgaagacgaccctatgagctggaccgaggattatctcgcctggtggcccaaacctatggaattccgcgcatgctacatcaaggtcaagattgttggcccactagaagttaacgtccgatctcgcaacatgggaggcactcatcgacaaaccgttggcaaactgtacggcatacgcgacgtgcggagcacgagggatagagaccagcccaatgtttcagctgcatgcctggaatttaagtgctctggaatgctctacgatcaagacagagtggatcgaactctggtgaaagtaatcccccagggatcttgcaggcgagcaagcgtgaatcccatgttgcatgagtacctcgttaaccacctgcccctggcggtcaacaacgatactagcgagtacacaatgctggcgccactcgatcccttaggacacaattacggtatatatactgtgactgatcaggacccgaggacagcaaaggagattgccctgggtagatgctttgatggcaccagcgacggatcctcacgcattatgaagtccaacgtgggggtcgctcttacttttaactgcgtggagaggcaagtggggcgacagtcagcattccagtacctgcagtcaacacctgctcaaagccccgctgcgggaactgtccagggacgggtccctagtaggcgacaacagagggccagtcgtggtgggcaaagacagggaggcgtggtggccagcttgcgatttcccagagtggcccaacaacctttgatcaattag

SEQ ID NO: 139534 - DNA, 4454 bp, Artificial Sequence
  derived and/or modified sequence
actggactgctggagaggcgaaggcttggacccccagctgaggagtcctgctcaagacacggtcactggatctgagaaacttcccaggggaccgcattccagagtcagtgactctgtgaagcacccacatctacctcttgccacgttcccacgggcttgggggaaagatggtggggaccaaggcctgggtgttctccttcctggtcctggaagtcacatctgtgttggggagacagacgatgctcacccagtcagtaagaagagtccagcctgggaagaagaaccccagcatctttgccaagcctgccgacaccctggagagccctggtgagtggacaacatggttcaacatcgactacccaggcgggaagggcgactatgagcggctggacgccattcgcttctactatggggaccgtgtatgtgcccgtcccctgcggctagaggctcggaccactgactggacacctgcgggcagcactggccaggtggtccatggtagtccccgtgagggtttctggtgcctcaacagggagcagcggcctggccagaactgctctaattacaccgtacgcttcctctgcccaccaggatccctgcgccgagacacagagcgcatctggagcccatggtctccctggagcaagtgctcagctgcctgtggtcagactggggtccagactcgcacacgcatttgcttggcagagatggtgtcgctgtgcagtgaggccagcgaagagggtcagcactgcatgggccaggactgtacagcctgtgacctgacctgcccaatgggccaggtgaatgctgactgtgatgcctgcatgtgccaggacttcatgcttcatggggctgtctcccttcccggaggtgccccagcctcaggggctgctatctacctcctgaccaagacgccgaagctgctgacccagacagacagtgatgggagattccgaatccctggcttgtgccctgatggcaaaagcatcctgaagatcacaaaggtcaagtttgcccccattgtactcacaatgcccaagactagcctgaaggcagccaccatcaaggcagagtttgtgagggcagagactccatacatggtgatgaaccctgagacaaaagcacggagagctgggcagagcgtgtctctgtgctgtaaggccacagggaagcccaggccagacaagtatttttggtatcataatgacacattgctggatccttccctctacaagcatgagagcaagctggtgctgaggaaactgcagcagcaccaggctggggagtacttttgcaaggcccagagtgatgctggggctgtgaagtccaaggttgcccagctgattgtcatagcatctgatgagactccttgcaacccagttcctgagagctatcttatccggctgccccatgattgctttcagaatgccaccaactccttctactatgacgtgggacgctgccctgttaagacttgtgcagggcagcaggataatgggatcaggtgccgtgatgctgtgcagaactgctgtggcatctccaagacagaggaaagggagatccagtgcagtggctacacgctacccaccaaggtggccaaggagtgcagctgccagcggtgtacggaaactcggagcatcgtgcggggccgtgtcagtgctgctgacaatggggagcccatgcgctttggccatgtgtacatggggaacagccgtgtaagcatgactggctacaagggcactttcaccctccatgtcccccaggacactgagaggctggtgctcacatttgtggacaggctgcagaagtttgtcaacaccaccaaagtgctacctttcaacaagaaggggagtgccgtgttccatgaaatcaagatgcttcgtcggaaaaagcccatcactttggaagccatggagaccaacatcatccccctgggggaagtggttggtgaagaccccatggctgaactggagattccatccaggagtttctacaggcagaatggggagccctacataggaaaagtgaaggccagtgtgaccttcctggatccccggaatatttccacagccacagctgcccagactgacctgaacttcatcaatgacgaaggagacactttcccccttcggacgtatggcatgttctctgtggacttcagagatgaggtcacctcagagccacttaatgctggcaaagtgaaggtccaccttgactcgacccaggtcaagatgccagagcacatatccacagtgaaactctggtcactcaatccagacacagggctgtgggaggaggaaggtgatttcaaatttgaaaatcaaaggaggaacaaaagagaagacagaaccttcctggtgggcaacctggagattcgtgagaggaggctctttaacctggatgttcctgaaagcaggcggtgctttgttaaggtgagggcctaccggagtgagaggttcttgcctagtgagcagatccagggggttgtgatctccgtgattaacctggagcctagaactggcttcttgtccaaccctagggcctggggccgctttgacagtgtcatcacaggccccaacggggcctgtgtgcctgccttctgtgatgaccagtcccctgatgcctactctgcctatgtcttggcaagcctggctggggaggaactgcaagcagtggagtcttctcctaaattcaacccaaatgcaattggcgtccctcagccctatctcaacaagctcaactaccgtcggacggaccatgaggatccacgggttaaaaagacagctttccagattagcatggccaagccaaggcccaactcagctgaggagagcaatgggcccatctatgcctttgagaacctccgggcatgtgaagaggcaccacccagtgcagcccacttccggttctaccagattgagggggatcgatatgactacaacacagtccccttcaacgaagatgaccctatgagctggactgaagactatctggcatggtggccaaagccgatggaattcagggcctgctatatcaaggtgaagattgtggggccactggaagtgaatgtgcgatcccgcaacatggggggcactcatcggcagacagtggggaagctgtatggaatccgagatgtgaggagcactcgggacagggaccagcccaatgtctcagctgcctgtctggagttcaagtgcagtgggatgctctatgatcaggaccgtgtggaccgcaccctggtgaaggtcatcccccagggcagctgccgtcgagccagtgtgaaccccatgctgcatgagtacctggtcaaccacttgccacttgcagtcaacaacgacaccagtgagtacaccatgctggcacccttggacccactgggccacaactatggcatctacactgtcactgaccaggaccctcgcacggccaaggagatcgcgctcggccggtgctttgatggcacatccgatggctcctccagaatcatgaagagcaatgtgggagtagccctcaccttcaactgtgtagagaggcaagtaggccgccagagtgccttccagtacctccaaagcaccccagcccagtcccctgctgcaggcactgtccaaggaagagtgccctcgaggaggcagcagcgagcgagcaggggtggccagcgccagggtggagtggtggcctctctgagatttcctagagttgctcaacagcccctgatcaactaagttttgtggtacttcaccctcttctgccctcatttcatgtgacagccattgtgagactgatgcacaaactgtcacttggttaatttaagcacttctgttttcgtgaatttgcttgtttgtttcttcatgcctttacttactttgtcccatgctactgattggcacgtggcccccacaatggcacaataaagcccctttgtgaaactgttctttaaatgaaacacaagaaattggccactggtaaaactctgcagcttcaactgtacttcatttaatgccattaatgcaaatatacttcctcttctttttgcatggttttgcccacctctgcaatagtgataatctgatgctgaagatcaaataaccaatataaagcatatttcttggccttgctccacaggacataggcaagccttgatcatagttcatacatataaatggtggtgaaataaagaaataaaacacaatacttttacttgaaatgtaaataacttatttatttctttgctaaatttggaattctagtgcacattcaaagttaagctattaaatatagggtgatcatagttcctctaccaagtctggaaagaacatctcctggtatccacaattacaccaggttgctaactgtatttgtacatttccctttgcattcgcttctgttcttgctagaaacccagtgtagcccagggcagatgtcaataaatgcatactctgtatttcgattctgag

SEQ ID NO: 139535 - DNA, 3555 bp, Artificial Sequence
  derived and/or modified sequence
atggtgggcaccaaggcctgggtgttcagcttcctggtgctggaggtgaccagcgtgctgggcagacagaccatgctgacccagagcgtgagaagagtgcagcccggcaagaagaaccccagcatcttcgccaagcccgccgacaccctggagagccccggcgagtggaccacctggttcaacatcgactaccccggcggcaagggcgactacgagagactggacgccatcagattctactacggcgacagagtgtgcgccagacccctgagactggaggccagaaccaccgactggacccccgccggcagcaccggccaggtggtgcacggcagccccagagagggcttctggtgcctgaacagagagcagagacccggccagaactgcagcaactacaccgtgagattcctgtgcccccccggcagcctgagaagagacaccgagagaatctggagcccctggagcccctggagcaagtgcagcgccgcctgcggccagaccggcgtgcagaccagaaccagaatctgcctggccgagatggtgagcctgtgcagcgaggccagcgaggagggccagcactgcatgggccaggactgcaccgcctgcgacctgacctgccccatgggccaggtgaacgccgactgcgacgcctgcatgtgccaggacttcatgctgcacggcgccgtgagcctgcccggcggcgcccccgccagcggcgccgccatctacctgctgaccaagacccccaagctgctgacccagaccgacagcgacggcagattcagaatccccggcctgtgccccgacggcaagagcatcctgaagatcaccaaggtgaagttcgcccccatcgtgctgaccatgcccaagaccagcctgaaggccgccaccatcaaggccgagttcgtgagagccgagaccccctacatggtgatgaaccccgagaccaaggccagaagagccggccagagcgtgagcctgtgctgcaaggccaccggcaagcccagacccgacaagtacttctggtaccacaacgacaccctgctggaccccagcctgtacaagcacgagagcaagctggtgctgagaaagctgcagcagcaccaggccggcgagtacttctgcaaggcccagagcgacgccggcgccgtgaagagcaaggtggcccagctgatcgtgatcgccagcgacgagaccccctgcaaccccgtgcccgagagctacctgatcagactgccccacgactgcttccagaacgccaccaacagcttctactacgacgtgggcagatgccccgtgaagacctgcgccggccagcaggacaacggcatcagatgcagagacgccgtgcagaactgctgcggcatcagcaagaccgaggagagagagatccagtgcagcggctacaccctgcccaccaaggtggccaaggagtgcagctgccagagatgcaccgagaccagaagcatcgtgagaggcagagtgagcgccgccgacaacggcgagcccatgagattcggccacgtgtacatgggcaacagcagagtgagcatgaccggctacaagggcaccttcaccctgcacgtgccccaggacaccgagagactggtgctgaccttcgtggacagactgcagaagttcgtgaacaccaccaaggtgctgcccttcaacaagaagggcagcgccgtgttccacgagatcaagatgctgagaagaaagaagcccatcaccctggaggccatggagaccaacatcatccccctgggcgaggtggtgggcgaggaccccatggccgagctggagatccccagcagaagcttctacagacagaacggcgagccctacatcggcaaggtgaaggccagcgtgaccttcctggaccccagaaacatcagcaccgccaccgccgcccagaccgacctgaacttcatcaacgacgagggcgacaccttccccctgagaacctacggcatgttcagcgtggacttcagagacgaggtgaccagcgagcccctgaacgccggcaaggtgaaggtgcacctggacagcacccaggtgaagatgcccgagcacatcagcaccgtgaagctgtggagcctgaaccccgacaccggcctgtgggaggaggagggcgacttcaagttcgagaaccagagaagaaacaagagagaggacagaaccttcctggtgggcaacctggagatcagagagagaagactgttcaacctggacgtgcccgagagcagaagatgcttcgtgaaggtgagagcctacagaagcgagagattcctgcccagcgagcagatccagggcgtggtgatcagcgtgatcaacctggagcccagaaccggcttcctgagcaaccccagagcctggggcagattcgacagcgtgatcaccggccccaacggcgcctgcgtgcccgccttctgcgacgaccagagccccgacgcctacagcgcctacgtgctggccagcctggccggcgaggagctgcaggccgtggagagcagccccaagttcaaccccaacgccatcggcgtgccccagccctacctgaacaagctgaactacagaagaaccgaccacgaggaccccagagtgaagaagaccgccttccagatcagcatggccaagcccagacccaacagcgccgaggagagcaacggccccatctacgccttcgagaacctgagagcctgcgaggaggccccccccagcgccgcccacttcagattctaccagatcgagggcgacagatacgactacaacaccgtgcccttcaacgaggacgaccccatgagctggaccgaggactacctggcctggtggcccaagcccatggagttcagagcctgctacatcaaggtgaagatcgtgggccccctggaggtgaacgtgagaagcagaaacatgggcggcacccacagacagaccgtgggcaagctgtacggcatcagagacgtgagaagcaccagagacagagaccagcccaacgtgagcgccgcctgcctggagttcaagtgcagcggcatgctgtacgaccaggacagagtggacagaaccctggtgaaggtgatcccccagggcagctgcagaagagccagcgtgaaccccatgctgcacgagtacctggtgaaccacctgcccctggccgtgaacaacgacaccagcgagtacaccatgctggcccccctggaccccctgggccacaactacggcatctacaccgtgaccgaccaggaccccagaaccgccaaggagatcgccctgggcagatgcttcgacggcaccagcgacggcagcagcagaatcatgaagagcaacgtgggcgtggccctgaccttcaactgcgtggagagacaggtgggcagacagagcgccttccagtacctgcagagcacccccgcccagagccccgccgccggcaccgtgcagggcagagtgcccagcagaagacagcagagagccagcagaggcggccagagacagggcggcgtggtggccagcctgagattccccagagtggcccagcagcccctgatcaactag

SEQ ID NO: 139536 - protein, 1214 aa, Artificial Sequence
  derived and/or modified sequence
MERFRLEKKLPGPDEEAVVDLGKTSSTVNTKFEKEELESHRAVYIGVHVPFSKESRRRHRHRGHKHHHRRRKDKESDKEDGRESPSYDTPSQRVQFILGTEDDDEEHIPHDLFTEMDELCYRDGEEYEWKETARWLKFEEDVEDGGDRWSKPYVATLSLHSLFELRSCILNGTVMLDMRASTLDEIADMVLDNMIASGQLDESIRENVREALLKRHHHQNEKRFTSRIPLVRSFADIGKKHSDPHLLERNGEGLSASRHSLRTGLSASNLSLRGESPLSLLLGHLLPSSRAGTPAGSRCTTPVPTPQNSPPSSPSISRLTSRSSQESQRQAPELLVSPASDDIPTVVIHPPEEDLEAALKGEEQKNEENVDLTPGILASPQSAPGNLDNSKSGEIKGNGSGGSRENSTVDFSKVDMNFMRKIPTGAEASNVLVGEVDFLERPIIAFVRLAPAVLLTGLTEVPVPTRFLFLLLGPAGKAPQYHEIGRSIATLMTDEIFHDVAYKAKDRNDLLSGIDEFLDQVTVLPPGEWDPSIRIEPPKSVPSQEKRKIPVFHNGSTPTLGETPKEAAHHAGPELQRTGRLFGGLILDIKRKAPFFLSDFKDALSLQCLASILFLYCACMSPVITFGGLLGEATEGRISAIESLFGASLTGIAYSLFAGQPLTILGSTGPVLVFEKILYKFCRDYQLSYLSLRTSIGLWTSFLCIVLVATDASSLVCYITRFTEEAFAALICIIFIYEALEKLFDLGETYAFNMHNNLDKLTSYSCVCTEPPNPSNETLAQWKKDNITAHNISWRNLTVSECKKLRGVFLGSACGHHGPYIPDVLFWCVILFFTTFFLSSFLKQFKTKRYFPTKVRSTISDFAVFLTIVIMVTIDYLVGVPSPKLHVPEKFEPTHPERGWIISPLGDNPWWTLLIAAIPALLCTILIFMDQQITAVIINRKEHKLKKGAGYHLDLLMVGVMLGVCSVMGLPWFVAATVLSISHVNSLKVESECSAPGEQPKFLGIREQRVTGLMIFILMGLSVFMTSVLKFIPMPVLYGVFLYMGVSSLKGIQLFDRIKLFGMPAKHQPDLIYLRYVPLWKVHIFTVIQLTCLVLLWVIKVSAAAVVFPMMVLALVFVRKLMDLCFTKRELSWLDDLMPESKKKKEDDKKKKEKEEAERMLQDDDDTVHLPFEGGSLLQIPVKALKYSPDKPVSVKISFEDEPRKKYVDAETSL

SEQ ID NO: 139537 - DNA, 3645 bp, Artificial Sequence
  derived and/or modified sequence
atggagagattcagactggagaagaagctgcccggccccgacgaggaggccgtggtggacctgggcaagaccagcagcaccgtgaacaccaagttcgagaaggaggagctggagagccacagagccgtgtacatcggcgtgcacgtgcccttcagcaaggagagcagaagaagacacagacacagaggccacaagcaccaccacagaagaagaaaggacaaggagagcgacaaggaggacggcagagagagccccagctacgacacccccagccagagagtgcagttcatcctgggcaccgaggacgacgacgaggagcacatcccccacgacctgttcaccgagatggacgagctgtgctacagagacggcgaggagtacgagtggaaggagaccgccagatggctgaagttcgaggaggacgtggaggacggcggcgacagatggagcaagccctacgtggccaccctgagcctgcacagcctgttcgagctgagaagctgcatcctgaacggcaccgtgatgctggacatgagagccagcaccctggacgagatcgccgacatggtgctggacaacatgatcgccagcggccagctggacgagagcatcagagagaacgtgagagaggccctgctgaagagacaccaccaccagaacgagaagagattcaccagcagaatccccctggtgagaagcttcgccgacatcggcaagaagcacagcgacccccacctgctggagagaaacggcgagggcctgagcgccagcagacacagcctgagaaccggcctgagcgccagcaacctgagcctgagaggcgagagccccctgagcctgctgctgggccacctgctgcccagcagcagagccggcacccccgccggcagcagatgcaccacccccgtgcccaccccccagaacagcccccccagcagccccagcatcagcagactgaccagcagaagcagccaggagagccagagacaggcccccgagctgctggtgagccccgccagcgacgacatccccaccgtggtgatccacccccccgaggaggacctggaggccgccctgaagggcgaggagcagaagaacgaggagaacgtggacctgacccccggcatcctggccagcccccagagcgcccccggcaacctggacaacagcaagagcggcgagatcaagggcaacggcagcggcggcagcagagagaacagcaccgtggacttcagcaaggtggacatgaacttcatgagaaagatccccaccggcgccgaggccagcaacgtgctggtgggcgaggtggacttcctggagagacccatcatcgccttcgtgagactggcccccgccgtgctgctgaccggcctgaccgaggtgcccgtgcccaccagattcctgttcctgctgctgggccccgccggcaaggccccccagtaccacgagatcggcagaagcatcgccaccctgatgaccgacgagatcttccacgacgtggcctacaaggccaaggacagaaacgacctgctgagcggcatcgacgagttcctggaccaggtgaccgtgctgccccccggcgagtgggaccccagcatcagaatcgagccccccaagagcgtgcccagccaggagaagagaaagatccccgtgttccacaacggcagcacccccaccctgggcgagacccccaaggaggccgcccaccacgccggccccgagctgcagagaaccggcagactgttcggcggcctgatcctggacatcaagagaaaggcccccttcttcctgagcgacttcaaggacgccctgagcctgcagtgcctggccagcatcctgttcctgtactgcgcctgcatgagccccgtgatcaccttcggcggcctgctgggcgaggccaccgagggcagaatcagcgccatcgagagcctgttcggcgccagcctgaccggcatcgcctacagcctgttcgccggccagcccctgaccatcctgggcagcaccggccccgtgctggtgttcgagaagatcctgtacaagttctgcagagactaccagctgagctacctgagcctgagaaccagcatcggcctgtggaccagcttcctgtgcatcgtgctggtggccaccgacgccagcagcctggtgtgctacatcaccagattcaccgaggaggccttcgccgccctgatctgcatcatcttcatctacgaggccctggagaagctgttcgacctgggcgagacctacgccttcaacatgcacaacaacctggacaagctgaccagctacagctgcgtgtgcaccgagccccccaaccccagcaacgagaccctggcccagtggaagaaggacaacatcaccgcccacaacatcagctggagaaacctgaccgtgagcgagtgcaagaagctgagaggcgtgttcctgggcagcgcctgcggccaccacggcccctacatccccgacgtgctgttctggtgcgtgatcctgttcttcaccaccttcttcctgagcagcttcctgaagcagttcaagaccaagagatacttccccaccaaggtgagaagcaccatcagcgacttcgccgtgttcctgaccatcgtgatcatggtgaccatcgactacctggtgggcgtgcccagccccaagctgcacgtgcccgagaagttcgagcccacccaccccgagagaggctggatcatcagccccctgggcgacaacccctggtggaccctgctgatcgccgccatccccgccctgctgtgcaccatcctgatcttcatggaccagcagatcaccgccgtgatcatcaacagaaaggagcacaagctgaagaagggcgccggctaccacctggacctgctgatggtgggcgtgatgctgggcgtgtgcagcgtgatgggcctgccctggttcgtggccgccaccgtgctgagcatcagccacgtgaacagcctgaaggtggagagcgagtgcagcgcccccggcgagcagcccaagttcctgggcatcagagagcagagagtgaccggcctgatgatcttcatcctgatgggcctgagcgtgttcatgaccagcgtgctgaagttcatccccatgcccgtgctgtacggcgtgttcctgtacatgggcgtgagcagcctgaagggcatccagctgttcgacagaatcaagctgttcggcatgcccgccaagcaccagcccgacctgatctacctgagatacgtgcccctgtggaaggtgcacatcttcaccgtgatccagctgacctgcctggtgctgctgtgggtgatcaaggtgagcgccgccgccgtggtgttccccatgatggtgctggccctggtgttcgtgagaaagctgatggacctgtgcttcaccaagagagagctgagctggctggacgacctgatgcccgagagcaagaagaagaaggaggacgacaagaagaagaaggagaaggaggaggccgagagaatgctgcaggacgacgacgacaccgtgcacctgcccttcgagggcggcagcctgctgcagatccccgtgaaggccctgaagtacagccccgacaagcccgtgagcgtgaagatcagcttcgaggacgagcccagaaagaagtacgtggacgccgagaccagcctgtag

SEQ ID NO: 139538 - DNA, 3645 bp, Artificial Sequence
  derived and/or modified sequence
atggaaagattccggctagaaaaaaaactgcctgggcccgacgaggaggccgtcgtagacctcggcaagacttctagtactgtcaatactaagttcgagaaggaagagctggaatcccaccgggcagtgtacatcggcgtgcatgtgccgtttagtaaagaatcaagaaggcggcacagacaccgcgggcataagcaccatcaccggcgaaggaaggataaagaatcagataaggaagacggccgcgagtcaccctcctatgacacgccctcccagagagtccaattcatcctggggaccgaagacgatgacgaagaacatattccgcacgacctgtttacagagatggacgagctgtgctatagagatggtgaggaatatgaatggaaggagaccgcacggtggctgaagttcgaggaggacgtggaagacggcggggacagatggtcaaagccctacgtggccacgcttagtcttcactccctgtttgaacttcgatcctgcatcttgaacggcactgtaatgctcgacatgcgggcttcaaccttagacgagatcgccgatatggttcttgacaatatgatagcatcagggcagctggatgagtccattagggagaacgtgcgagaagcccttcttaagagacaccaccaccaaaatgaaaagcgcttcacaagtaggatcccactggtcagatctttcgctgacatcgggaagaagcactcagacccccatctcctggagcggaatggcgagggccttagcgcttcacgtcactctcttcggacaggcctgtccgcctcgaacctcagtctacggggagagagccctttatccctgctgcttggccacctcttgccctcatcacgggcgggtacacccgctggttcaagatgcactacacccgtcccaacccctcagaactcccccccatcaagcccatcgatcagcaggctgacgtctagaagctctcaagagagccagagacaggcgccagaactcctcgtgtctccggcctctgacgacatcccaacagtggtcatccacccgccagaagaggatcttgaggccgcactgaagggcgaggaacagaagaacgaggagaacgttgatctgactccaggcattctcgcatccccccagagcgctccaggcaatttggacaactccaagtctggggagataaagggcaatgggagcggaggcagcagggagaacagtaccgtcgatttctctaaggttgatatgaatttcatgcgaaaaattcctaccggtgcagaggcctctaatgtcctggttggtgaagtggactttctggaacgacccattatcgctttcgtgcggctcgcccctgccgtgctgctgaccggactgaccgaggtcccggtgcctacaagattcctgttcctgctgctgggacccgctggtaaggccccacagtaccacgaaatcgggcgcagtattgctacacttatgaccgatgagattttccacgacgtcgcttacaaagccaaagatcggaacgatctgctttctggaattgatgaattcctggatcaggtgacagtgttaccacctggagagtgggaccccagtatcaggattgaaccccctaagagcgtgccttctcaagagaagagaaaaattccggtatttcacaacggctccactcccactctgggagagacacccaaagaagcagcccaccacgcaggtcctgaactgcagcgaaccggacgtctctttggaggcttaatcctcgatatcaaacgaaaagctcccttttttctgtccgattttaaggacgctttgagccttcagtgtttggcctcgatcctgtttctgtactgcgcctgtatgtcaccggttattacttttggcggactgttgggcgaagccacagaggggcgaatatctgccatagagtctctttttggagcatctctgacaggaattgcctactccctgttcgctggccagcctctgaccatcctgggaagcaccggcccagtgctggtgtttgagaaaatcttgtataaattttgcagggattatcaactttcatacctgtctctcagaacaagcatcggcctctggacatcatttctatgtatcgtccttgtggcaaccgacgccagttcactagtatgctacataaccaggtttacagaggaagcatttgccgcattgatatgtataatatttatttatgaggccctggagaaactgttcgacctgggggaaacgtatgcctttaatatgcacaataatctggataagttgacatcatatagctgcgtttgtaccgaaccccctaatccgtctaacgagacactggcacagtggaagaaagataatatcacggcccacaatatcagctggcgaaacctcaccgtaagcgagtgtaaaaagctaaggggtgtgtttcttggatctgcttgtggccatcacggtccctatatacctgatgtcctattttggtgcgtgattctgttcttcactacctttttcctgtcttctttcctgaaacagtttaaaactaagaggtattttccaaccaaagtgcggtctactattagcgatttcgcagtatttctcaccatcgtgataatggtaaccatcgattatctggtcggggttccatcccccaaactccatgtccccgagaagtttgagcctacacatcccgagcggggttggatcatcagcccgctgggagataacccttggtggacccttctcattgctgccatacccgccctgctctgcactatactgatctttatggatcaacaaattactgcagtgatcattaatcgaaaggaacataagctcaagaagggtgcggggtaccacctggacttactgatggtcggagtaatgctcggcgtgtgctctgtgatgggcctgccttggttcgtagcggccaccgtcctgtctattagtcacgtaaatagccttaaggtcgaatcggagtgctctgccccaggcgagcagccaaagttcctgggaatccgcgagcagagggtgaccggactgatgatcttcattctgatggggctgtccgtgttcatgactagcgtgcttaagttcattcctatgcctgtgctctacggcgtatttctgtatatgggggtgagctccctcaagggcatccagttgttcgacagaatcaagctctttggtatgcctgcaaaacaccaacctgacctcatctacttgcgttacgtgcccttgtggaaagtgcatatttttacagtgatccagctcacatgcctagttctcttatgggtgattaaagtgtcagcagcggcggtagtattccccatgatggtcctggccctggtgttcgtccgcaaactgatggatctctgtttcactaagagagaactgtcctggctggatgatctcatgcccgagagtaagaaaaaaaaagaagacgataagaagaagaaagagaaagaagaagctgaacgcatgctgcaggacgatgacgataccgtgcacctgccgtttgagggaggctctctattgcagatacctgtgaaagcattgaagtatagccccgacaaaccagtcagcgtgaaaatttcttttgaggatgagccacgcaaaaagtatgtagacgccgagacatccctgtag

SEQ ID NO: 139539 - DNA, 3645 bp, Artificial Sequence
  derived and/or modified sequence
atggagcgcttccggctggagaagaagctgcccggcccagatgaggaggccgtggtggacctgggcaagaccagcagcacagtgaacaccaagtttgagaaggaggagctggagagccacagagctgtgtacatcggcgtgcacgtgcccttcagcaaggagagcagaagaagacaccgccaccggggccacaagcaccaccacagaagaaggaaggacaaggagagtgacaaggaggatggccgggagagccccagctatgacacccccagccagagggtgcagttcatcctgggcacagaagatgatgatgaggagcacatcccccatgacctcttcacagagatggatgagctgtgctacagagatggagaggagtatgagtggaaggagacagcccgctggctgaagtttgaggaggatgtggaggatggaggagaccgctggagcaagccctacgtggccaccctgagcctgcacagcctgtttgagctgcggagctgcatcctgaatggaacagtgatgctggacatgagggccagcaccctggatgaaattgctgacatggtgctggacaacatgattgccagcggccagctggatgagagcatccgggagaatgtgcgggaggccctgctgaagaggcaccaccaccagaatgagaagcgcttcaccagccgcatccccctggtgcgcagctttgctgacatcggcaagaagcacagcgacccccacctgctggagagaaatggagagggcctgagcgccagccgccacagcctgaggacaggcctgagcgccagcaacctgagcctgcggggggagagccccctgagcctgctgctgggccacctgctgcccagcagcagagctggcaccccagctggcagccgctgcaccacccctgtgcccaccccccagaacagcccccccagcagccccagcatcagccggctgaccagccgcagcagccaggagagccagaggcaggcccctgagctgctggtgtccccagccagtgatgacatccccaccgtggtgatccaccccccagaggaggacctggaggccgccctgaagggggaggagcagaagaatgaggagaatgtggacctgaccccaggcatcctggccagcccccagagcgcccctggcaacctggacaacagcaagagcggggagatcaagggaaatggcagcggcggcagccgggagaacagcacagtggacttcagcaaggtggacatgaacttcatgaggaagatccccaccggggctgaggccagcaatgtgctggtgggggaggtggacttcctggagcggcccatcatcgcctttgtgcggctggccccagctgtgctgctgaccggcctgacagaggtgcctgtgcccacccgcttcctgttcctgctgctgggccctgctgggaaggccccccagtaccacgagatcggccgcagcatcgccaccctgatgacagatgagatcttccatgatgtggcctacaaggccaaggacagaaatgacctgctgagcggcattgatgagttcctggaccaggtgacagtgctgcccccaggagagtgggaccccagcatcagaattgagccccccaagtctgtgcccagccaggagaagaggaagatccctgtgttccacaacggcagcacccccaccctgggggagacccccaaggaggccgcccaccacgccggccctgagctgcagaggacaggccgcctgtttggaggcctcatcctggacatcaagaggaaggcccccttcttcctgagtgacttcaaggatgccctgagcctgcagtgcctggccagcatcctcttcctgtactgtgcctgcatgagccctgtgatcaccttcggcggcctgctgggggaggccacagagggccgcatcagcgccatcgagagcctgtttggagccagcctgaccggcatcgcctacagcctgtttgctggccagcccctgaccatcctgggcagcacaggccctgtgctggtgtttgagaagatcctgtacaagttctgccgggactaccagctgagctacctgagcctgcggaccagcatcggcctgtggaccagcttcctgtgcatcgtgctggtggccacagatgccagcagcctggtgtgctacatcacccgcttcacagaggaggcctttgctgccctgatctgcatcatcttcatctatgaggccctggagaagctgtttgacctgggggagacctacgccttcaacatgcacaacaacctggacaagctgaccagctacagctgtgtgtgcacagagccccccaaccccagcaatgagaccctggcccagtggaagaaggacaacatcacagcccacaacatctcctggaggaacctgactgtgtctgagtgcaagaagctgcggggcgtcttcctgggcagcgcctgtggccaccacggcccctacatcccagatgtgctcttctggtgtgtgatcctcttcttcaccaccttcttcctgagcagcttcctgaagcagttcaagaccaagcgctacttccccaccaaggtgcgcagcaccatcagtgactttgctgtgttcctgaccatcgtcatcatggtgaccatcgactacctggtgggcgtgcccagccccaagctgcacgtgcctgagaagtttgagcccacccaccctgagcggggctggatcatcagccccctgggggacaacccctggtggaccctgctgattgctgccatcccagccctgctgtgcaccatcctgatcttcatggaccagcagatcacagctgtgatcatcaacaggaaggagcacaagctgaagaagggagctggctaccacctggacctgctgatggtgggcgtgatgctgggcgtgtgcagcgtgatgggcctgccctggtttgtggccgccaccgtgctgagcatcagccacgtgaacagcctgaaggtggagagcgagtgcagcgcccctggagagcagcccaagttcctgggcatccgggagcagagggtgacaggcctgatgatcttcatcctgatgggcctgagcgtcttcatgacctctgtgctgaagttcatccccatgcctgtgctgtatggagtcttcctgtacatgggcgtgagcagcctgaagggcatccagctgtttgaccgcatcaagctgtttggcatgcctgccaagcaccagcctgacctgatctacctgcgctacgtgcccctgtggaaggtgcacatcttcaccgtcatccagctgacctgcctggtgctgctgtgggtgatcaaggtgtctgctgctgctgtggtgttccccatgatggtgctggccctggtgtttgtgaggaagctgatggacctgtgcttcaccaagcgggagctgtcctggctggatgacctgatgcctgagagcaagaagaagaaggaggatgacaagaagaagaaggagaaggaggaggccgagaggatgctgcaggatgatgatgacacagtgcacctgccctttgagggcggcagcctgctgcagatccctgtgaaggccctgaagtacagcccagacaagcctgtgtctgtgaagatcagctttgaagatgagcccaggaagaagtatgtggatgctgagaccagcctgtag

SEQ ID NO: 139540 - DNA, 3645 bp, Artificial Sequence
  derived and/or modified sequence
atggagcggttccggctggagaagaagctgcccggccccgacgaggaagcagtggttgacctcgggaaaacctcaagcaccgtcaatacaaaattcgaaaaagaggaactggagagccatcgggccgtctatataggggtgcatgtgcctttttctaaggaaagccggagaagacaccgccacagggggcacaagcatcaccaccgacggcgaaaggacaaagaatccgacaaagaagacgggagagagagtccctcctatgatacacctagccaacgggtacagtttatcctgggcactgaggatgatgacgaggagcacatcccacacgatctctttaccgagatggacgagctctgctatagggatggcgaagaatacgaatggaaagagacggcccgctggctgaagtttgaggaggacgtggaggacggaggagacaggtggagtaaaccgtacgtcgctactctgtccctgcactccctttttgaactgagaagctgcattctgaacggcacagtcatgctcgatatgagagccagcactctggacgagatcgcagacatggtgctcgacaacatgatcgcctccggacagctcgacgaatctattcgagaaaacgtcagagaagccctcctcaagcgccaccaccatcagaatgagaaaagattcacaagccgaatccctcttgtccggtcatttgcagatattggcaaaaagcattctgacccccacctccttgagaggaatggtgagggcctgtccgcctctcgccactcactcaggacggggctgagcgcatcaaacctaagcttgcggggcgagtctccattgagtctgctgcttggtcacttattgcctagctctcgagccggcacacctgcaggaagtcgctgtaccaccccggtgccgaccccccagaactcacccccaagctcaccgtcaataagccgcctgactagtcggtctagccaggagtcccagaggcaagcacctgaactgcttgtctccccagcgagtgacgacattcccaccgtggtcatacatcccccagaggaggatttggaggcggctctcaaaggggaagagcagaagaatgaggaaaacgtggaccttacgcctggaattctcgcgagccctcaaagtgcacctggaaatctcgacaattccaagtctggagaaattaaaggtaacggctcaggtggatcgcgtgagaattccaccgtggacttttctaaagtggacatgaacttcatgaggaaaattcctactggcgcagaggcttcaaacgtcctagtcggggaagtcgatttcctggaacgtcctataatcgccttcgttcgcttagcaccggcagtcctgctcaccgggctcaccgaggtgcctgtccctacgcggttcttatttctgcttctcggccctgctggaaaggccccgcagtaccacgagatcggcagaagcatcgctacactgatgaccgacgagatatttcacgatgtcgcctacaaggcaaaagataggaacgacctattgtccggaatcgacgaatttcttgaccaggtcacggtacttcccccaggagagtgggatccatcaatacggatcgagccccccaaatccgttccctcacaagaaaagaggaaaatcccggtcttccataacggtagtaccccaacactcggcgaaacccctaaagaagcggcacaccacgctggccctgaattacagaggactggtcggttattcggaggcttgattctagacatcaaacgtaaagcgcctttttttctgtcagatttcaaagacgctctcagtttacaatgtctggcgtccattcttttcctgtactgtgcctgcatgagccccgtcatcacctttgggggtctgctcggcgaggctacggagggcaggatctccgcaattgaatctctgttcggcgcaagtctaactgggattgcttacagtttattcgcagggcagccgctcacaatattaggcagcaccggaccagtactggttttcgagaagattctgtataaattttgcagagattaccagctgtcctacctcagcctgcgcacctctatcggtctgtggacaagttttctttgcatagtgcttgtggccacagatgcctctagcctggtctgctacataactaggttcaccgaagaggcttttgccgccttgatctgtatcatctttatttacgaagccctcgagaagctatttgatcttggggagacttacgcgtttaacatgcataacaacttggataaactcactagttattcctgcgtctgcaccgaacccccaaacccgagtaacgagacccttgcacaatggaagaaagataatatcactgctcataatatctcttggcgaaatctgacggtatctgagtgcaagaaattgcgcggcgtttttctcgggtccgcgtgtgggcatcatggaccatacattccagacgtcttgttctggtgtgttatactgttttttacaacattctttctgtcttcatttttaaagcaatttaagactaaacggtacttccctacaaaggttagaagtacaatttctgatttcgcagttttcctaactatagtcattatggtcacaatcgattaccttgtcggcgtgccatcacctaaattgcatgtaccagagaaatttgaacctacgcaccccgagaggggatggatcatttcacctctcggcgataacccttggtggacattgctgatcgccgcaattcccgcactgctgtgcaccattttaatcttcatggaccagcagattacagcagtcataatcaataggaaggagcacaaactgaagaagggggccggctaccacctcgacttgctgatggtgggcgtgatgctgggcgtgtgttcagtaatgggtcttccctggtttgtcgctgctaccgttctcagtatcagccatgttaattcacttaaggtcgaatctgagtgctctgctccgggcgaacagcctaagtttctgggaatccgtgagcagcgtgtgacggggctgatgattttcatcttgatgggcttgagtgttttcatgacatcagtgctaaaatttatccccatgcctgtactgtatggagtgttcctgtacatgggagtgagttcccttaagggcattcaactgttcgacaggatcaagctgttcggaatgccagcaaagcatcagcctgatctcatttacctgagatatgttcccctgtggaaggtgcatatctttactgtcatccaattaacttgtctagtgctcctatgggtgataaaagtgtctgccgctgctgtggtgtttcccatgatggtcctggcactcgtgtttgtacggaaattaatggatctgtgtttcactaagcgcgaattgtcgtggctggatgacctaatgcctgaatctaaaaaaaagaaagaagacgataagaagaaaaaagagaaggaggaagccgagagaatgctccaggatgacgacgacaccgtgcacctcccatttgaaggcggatcattgcttcaaatccccgtaaaagccctcaagtattcacctgacaagcctgtaagcgttaagatctcattcgaggatgaacccagaaaaaaatatgtggatgccgagacttctctctag

SEQ ID NO: 139541 - DNA, 3645 bp, Artificial Sequence
  derived and/or modified sequence
atggaaaggtttcgcttagagaaaaaactgccgggaccagatgaagaggccgtggtggatcttgggaaaaccagctctactgttaatacaaagttcgagaaagaggagctggaatctcatagagctgtgtatattggcgtccacgtgccgttttcgaaggagtcccggcgaagacatcggcaccgtggccataagcatcaccatcgaagacgcaaggataaagagtctgataaagaggatggtcgtgaaagcccatcctatgatactccctctcaacgcgtgcagttcattctgggaacagaagacgacgacgaggagcacattccacatgatcttttcactgagatggatgaattatgttatagggatggggaagagtacgaatggaaagaaaccgcccgatggttgaaattcgaagaagatgtggaggacggcggtgaccgttggagcaagccctatgtggcaaccctatcactgcactctttgttcgaactgaggtcatgtatcctgaacggtaccgtcatgctggacatgagagcatccactttggacgagattgctgatatggtgctcgacaacatgattgctagtggtcagctagatgaaagtatacgggagaatgtaagggaggctctgctcaaaagacaccatcaccagaatgaaaagcgctttacctcgcgcatccctctggtgagatcattcgccgacattggcaagaagcactccgacccacatctgctcgaaagaaatggcgaaggactctctgccagccgccattccctccggactggtctctcagcatctaatctgagcttgaggggcgaatcccccttatcgctcctccttgggcacttattgccttcctctcgagctgggacccccgctggttcacgttgtaccacacctgtccccacaccacaaaattcgccaccgtcctcaccctcaatcagcagactcacttcccgttcatcacaggaatctcaacggcaggccccagagctactcgtgtcccctgcctccgatgacatcccgaccgtggtgattcacccgccagaggaagatcttgaggccgctctaaaaggcgaagaacagaagaacgaggaaaatgtggacctgacccctggcatcttagcctctcctcagagtgcccctgggaatcttgataatagcaaaagcggagagataaaaggtaacgggtctggtggaagccgggaaaacagcactgtggacttctctaaggttgacatgaacttcatgagaaaaatcccaacgggagctgaggcatcaaatgtgctggtaggcgaagtggattttctggagcgccctataatcgcgttcgtgaggctggcccctgctgtactgttgacagggctgactgaagtccctgtccctacacggttcctttttctactgcttggcccagccggtaaggccccacagtatcacgagattggccgatccatcgctaccctgatgacagacgaaattttccatgacgtggcatataaagcaaaagacaggaacgatctgctgtccggaatcgacgagttcctggatcaagtcacagttctaccccctggggaatgggatccctccataagaattgaaccccctaagagcgttccctcacaggaaaagagaaagataccagtgttccacaatgggagtaccccaactctgggagaaaccccaaaagaagctgcacatcatgccggaccagaactccaaagaacaggtcgcctgtttggcggacttatcctggacatcaagaggaaggcacctttctttctgtccgactttaaagacgccttaagcctacaatgtcttgcatctatcctgttcctctactgcgcttgtatgagccctgtgattacatttggcggactgttgggcgaggccacagaagggagaatctcagctattgagagcctgttcggcgctagtctgacaggtatcgcttatagtttgttcgcaggccagcctctgactattctcggcagtaccggtcccgttctcgtttttgagaaaatcctgtataaattctgtcgggactatcagctatcttacctgtcactccggaccagtattggcttgtggacttccttcctctgtatcgtgctggtcgccactgacgcttcatcactggtctgctacatcacacggttcacggaggaggcctttgcagcactcatttgcatcatctttatctacgaggccctcgagaagctttttgacttgggagaaacgtatgcgtttaatatgcacaacaatctcgacaagctgacttcatatagctgcgtttgtactgagccccctaaccccagcaacgagactctcgcacagtggaaaaaagacaatattactgcccataatattagttggaggaacctaactgtatccgaatgcaaaaagctgcgtggcgtcttcctagggtccgcctgcgggcaccatggtccttacatccctgacgtcctcttttggtgcgtgattctcttcttcaccacattttttttatcctcattcctgaagcagttcaagaccaagagatatttcccaactaaagtacgctctacaatctctgattttgctgtatttctgacaatcgtaataatggtgacaatcgattacctggtaggcgtgcccagccccaaactgcacgtaccagagaaatttgaacccacgcatcccgagcgagggtggatcatttctcctcttggagataatccctggtggacactgttgattgcagccatccctgcccttttgtgcacaattctgatctttatggaccagcagatcacagccgtaatcataaacagaaaggaacataagctgaagaagggggcaggataccacctcgatttgctgatggtaggagtaatgttgggcgtctgcagcgtgatgggcctgccttggtttgtggcagcgaccgtgctgtccatctctcatgttaattccctgaaagtggagagtgaatgcagcgctccgggagaacagccaaagttcttgggcatccgcgaacagcgagtgactggcttgatgatctttatcttgatgggcttgtcagtgtttatgaccagcgtgttgaagtttattccaatgcctgttctgtacggcgtcttcctgtacatgggggtgtcttcccttaagggaatacagctgttcgaccgtataaaattatttggaatgccggctaagcaccagcctgatctgatctaccttcgatatgtgcccctgtggaaagtccatatctttactgtgattcagctcacatgcttggtgctgctgtgggtcattaaagtgtctgcagcagccgtggtatttcctatgatggttctggccctggtctttgtgcgcaaactcatggatctgtgcttcaccaaacgcgagctttcctggcttgacgacctcatgcccgagtcgaagaaaaagaaggaagacgataagaaaaagaaagaaaaagaagaggcggaaagaatgctgcaggatgatgatgatactgtccacctgccattcgagggagggtctctgctccagatccctgtcaaagcactaaagtactcgcctgataaacctgtgtcagtgaagatctcctttgaggacgagccccgaaagaagtacgttgatgccgaaacgagcctttag

SEQ ID NO: 139542 - DNA, 7757 bp, Artificial Sequence
  derived and/or modified sequence
ctcactgtccctggaatcttcaagggagttactgcattacatcatcagaaacaaggcatttctatattactatggaaagatttcgtctggagaagaagttacctggtcctgatgaagaagctgttgtggatcttggcaaaactagctcaactgtgaacaccaagtttgaaaaagaagaactagaaagtcatagagctgtatatattggtgttcacgtcccgtttagtaaagagagtcgtcggcgtcataggcatcgcggacacaaacatcaccaccggagaagaaaagataaagaatcagataaagaagatggacgggaatctccttcttatgatacaccatcccagagagttcagtttatccttggtactgaagatgatgatgaagaacatattccccatgatctcttcacggaaatggatgaactgtgttacagagatggagaagaatatgaatggaaagaaactgctagatggctgaaatttgaagaggatgttgaagatggcggtgaccgatggagtaaaccttatgtggcaactctctctttgcacagtctttttgaactaaggagttgcatcctcaatggaacagtcatgctggatatgagagcaagcactctagatgaaatagcagatatggtattagacaacatgatagcttctggccaattagacgagtccatacgagagaatgtcagagaagctcttctgaagagacatcatcatcagaatgagaaaagattcaccagtcggattcctcttgttcgatcttttgcagatataggcaagaaacattctgaccctcacttgcttgaaaggaatggggaaggcctttcagcctcccgccactctttgcgaacaggtctgtctgcctcaaacctttccttgagaggagaatcacctttatctcttcttcttggtcatcttcttccttcttcaagagctggaacccctgcaggctcaaggtgtacaaccccagtacccacccctcaaaacagtcctccttctagccctagcatcagccgcctgacctccagaagttcccaagagagtcagcgtcaggccccagaactactggtttcacctgccagtgatgatattcccacagtagtaattcatccgcctgaggaagacttagaagcagcgctgaaaggcgaggagcagaagaatgaggaaaatgttgacttaactccaggtattttggcctctccccagtctgctcctggaaacttggacaatagtaaaagtggagaaattaaaggtaatggaagtggtggaagcagagaaaatagtactgttgacttcagcaaggttgatatgaatttcatgagaaaaattcctacgggtgctgaggcatccaacgtcctggtgggcgaagtagactttttggaaaggccaataattgcatttgtgagactggctcctgctgtcctccttacagggttgactgaggtccctgttccaaccaggtttttgtttttgttattgggtccagcgggcaaggcaccacagtaccatgaaattggacgatcaatagccactctcatgacagatgagattttccatgatgtagcttataaagcaaaagacagaaatgacctcttatctggaattgatgaatttttagatcaagtaactgtcctacctccaggagagtgggatccttctatacgcatagaaccaccaaaaagtgtcccttctcaggaaaagagaaagattcctgtgtttcacaatggatctacccccacactgggtgagactcctaaagaggccgctcatcatgctgggcctgagctacagaggactggacggctttttggtggtttgatacttgacatcaaaaggaaagcaccttttttcttgagtgacttcaaggatgcattaagcctgcagtgcctggcctcgattcttttcctatactgtgcctgtatgtctcctgtaatcacttttggagggctgcttggagaagctacagaaggcagaataagtgcaatagagtctctttttggagcatcattaactgggattgcctattcattgtttgctgggcaacctctaacaatattggggagcacaggtccagttctagtgtttgaaaaaattttatataaattctgcagagattatcaactttcttatctgtctttaagaaccagtattggtctgtggacttcttttttgtgcattgttttggttgcaacagatgcaagcagccttgtgtgttatattactcgatttacagaagaggcttttgcagcccttatttgcatcatattcatctacgaggctttggagaagctctttgatttaggagaaacatatgcatttaatatgcacaacaacttagataaactgaccagctactcatgtgtatgtactgaacctccaaaccccagcaatgaaactctagcacaatggaagaaagataatataacagcacacaatatttcctggagaaatcttactgtttctgaatgtaaaaaacttcgtggtgtattcttggggtcagcttgtggtcatcatggaccttatattccagatgtgctcttttggtgtgtcatcttgtttttcacaacattttttctgtcttcattcctcaagcaatttaagaccaagcgttactttcctaccaaggtgcgatcgacaatcagtgattttgctgtatttctcacaatagtaataatggttacaattgactaccttgtaggagttccatctcctaaacttcatgttcctgaaaaatttgagcctactcatccagagagagggtggatcataagcccactgggagataatccttggtggaccttattaatagctgctattcctgctttgctttgtaccattctcatctttatggatcaacaaatcacagctgtaattataaacagaaaggaacacaaattgaagaaaggagctggctatcaccttgatttgctcatggttggcgttatgttgggagtttgctctgtcatgggacttccatggtttgtggctgcaacagtgttgtcaataagtcatgtcaacagcttaaaagttgaatctgaatgttctgctccaggggaacaacccaagtttttgggaattcgtgaacagcgggttacagggctaatgatttttattctaatgggcctctctgtgttcatgacttcagtcctaaagtttattccaatgcctgttctgtatggtgttttcctttatatgggagtttcctcattaaaaggaatccagttatttgaccgtataaaattatttggaatgcctgctaagcatcagcctgatttgatatacctccgttatgtgccgctctggaaggtccatattttcacagtcattcagcttacttgtttggtccttttatgggtgataaaagtttcagctgctgcagtggtttttcccatgatggttcttgcattagtgtttgtgcgcaaactcatggacctgtgtttcacgaagagagaacttagttggcttgatgatcttatgccagaaagtaagaaaaagaaagaagatgacaaaaagaaaaaagagaaagaggaagctgaacggatgcttcaagatgatgatgatactgtgcaccttccatttgaagggggaagtctcttgcaaattccagtcaaggccctaaaatatagtcctgataaacctgtgagtgtgaaaataagttttgaagatgaaccaagaaagaaatacgtggatgctgaaacttcattatagaattgaaccaagaggcattatacatatagatatatacatatgtaatgtgtgcgtatcatgtcactatatataagaatattgtatgtcatgctgtttatgtgtgactaccgggtttttaaaagtagtgtctggagtttgtaatgagcaccgtggagactatgtatttaatgaaatgctctctttgaagtgaggtacatggttcttaactattcaaatatttattctgttagaaaaaaaaattttctgttttgcaatagaaggatgtggagaaatgctttcagtctacttttcttaaatctctgttcatcagtggcaattcgtaaaaaccttaagtgatactttgtttatatgtttataatttttaggtgtttcctgaaattttcacatattatttcacttttgttagtgctttatgggaagaatagggagtctataccagtgctgtgggaaaaatggtaacatttcagggcttctctatttgtgtttcatttctgtagatgtccatcgtgtttcactaactggcgttttcttagccatagagatgactgtagaacaatagaaactttaataatgatagtttttaacttttatgtttaaattttttttaaatcttaaaaccttcatatctaggtatccattgtgacagacaagtaaaattgcaggtgatttgataattaagcacccataccatttataacttctgaatttaaaaagttatacaatgccagtttgcaatagttgattttgatgcctttgtagaatattttttctgaatccttatgctcttttaaagccaatgattcccactctgttctctgccttgtctctctttgtcttaaaatgctttagtttccatcaggttcaagttcttgactattattctcttataagtagtaggcgtaaataatcaggagttagaattctctcagaagggtctatgatcagtattactttattaagaattacctttcattttctctttatgttattctttcacttttgtagattacatttaatagcttgttacctgtgattttattttaaaatatttattttgatatgatgcttaaatattatataaacatttggaaaagtaacaaatagagtaaattgttaatgtaaatagttggtgcttactttcatttatgtttattatcttaaagcaattgatagattttacatctttgatataaagcactgccatatttatattttaaaaggaaattagacattttatatgtagctcagattaatgacatttttattttgtgtattagtttttgcttttctgagctttttaaagtctaacaaatctttttagtcatcttttatatacttttagttccacatgaaataaatgttgttaagcctgtaggactggatgaatggggttgtgaaactgatttgacaagagaataatttacaaaaatcaaatgagtattgagaagccacagaaatatcaaaaatggtgacatcactattaggatgaaaattttatgaaattccaatgctccctttaaccatataattaaattacaaaggtatacataattaatctaataaaggatcatgaggaatgccaaaagctgaaattttagcaagtctggtgttttaaattcattataaactatttattaactaatgtaatgtcctcctctaagaccatattgtaagagtcttgttaaaatgatggattcaacttctgcctcggatgagaggttggaaatgtagctgcttttctttagaaaatatgtagctgtcatcatttggtactgcctaaaaagagttagactctattggcaattgatagagtattacccacggtgcttattattgtttatgagcttccattgtaatgattcctttttatttgtagcagcataattatttccaaagaccccagtatttgctgctatttttaaaactcccctgatgtacctgaacaagaggatttcctcacatcatttccttgtgtctggacatcaggggtaacaactgtacttactttacaggaagaaattttaaaactgaaaactacctgggatcatagtgtttctgtgattttatttaattgtgtatagtaattatccagtgccagaaaaaccgtcacttgcaaaatactttgcactcaaaatgtttttacaatgcttctaaatgttactggtttctgctttcttttgactacttgactgacaaaatgatctgactactccatttaagagcaaaggtaactcatgtttaggtaattaactgcttgttttaagtgattatatttcttccactgtttttgaaaaataatcaaagatagcattcattgagagacagtgacagatataatttactacatatattgatttttaaataaagttgccttaaataagtgtatgtaagcagtagtagttgctatgtactgatttacctcaaggtgcaaaataattaaacctgtacatattccatttacaaaataaattcagccctgcactttctttagatgccttgatttccagaatggagcttagtgctactgaataccctggccacagagccacctcaggatattcttttctccaccctagtttatttatttatagatatctgtttacaaagtctgtagtaaatcctgatgctgaccatctgaaatgtactttttttctgaatgctgtttcaatctaaaatagcagcttttgagaaaacaatgatgtaaattccttatgataaaaggatgattctatatattctttaatgatattaaatatgccgaagccaagcacacagtctttctaaagtgtgtgtatgtttgtgtgaatgtgaatgatactgatcttatatctgttaaaagttgttttaaaaagctgtggcatcccattgttcatatttgccaagtcttctgtaaagatgtctaggacgaaatattttatgtgctaatgcatgtatttgtaaaccagatttgtttaccactcaaaattaacttgttttcttcatccaaaaaagtttatttcttccacgtacttaaattttctgtgtgggtataatatagctttctaatttttttctttcacaaaggcaggttcaaaattctgttgaaagaaaaatgctttctgaaactgaggtataacaccagagcttgctgtttaaaggattatatgatgtacatcagttctataaatgtgctcagcagtttaacatgtgaatcctgttttaaagtgctcagatttcaactgtgtaagccattgatataacgctgtaattaaaaatgtttatatgaaataacttaatgttttaaatttatttatgtagatcacatcatttttatcgtatgcagtgcaaatatgtgaaatgtcttttggtttattccaacaattatttattttagaaagtaagtttaaagactttaaggacattcaaagtttaaaatagtgttcaaattgcaaaatttggcaatcttcatataaattggtttcttttctaacttttcaaaaactaacattaaatgtcaattataggaaaacatagttggaaatgtaatcatccaaagatcatttttaaaatgaaatttaattagcacatattgaacatttgacttaattgttaaaccccagttttgttttgtttttttaatcagatttttgcacactgattagtttttgtgttgtggcttttgttgctttattattcaaggttttttttttttttcttccccatgggggagattgtcttccaatgtttaactacgtttaaataaataaaaattgaattttattgttcatttatataaaatctgataccttgatgtaatttcacaatacagttccaatttttatggcttttataattacaatgatattttcttctataataaaatccaaagtaaacatttaaattgtagaactgatatttttcatttatatgaagtataagcctctactgggtctatattgtgaatcatcctgcctttcaaatttgtttcataattgttagatgaaaactatttttttggagatgttactgaagttgattgagcaataaaagtctacttaatta

SEQ ID NO: 139543 - protein, 280 aa, Artificial Sequence
  derived and/or modified sequence
MRRAELAGLKTMAWVPAESAVEELMPRLLPVEPCDLTEGFDPSVPPRTPQEYLRRVQIEAAQCPDVVVAQIDPKKLKRKQSVNISLSGCQPAPEGYSPTLQWQQQQVAQFSTVRQNVNKHRSHWKSQQLDSNVTMPKSEDEEGWKKFCLGEKLCADGAVGPATNESPGIDYVQIGFPPLLSIVSRMNQATVTSVLEYLSNWFGERDFTPELGRWLYALLACLEKPLLPEAHSLIRQLARRCSEVRLLVDSKDDERVPALNLLICLVSRYFDQRDLADEPS

SEQ ID NO: 139544 - DNA, 843 bp, Artificial Sequence
  derived and/or modified sequence
atgagaagagccgagctggccggcctgaagaccatggcctgggtgcccgccgagagcgccgtggaggagctgatgcccagactgctgcccgtggagccctgcgacctgaccgagggcttcgaccccagcgtgccccccagaaccccccaggagtacctgagaagagtgcagatcgaggccgcccagtgccccgacgtggtggtggcccagatcgaccccaagaagctgaagagaaagcagagcgtgaacatcagcctgagcggctgccagcccgcccccgagggctacagccccaccctgcagtggcagcagcagcaggtggcccagttcagcaccgtgagacagaacgtgaacaagcacagaagccactggaagagccagcagctggacagcaacgtgaccatgcccaagagcgaggacgaggagggctggaagaagttctgcctgggcgagaagctgtgcgccgacggcgccgtgggccccgccaccaacgagagccccggcatcgactacgtgcagatcggcttcccccccctgctgagcatcgtgagcagaatgaaccaggccaccgtgaccagcgtgctggagtacctgagcaactggttcggcgagagagacttcacccccgagctgggcagatggctgtacgccctgctggcctgcctggagaagcccctgctgcccgaggcccacagcctgatcagacagctggccagaagatgcagcgaggtgagactgctggtggacagcaaggacgacgagagagtgcccgccctgaacctgctgatctgcctggtgagcagatacttcgaccagagagacctggccgacgagcccagctag

SEQ ID NO: 139545 - DNA, 843 bp, Artificial Sequence
  derived and/or modified sequence
atgagacgcgccgagcttgcagggcttaagaccatggcatgggtcccagcggagtctgctgtggaggagctcatgccgcggctcctgcccgtggagccctgcgacttaacagagggtttcgacccgtccgtcccacctcgtaccccacaggaatacctccgcagagtgcagatcgaggcagcacaatgtcccgatgtggtcgtcgcacagatcgaccccaaaaagctcaagagaaaacagagcgtgaatattagcctgagtggatgtcagcctgcacccgaaggttattccccaacacttcaatggcagcagcagcaagtggcacaatttagcactgtgcggcagaacgtcaacaagcaccgctcacattggaagtcacagcagttagactcaaatgtgactatgccgaagagcgaggacgaagaagggtggaagaaattctgccttggcgaaaagctctgcgcagatggcgcagtcgggcccgcaacgaatgaatcccccggcattgactacgttcagatcggatttcctcctcttctctctatcgtgtccagaatgaatcaggctaccgtcacatctgtgctcgagtacctctcaaactggtttggcgaacgggattttactcctgagctgggcagatggctttatgctctgctggcatgtctagagaagccgcttctgcccgaggctcattctcttattcgccagttggctagaaggtgctctgaggtaaggctgttggtggattccaaagatgatgaaagagtgccggctctgaatctcctgatctgccttgtctcccgctatttcgatcagagagatctggccgatgagcctagttag

SEQ ID NO: 139546 - DNA, 1420 bp, Artificial Sequence
  derived and/or modified sequence
taacgctccctaaactgccacttgctcagctccgcgcctaaggtgtctattagtacgcctgcgctgtgacctagaatgggcgcatgcgccgagcggaactggctggtttgaaaaccatggcgtgggtaccagcggagtccgcagtggaagagttgatgcctcggctattgccggtagagccttgcgacttgacggaaggtttcgatccctcggtacccccgaggacgcctcaggaatacctgaggcgggtccagatcgaagcagctcaatgtccagatgttgtggtagctcaaattgacccaaagaagttgaaaaggaagcaaagtgtgaatatttctctttcaggatgccaacccgcccctgaaggttattccccaacacttcaatggcaacagcaacaagtggcacagttttcaactgttcgacagaatgtgaacaaacatagaagtcactggaaatcacaacagttggatagtaatgtgacaatgccaaaatctgaagatgaagaaggctggaagaaattttgtctgggtgaaaagttatgtgctgacggggctgttggaccagccacaaatgaaagtcctggaatagattatgtacaaattggttttcctcccttgcttagtattgttagcagaatgaatcaggcaacagtaactagtgtcttggaatatctgagtaattggtttggagaaagagactttactccagaattgggaagatggctttatgctttattggcttgtcttgaaaagcctttgttacctgaggctcattcactgattcggcagcttgcaagaaggtgctctgaagtgaggctcttagtggatagcaaagatgatgagagggttcctgctttgaatttattaatctgcttggttagcaggtattttgaccaacgtgatttagctgatgagccatcttgatgtagctgatctctcagggatagaagatatttctcatgaaggcagcctaactctgaggaaaacaatgccaattcaagtacagatttcaacacatcttcaacactatgtgaagggttcacatcttaacctgtgcaattcagattgatactcagaatatgggttgatttgaatatctgaaatatcaatggaaaatcccactcagtttttgatgaacagtttgaacagttttctgtaatcaagcagcttgcatagaaattgtatgatgaaattttacataggttcttggtgctgttttgttctttttttgttttttgttgttttgttatttacttatatacatataaaattttattgaaaatatgttttggttactaaaattttgtttgactcctaacaaaagacaatggatggccttagcatcagaattaaaataatctggattaaatggcaatgtgttcatagtcagcaataaaattaaacatttttccctttaa

SEQ ID NO: 139547 - DNA, 843 bp, Artificial Sequence
  derived and/or modified sequence
atgagaagagctgagctggccggcctgaagaccatggcctgggtgcctgctgagagcgctgtggaggagctgatgccccggctgctgcctgtggagccctgtgacctgacagagggctttgaccccagcgtgccccccaggaccccccaggagtacctgcggcgggtgcagatcgaggccgcccagtgcccagatgtggtggtggcccagattgaccccaagaagctgaagaggaagcagagcgtgaacatcagcctgagcggctgccagcctgcccctgagggctacagccccaccctgcagtggcagcagcagcaggtggcccagttcagcacagtgcggcagaatgtgaacaagcacaggagccactggaagagccagcagctggacagcaatgtgaccatgcccaagtcagaagatgaggagggctggaagaagttctgcctgggggagaagctgtgtgctgatggagctgtgggccctgccaccaatgaaagccctggcattgattatgtgcagatcggcttcccccccctgctgagcatcgtgtccaggatgaaccaggccaccgtgacctctgtgctggagtacctgagcaactggtttggagagcgggacttcaccccagagctgggccgctggctgtatgccctgctggcctgcctggagaagcccctgctgcctgaggcccacagcctcatccggcagctggcccggcgctgcagcgaggtgcggctgctggtggacagcaaggatgatgagcgggtgcctgccctgaacctgctgatctgcctggtgagccgctactttgaccagagggacctggctgatgagcccagctag

SEQ ID NO: 139548 - DNA, 843 bp, Artificial Sequence
  derived and/or modified sequence
atgcggcgggccgagctggccggcctgaagaccatggcctgggtgcctgctgaatctgctgttgaagaactgatgccacggcttttgccagtggaaccatgcgacctaactgagggcttcgacccaagcgttccccctagaacacctcaagaatacctccgaagggttcagatcgaagccgcgcaatgccccgatgtggtggtggcccaaatcgatcctaagaaactgaagcgcaagcagagcgtgaacatctcattgtccggttgccaacccgctccagaaggctactctcctactctgcagtggcagcagcagcaagttgcccaattcagtaccgtcagacagaacgtgaacaagcaccgttctcactggaagtctcagcagctcgattctaacgtgacaatgccaaaaagtgaagatgaggagggctggaaaaagttttgcttgggggaaaagctctgtgccgatggggcggtcgggccagccaccaacgagtctcccggaattgactacgtccagatcgggttccctcccctcttgtctattgtcagcagaatgaaccaggcaactgtgacaagcgtgctggagtacttgtctaactggtttggtgagcgcgacttcacgcctgaacttggacggtggctatacgctttactggcttgcctggagaagccattgctgcccgaagcccatagcctcatcaggcagctggccaggaggtgtagcgaggtccggctactggtcgatagcaaagatgatgaacgggttcctgcacttaatctgctcatctgtcttgtgtctcgatacttcgaccaaagagacctggctgatgaaccatcttag

SEQ ID NO: 139549 - DNA, 843 bp, Artificial Sequence
  derived and/or modified sequence
atgagacgcgcagagttggcaggcctgaaaaccatggcctgggtacccgcagagtcagccgtggaggagctgatgcctcgccttttgcccgtggaaccctgtgatttgacagagggctttgacccctcggtgcctccccgtacaccgcaggaatacctgcggagggtccaaatcgaggccgcacagtgtccagacgtagtagtggcgcaaattgatcccaaaaaactgaagcggaagcagagcgtgaatatatctctctctggttgtcaacccgcacccgagggctattctccgaccctgcaatggcagcagcagcaggtagctcagttctctactgtccgccagaatgtgaacaagcaccgctcccattggaagtcacagcagctcgactcaaatgtgacaatgcccaaatcagaggatgaggagggctggaaaaaattttgcctgggcgagaaactatgcgcagacggagctgtgggaccggctactaacgagtcacccggtatcgactatgttcaaatagggtttcctccgcttctgtcaattgtctcgcgtatgaaccaggccactgtcacatcagttctggaatatctgtcaaactggtttggagaacgtgactttacacctgaactggggcgatggctgtacgccctactcgcctgtttggaaaagcccctgctacccgaagcacacagcctgatcagacagctggcacggaggtgcagcgaagtaagactgctggtagatagtaaggatgacgagcgagtccccgctctgaatctgcttatttgcttggtcagccggtacttcgaccagcgggacttggcagacgagccatcttag

SEQ ID NO: 139550 - protein, 181 aa, Artificial Sequence
  derived and/or modified sequence
MCKGLAALPHSCLERAKEIKIKLGILLQKPDSVGDLVIPYNEKPEKPAKTQKTSLDEALQWRDSLDKLLQNNYGLASFKSFLKSEFSEENLEFWIACEDYKKIKSPAKMAEKAKQIYEEFIQTEAPKEVNIDHFTKDITMKNLVEPSLSSFDMAQKRIHALMEKDSLPRFVRSEFYQELIK

SEQ ID NO: 139551 - protein, 201 aa, Artificial Sequence
  derived and/or modified sequence
MCARNISQDILILQMHSAHWHINGKYEEKSNLMFWAKEIKIKLGILLQKPDSVGDLVIPYNEKPEKPAKTQKTSLDEALQWRDSLDKLLQNNYGLASFKSFLKSEFSEENLEFWIACEDYKKIKSPAKMAEKAKQIYEEFIQTEAPKEVNIDHFTKDITMKNLVEPSLSSFDMAQKRIHALMEKDSLPRFVRSEFYQELIK

SEQ ID NO: 139552 - protein, 73 aa, Artificial Sequence
  derived and/or modified sequence
MAEKAKQIYEEFIQTEAPKEVNIDHFTKDITMKNLVEPSLSSFDMAQKRIHALMEKDSLPRFVRSEFYQELIK

SEQ ID NO: 139553 - DNA, 546 bp, Artificial Sequence
  derived and/or modified sequence
atgtgtaaaggattggctgctctcccccacagttgtctcgagcgagccaaggagataaaaatcaaattagggatcctgcttcagaaacctgatagcgtgggtgatctggtcatcccgtacaacgagaaaccagagaaacccgcaaagacccaaaagacgtccttggacgaggccttacagtggcgggattccctggataaactgctgcaaaataattatgggctggcttcgtttaagagttttctgaagtctgagtttagcgaggagaaccttgaattctggatcgcatgcgaggattacaagaaaattaagagcccagcgaaaatggcagaaaaagcaaagcagatttacgaggagttcattcagaccgaggcaccgaaggaagtgaacatagatcacttcacaaaggacatcactatgaaaaacctggtggagccaagcttatcctccttcgacatggctcagaaacgaatacacgccttgatggaaaaggattcgttgcctcggtttgtgaggagcgaattttaccaggagctcatcaagtag

SEQ ID NO: 139554 - DNA, 606 bp, Artificial Sequence
  derived and/or modified sequence
atgtgcgctagaaatatcagccaggatatactcatcctgcaaatgcacagtgcgcattggcacatcaatgggaaatacgaggagaaaagtaacctgatgttctgggccaaggagataaagattaagcttgggatactgctccagaagcctgatagtgttggtgatttagtgatcccgtacaacgagaagcccgagaagccggccaaaacccaaaaaacctcgttggatgaggcactgcagtggagagactccttggacaagttgctccagaataactatggcctggcttcctttaagagctttctcaagagcgagttctcagaagagaacctcgagttttggatcgcttgtgaggactataagaaaatcaaatcccccgcgaagatggcggaaaaggctaaacagatctacgaagagtttatccagaccgaggctcctaaggaggtcaatatcgatcacttcaccaaagacattactatgaagaacctcgtggaaccctctttgtcctcattcgatatggcgcaaaagcggattcacgcattgatggagaaagacagcttgccccggttcgtaaggtctgagttctaccaggaattgatcaagtag

SEQ ID NO: 139555 - DNA, 546 bp, Artificial Sequence
  derived and/or modified sequence
atgtgcaagggcctggccgccctgccccacagctgcctggagcgggccaaggagatcaagatcaagctgggcatcctgctgcagaagccagacagcgtgggggacctggtgatcccctacaatgagaagccagagaagccagccaagacccagaagaccagcctggatgaggccctgcagtggagggacagcctggacaagctgctgcagaacaactacggcctggccagcttcaagagcttcctgaagtctgagttcagcgaggagaacctggagttctggatcgcctgtgaggactacaagaagatcaagagccctgccaagatggccgagaaggccaagcagatctatgaggagttcatccagacagaggcccccaaggaggtgaacatcgaccacttcaccaaggacatcaccatgaagaacctggtggagcccagcctgagcagctttgacatggcccagaagagaattcatgccctgatggagaaggacagcctgcccaggtttgtgcgctctgagttctaccaggagctgatcaagtag

SEQ ID NO: 139556 - DNA, 606 bp, Artificial Sequence
  derived and/or modified sequence
atgtgtgccaggaacatcagccaggacatcctgatcctgcagatgcacagcgcccactggcacatcaatggcaagtatgaggagaagagcaacctgatgttctgggccaaggagatcaagatcaagctgggcatcctgctgcagaagccagacagcgtgggggacctggtgatcccctacaatgagaagccagagaagccagccaagacccagaagaccagcctggatgaggccctgcagtggagggacagcctggacaagctgctgcagaacaactacggcctggccagcttcaagagcttcctgaagtctgagttcagcgaggagaacctggagttctggatcgcctgtgaggactacaagaagatcaagagccctgccaagatggccgagaaggccaagcagatctatgaggagttcatccagacagaggcccccaaggaggtgaacatcgaccacttcaccaaggacatcaccatgaagaacctggtggagcccagcctgagcagctttgacatggcccagaagagaattcatgccctgatggagaaggacagcctgcccaggtttgtgcgctctgagttctaccaggagctgatcaagtag

SEQ ID NO: 139557 - DNA, 546 bp, Artificial Sequence
  derived and/or modified sequence
atgtgcaagggcctggccgccctgccccacagctgcctggagcgggccaaagagattaagatcaagttagggattttactccagaaacctgactccgtcggcgatctggtgatcccttataacgagaaacccgagaaacccgcaaagactcagaagacctcactggacgaggccttgcagtggcgggatagcttggacaaacttctgcaaaacaactacggattggccagcttcaagtcatttctgaagtcggaattttctgaggaaaatctggagttttggatagcatgcgaagactacaagaaaataaagtcaccggctaagatggccgagaaagcaaagcagatttatgaggaattcattcagactgaagcccccaaggaagtgaatatcgaccactttactaaagatatcacaatgaagaaccttgttgaaccaagcctctctagcttcgatatggcacagaagcgcatccatgccctaatggaaaaagacagcctccctcgatttgttcgctctgagttctatcaggagctgataaaatag

SEQ ID NO: 139558 - DNA, 606 bp, Artificial Sequence
  derived and/or modified sequence
atgtgcgcccggaacatcagccaggacatcctgatcctgcagatgcattccgcccattggcacatcaacggaaagtatgaagaaaaatccaacctgatgttttgggcgaaggaaatcaaaattaaactggggattttgctgcagaaacccgattccgtgggcgacctggtgattccttataatgaaaaacccgagaagccggctaagactcagaagacaagtctcgacgaggcactacagtggcgcgacagcctggacaagctactgcagaataattacggactggcatctttcaagagcttcttaaagagcgaatttagcgaagagaaccttgaattttggattgcctgtgaagattataagaagatcaaaagcccagcgaaaatggcagaaaaagccaagcaaatatacgaggagttcattcaaaccgaagcccccaaagaggtgaacattgatcacttcacaaaagacataacaatgaaaaatctcgttgagccttctctgtcaagctttgatatggcacaaaaaaggatacacgccctgatggagaaagactctttgcccagattcgtgcgttctgagttctaccaagaactgatcaagtag

SEQ ID NO: 139559 - DNA, 546 bp, Artificial Sequence
  derived and/or modified sequence
atgtgcaaagggctcgcggctctacctcatagctgcctggaaagagccaaagagatcaaaatcaagttggggatcctgctgcagaaacccgatagcgttggagatctggtgatcccatataatgagaagccagaaaaacccgcaaaaacccaaaaaacttcactcgacgaggcactgcaatggagggactctttagataaattactccagaacaactacgggctggcctcctttaaaagctttctgaagtctgaattttcagaagagaacctggagttctggattgcatgcgaagactacaaaaagatcaaatcacctgctaagatggctgaaaaggccaagcagatatacgaggagtttatccagactgaggcacctaaggaagtgaatatagatcatttcaccaaagacatcaccatgaagaatctggtcgaacctagtttatccagctttgacatggcacagaaacgaattcatgctctaatggagaaagattctctgcccaggttcgtccggtccgagttctaccaggagctgattaaatag

SEQ ID NO: 139560 - DNA, 606 bp, Artificial Sequence
  derived and/or modified sequence
atgtgcgccagaaacattagtcaagatatcctgattctgcagatgcacagcgcacattggcatatcaatggcaagtacgaggagaaatccaacctgatgttctgggctaaggaaatcaagatcaagttgggtatcctcctgcagaagccagattcagttggtgatctggtgataccatataacgagaagcccgagaaacctgccaaaactcagaagacttccctcgatgaggcactgcaatggagggatagtctcgacaaattactgcagaacaattacgggcttgctagctttaaaagctttctcaagtctgagttctccgaggagaatcttgagttctggatagcttgcgaggactacaaaaaaatcaagtctccagccaaaatggcagagaaggcgaaacagatctatgaggaatttatccagacagaagcccctaaggaggtgaatattgatcatttcaccaaagacatcactatgaaaaatctggtggagcccagccttagctcattcgacatggctcagaagcgcatccacgctctcatggagaaggactccctgccccgtttcgtccgctccgagttttaccaggaactgataaagtag

SEQ ID NO: 139561 - DNA, 5862 bp, Artificial Sequence
  derived and/or modified sequence
gagtgttgtgataagagcagatgaaagccttatgccacagtagtgcctgtagcagagaaaggattccctcctccacctcagggcccactgctgctgctctccagcctgcagtttcctctaaggctctggattggctggaagagcaacagagggctgggaaagagcttctatatatacctcaggaggaaaggcatcccagacagttttgaagttttcaaagactggctctgctgttaagaagttgtacttaaagcggaggagctaagccacctgccaaaatgtgcaaaggacttgcagctttgccccactcatgcctggaaagggccaaggagattaagatcaagttgggaattctcctccagaagccagactcagttggtgaccttgtcattccgtacaatgagaagccagagaaaccagccaagacccagaaaacctcgctggacgaggccctgcagtggcgtgattccctggacaaactcctgcagaacaactatggacttgccagtttcaaaagtttcctgaagtctgaattcagtgaggaaaaccttgagttctggattgcctgtgaggattacaagaagatcaagtcccctgccaagatggctgagaaggcaaagcaaatttatgaagaattcattcaaacggaggctcctaaagaggtgaatattgaccacttcactaaggacatcacaatgaagaacctggtggaaccttccctgagcagctttgacatggcccagaaaagaatccatgccctgatggaaaaggattctctgcctcgctttgtgcgctctgagttttatcaggagttaatcaagtagtaatttagccaggctatgaaatcatcctgtgagttatttcctccataataaccctgcatttcccattaatctacatatcttcccacagcagctttgctcagtgatacccacatgggaaaaatcccaggggatgttgcttactctttttgcccacactgctttggatacttatctactgtccgaaggccttctttccccactcaattcttcctgccctgttattaattaagatatcttcagcttgtagtcagacacaatcagaatcacagaaaaatcctgcctaaggcaaagaaatataagacaagactatgatatcaatgaatgtgggttaagtaatagatttccagctaaattggtctaaaaaagaatattaagtgtggacagacctatttcaaaggagcttaattgatctcacttgttttagttctgatccagggagatcacccctctaattatttctgaacttggttaataaaagtttataagatttttatgaagcagccactgtatgatattttaagcaaatatgttatttaaaatattgatccttcccttggaccaccttcatgttagttgggtattataaataagagatacaaccatgaatatattatgtttatacaaaatcaatctgaacacaattcataaagatttctcttttataccttcctcactggccccctccacctgcccatagtcaccaaattctgttttaaatcaatgacctaagatcaacaatgaagtattttataaatgtatttatgctgctagactgtgggtcaaatgtttccattttcaaattatttagaattcttatgagtttaaaatttgtaaatttctaaatccaatcatgtaaaatgaaactgttgctccattggagtagtctcccacctaaatatcaagatggctatatgctaaaaagagaaaatatggtcaagtctaaaatggctaattgtcctatgatgctattatcatagactaatgacatttatcttcaaaacaccaaattgtctttagaaaaattaatgtgattacaggtagaggccttctaggtgagacacttttaaggtacactgcattttgcaaaaaaaaaaaaaaaaagtaatcttttagcaaccccagtattccttcactatttcgcttcctgcattagcaaattttacttacagtcaaaagtgcagatttatactcctgacgtgtctcattcacagctaaataataggccataggacttttggtaggtttaaacttttaattctgtatttcatgattataagtcttgctagaattttttctaatctttagtagatttgattaaataatgattcacagaatttagtaacagaatcaaactaagccatgtatgagggtaatcgagatgaggatattaactcaaaagaaatagggtgatttttaaaggattaataaaattctgaaatgttaagtagaagattacattgtctagtcttgtatttcctccttctgttgctctctttcattcacacactctcagtttctcatatttgtagctcatttatttggttatttcctaagaatattgaaagtgaagcaactatgtgactgtattcttcaggtaaacactgactgcgcttgttggattttccctatttttgtgacttcaagaataatatgccctgctgaatacatgccatttcacattctgaaactgggtagagtggttgggtgttctgccaacaattgctagtggtgtgaattcattcatatttgccagtattgctcacttcaaagaaactccttcatcaagcagtccagagctaggccagatcaatgctacaatcatgaagttctcattgcatgcaattgtgtaggattgacaaggaactcagataaaaatttccagggtgcacttccagaaccagcttcaacatatgtctacattgcccccaagttaataaagtgccaaccctttactctctcatacagccagaaatgttagaaatccaaaatcttggtgcattattttttcataaacgctaaaacatttgaagaaacaatttaattatttaaaattcaagtattttattcacattatttgcaatatccaaatgtttaaaaattcccagataattaactagctattacagatctcacctagagggttgatgttatgaagactccagtggactgtactcacaaattgactggacaccctatgaaagtgggtagacctctcagcggaaaataagaagggcttttacctacagggcaggacagggtcccatgagagcagttctgtggagatataaaaagaatggaagaaggaatgccttatagtgatattgtgacattatatctatatatctacatatatctatctatctatatctacatctatataatcttacatttaaaattgtattcctacacatattagaaactcttctaataaatgaagtaaaaaaattaaaaagaatacaaatattccagccccaaatgagaaatcaaacatattaaaattgttcaagaaaatttctttgaacacttctgaaagtttttggaaacttagaaaagagggaaaaaaatccagtgttactagtaatttccatggtaatacagataaaatacattcttttaattctgggaaattagaaaaagtggggtgatctttccaggaaaaacatgtgtaacatctgcttatcactccagctccctcctcctcctcctctccacgttcccttgagtaaatgtctgggaaagcatgaagcttgatgcaagaaccctgttgtactggcgttttcctcccctgtgaaaacgtaactactgttgggagtgaattgaggatgtagaaaggtggtggaaccaaattgtggtcaatggaaataggagaatatggttctcactcttgagaaaaaaacctaagattagcccaggtagttgcctgtaacttcagtttttctgcctgggtttgatatagtttagggttggggttagattaagatctaaattacatcaggacaaagagacagactattaactccacagttaattaaggacgtatgttccatgtttatttgttaaagcagtgtgaatagccttcaagcatgtgaataatcttccatcttccccgccacacatacacacacacactttttgtttctttcaggtagacaccttttaaaatgcagaactaactgaggcatttcagtaactttgctttcaaatcaataaagtcaaatgtatggaaacattttgtgccctactctccataccccgtgtactcaaattctctactgtatgaattatgctttaagtagaattcagtgccaaggagaacttggtgaaataaattattttaattttttttttatcctttacaaagccatggattttatttggttgatgtgtgctctgtacacaagccatttcaataggatggagctgttaattattttccaaagagtaatagacatgcaaaagtttcaataaaaactgggccattaacaaataaattaataaactaataagcattcccttctaggtttttgccaaactgcctatccaataacaaatttgagaatcgttgtaaaagctagttatatttcagagaaatgattttcattattgaaactgttctccctagcaggccattttccctttttcctgggagtttagcaagtttaggagagaatagtcatgaaaagaaagggaagaaaggggagaagggaagaggttaaaaagtaagtgctcagacctatgaacgtaatccctttgctacaaatatttaagagcagctcagcttggttgaaactgagttttgtcatcttccatatttgcaggaaggtattttctgacttgcaatgcagctagatgtaaaattttattttatcatcctagaaagccttgactagaaaaatgaataaatattgagggtttcctgtccatatctggcttgcatgtgccagaaagcagagaatagaaaatgtaatctccaacatccaagcatcgaaacccaaggggtaggcaattctatgtaggttttggacatgaagtttggtgcatcttggtttatgctggctcaactgctattaaacctctctggcttatagtctcttcattctattagacaagcacgtatcgaacacttgcttcgcacaaggctctttagttaacaatttagcagctactgtttgtgttaaacacacttttcaccaaataggttctgaggcaaacgagagcaatgactatttaaagaaaggctttcccagcatcacttacacatcccaaaactaaaaagatcaactcttccaactgagaaaagactcctggctttgaatggaaacttacagcagagagtcacaggccacggcaacaacaacgacaacaacaaacatttggaatattattctcaactcacgttttaataatacatcttattatttttctagtagagaaactacaaatcagcctcttcaacatttatatacagtttaataagcctcttgcaagttacttgttctctcacctgaggtatttttttcctccccaccttgcccctgttcctcccttcctcttctccctttgcaagaggaaatatttaacatatttgggtccaacttcaataatgtaataattaatacattaaaagcatttaacttcctttctagaaaaatgcacaggctaaggcatagacaaaacaaagagaaatgctgagaaatttgccactggagacaagcaatctgaataaatatttgccaaaagttctttttatgtcatatagtgtcaggatttgaaggagctatttttttttaatgttgcaactagcaactcatcttcggaagacacagccaggagaatgaagtagaagtgaaaggtttataaatccatttgtaagcatttatcccatatattttaaattcaagaaaaattgtgtttatctttagaattttgtattcaatactttatgtactatgtgactcatgcttctggataaataaagcaccaaatatgtatctgtaaccacaatcacacatattatattaaatatatatctatataa

SEQ ID NO: 139562 - DNA, 934 bp, Artificial Sequence
  derived and/or modified sequence
agaagtgtctgacaaaacaaagaaacaaaacctcagtgaaaaatgtgcgcaagaaacatttcacaggatattctcatcttacagatgcacagtgctcattggcatatcaatggcaaatatgaggaaaagagtaacctgatgttctgggccaaggagattaagatcaagttgggaattctcctccagaagccagactcagttggtgaccttgtcattccgtacaatgagaagccagagaaaccagccaagacccagaaaacctcgctggacgaggccctgcagtggcgtgattccctggacaaactcctgcagaacaactatggacttgccagtttcaaaagtttcctgaagtctgaattcagtgaggaaaaccttgagttctggattgcctgtgaggattacaagaagatcaagtcccctgccaagatggctgagaaggcaaagcaaatttatgaagaattcattcaaacggaggctcctaaagaggtgaatattgaccacttcactaaggacatcacaatgaagaacctggtggaaccttccctgagcagctttgacatggcccagaaaagaatccatgccctgatggaaaaggattctctgcctcgctttgtgcgctctgagttttatcaggagttaatcaagtagtaatttagccaggctatgaaatcatcctgtgagttatttcctccataataaccctgcatttcccattaatctacatatcttcccacagcagctttgctcagtgatacccacatgggaaaaatcccaggggatgttgcttactctttttgcccacactgctttggatacttatctactgtccgaaggccttctttccccactcaattcttcctgccctgttattaattaagatatcttcagcttgtagtcagacacaatcagaatcacagaaaaatcctgcctaagg

SEQ ID NO: 139563 - DNA, 373 bp, Artificial Sequence
  derived and/or modified sequence
atgtgcaaaggacttgcagctttgccccactcatgcctggaaagatggacttgccagtttcaaaagtttcctgaagtctgaattcagtgaggaaaaccttgagttctggattgcctgtgaggattacaagaagatcaagtcccctgccaagatggctgagaaggcaaagcaaatttatgaagaattcattcaaacggaggctcctaaagaggtgaatattgaccacttcactaaggacatcacaatgaagaacctggtggaaccttccctgagcagctttgacatggcccagaaaagaatccatgccctgatggaaaaggattctctgcctcgctttgtgcgctctgagttttatcaggagttaatcaagtag

SEQ ID NO: 139564 - DNA, 546 bp, Artificial Sequence
  derived and/or modified sequence
atgtgcaagggcctggccgccctgccccacagctgcctggagagagccaaggagatcaagatcaagctgggcatcctgctgcagaagcccgacagcgtgggcgacctggtgatcccctacaacgagaagcccgagaagcccgccaagacccagaagaccagcctggacgaggccctgcagtggagagacagcctggacaagctgctgcagaacaactacggcctggccagcttcaagagcttcctgaagagcgagttcagcgaggagaacctggagttctggatcgcctgcgaggactacaagaagatcaagagccccgccaagatggccgagaaggccaagcagatctacgaggagttcatccagaccgaggcccccaaggaggtgaacatcgaccacttcaccaaggacatcaccatgaagaacctggtggagcccagcctgagcagcttcgacatggcccagaagagaatccacgccctgatggagaaggacagcctgcccagattcgtgagaagcgagttctaccaggagctgatcaagtag

SEQ ID NO: 139565 - DNA, 606 bp, Artificial Sequence
  derived and/or modified sequence
atgtgcgccagaaacatcagccaggacatcctgatcctgcagatgcacagcgcccactggcacatcaacggcaagtacgaggagaagagcaacctgatgttctgggccaaggagatcaagatcaagctgggcatcctgctgcagaagcccgacagcgtgggcgacctggtgatcccctacaacgagaagcccgagaagcccgccaagacccagaagaccagcctggacgaggccctgcagtggagagacagcctggacaagctgctgcagaacaactacggcctggccagcttcaagagcttcctgaagagcgagttcagcgaggagaacctggagttctggatcgcctgcgaggactacaagaagatcaagagccccgccaagatggccgagaaggccaagcagatctacgaggagttcatccagaccgaggcccccaaggaggtgaacatcgaccacttcaccaaggacatcaccatgaagaacctggtggagcccagcctgagcagcttcgacatggcccagaagagaatccacgccctgatggagaaggacagcctgcccagattcgtgagaagcgagttctaccaggagctgatcaagtag

SEQ ID NO: 139566 - protein, 894 aa, Artificial Sequence
  derived and/or modified sequence
MNPGFDLSRRNPQEDFELIQRIGSGTYGDVYKARNVNTGELAAIKVIKLEPGEDFAVVQQEIIMMKDCKHPNIVAYFGSYLRRDKLWICMEFCGGGSLQDIYHVTGPLSELQIAYVSRETLQGLYYLHSKGKMHRDIKGANILLTDNGHVKLADFGVSAQITATIAKRKSFIGTPYWMAPEVAAVERKGGYNQLCDLWAVGITAIELAELQPPMFDLHPMRALFLMTKSNFQPPKLKDKMKWSNSFHHFVKMALTKNPKKRPTAEKLLQHPFVTQHLTRSLAIELLDKVNNPDHSTYHDFDDDDPEPLVAVPHRIHSTSRNVREEKTRSEITFGQVKFDPPLRKETEPHHELPDSDGFLDSSEEIYYTARSNLDLQLEYGQGHQGGYFLGANKSLLKSVEEELHQRGHVAHLEDDEGDDDESKHSTLKAKIPPPLPPKPKSIFIPQEMHSTEDENQGTIKRCPMSGSPAKPSQVPPRPPPPRLPPHKPVALGNGMSSFQLNGERDGSLCQQQNEHRGTNLSRKEKKDVPKPISNGLPPTPKVHMGACFSKVFNGCPLKIHCASSWINPDTRDQYLIFGAEEGIYTLNLNELHETSMEQLFPRRCTWLYVMNNCLLSISGKASQLYSHNLPGLFDYARQMQKLPVAIPAHKLPDRILPRKFSVSAKIPETKWCQKCCVVRNPYTGHKYLCGALQTSIVLLEWVEPMQKFMLIKHIDFPIPCPLRMFEMLVVPEQEYPLVCVGVSRGRDFNQVVRFETVNPNSTSSWFTESDTPQTNVTHVTQLERDTILVCLDCCIKIVNLQGRLKSSRKLSSELTFDFQIESIVCLQDSVLAFWKHGMQGRSFRSNEVTQEISDSTRIFRLLGSDRVVVLESRPTDNPTANSNLYILAGHENSY

SEQ ID NO: 139567 - protein, 447 aa, Artificial Sequence
  derived and/or modified sequence
MHSTEDENQGTIKRCPMSGSPAKPSQVPPRPPPPRLPPHKPVALGNGMSSFQLNGERDGSLCQQQNEHRGTNLSRKEKKDVPKPISNGLPPTPKVHMGACFSKVFNGCPLKIHCASSWINPDTRDQYLIFGAEEGIYTLNLNELHETSMEQLFPRRCTWLYVMNNCLLSISGKASQLYSHNLPGLFDYARQMQKLPVAIPAHKLPDRILPRKFSVSAKIPETKWCQKCCVVRNPYTGHKYLCGALQTSIVLLEWVEPMQKFMLIKHIDFPIPCPLRMFEMLVVPEQEYPLVCVGVSRGRDFNQVVRFETVNPNSTSSWFTESDTPQTNVTHVTQLERDTILVCLDCCIKIVNLQGRLKSSRKLSSELTFDFQIESIVCLQDSVLAFWKHGMQGRSFRSNEVTQEISDSTRIFRLLGSDRVVVLESRPTDNPTANSNLYILAGHENSY

SEQ ID NO: 139568 - protein, 159 aa, Artificial Sequence
  derived and/or modified sequence
MQKFMLIKHIDFPIPCPLRMFEMLVVPEQEYPLVCVGVSRGRDFNQVVRFETVNPNSTSSWFTESDTPQTNVTHVTQLERDTILVCLDCCIKIVNLQGRLKSSRKLSSELTFDFQIESIVCLQDSVLAFWKHGMQGRSFRSNEVTQEISDSKNFQAAWI

SEQ ID NO: 139569 - DNA, 2685 bp, Artificial Sequence
  derived and/or modified sequence
atgaaccccggcttcgacctgagcagaagaaacccccaggaggacttcgagctgatccagagaatcggcagcggcacctacggcgacgtgtacaaggccagaaacgtgaacaccggcgagctggccgccatcaaggtgatcaagctggagcccggcgaggacttcgccgtggtgcagcaggagatcatcatgatgaaggactgcaagcaccccaacatcgtggcctacttcggcagctacctgagaagagacaagctgtggatctgcatggagttctgcggcggcggcagcctgcaggacatctaccacgtgaccggccccctgagcgagctgcagatcgcctacgtgagcagagagaccctgcagggcctgtactacctgcacagcaagggcaagatgcacagagacatcaagggcgccaacatcctgctgaccgacaacggccacgtgaagctggccgacttcggcgtgagcgcccagatcaccgccaccatcgccaagagaaagagcttcatcggcaccccctactggatggcccccgaggtggccgccgtggagagaaagggcggctacaaccagctgtgcgacctgtgggccgtgggcatcaccgccatcgagctggccgagctgcagccccccatgttcgacctgcaccccatgagagccctgttcctgatgaccaagagcaacttccagccccccaagctgaaggacaagatgaagtggagcaacagcttccaccacttcgtgaagatggccctgaccaagaaccccaagaagagacccaccgccgagaagctgctgcagcaccccttcgtgacccagcacctgaccagaagcctggccatcgagctgctggacaaggtgaacaaccccgaccacagcacctaccacgacttcgacgacgacgaccccgagcccctggtggccgtgccccacagaatccacagcaccagcagaaacgtgagagaggagaagaccagaagcgagatcaccttcggccaggtgaagttcgacccccccctgagaaaggagaccgagccccaccacgagctgcccgacagcgacggcttcctggacagcagcgaggagatctactacaccgccagaagcaacctggacctgcagctggagtacggccagggccaccagggcggctacttcctgggcgccaacaagagcctgctgaagagcgtggaggaggagctgcaccagagaggccacgtggcccacctggaggacgacgagggcgacgacgacgagagcaagcacagcaccctgaaggccaagatccccccccccctgccccccaagcccaagagcatcttcatcccccaggagatgcacagcaccgaggacgagaaccagggcaccatcaagagatgccccatgagcggcagccccgccaagcccagccaggtgccccccagaccccccccccccagactgcccccccacaagcccgtggccctgggcaacggcatgagcagcttccagctgaacggcgagagagacggcagcctgtgccagcagcagaacgagcacagaggcaccaacctgagcagaaaggagaagaaggacgtgcccaagcccatcagcaacggcctgccccccacccccaaggtgcacatgggcgcctgcttcagcaaggtgttcaacggctgccccctgaagatccactgcgccagcagctggatcaaccccgacaccagagaccagtacctgatcttcggcgccgaggagggcatctacaccctgaacctgaacgagctgcacgagaccagcatggagcagctgttccccagaagatgcacctggctgtacgtgatgaacaactgcctgctgagcatcagcggcaaggccagccagctgtacagccacaacctgcccggcctgttcgactacgccagacagatgcagaagctgcccgtggccatccccgcccacaagctgcccgacagaatcctgcccagaaagttcagcgtgagcgccaagatccccgagaccaagtggtgccagaagtgctgcgtggtgagaaacccctacaccggccacaagtacctgtgcggcgccctgcagaccagcatcgtgctgctggagtgggtggagcccatgcagaagttcatgctgatcaagcacatcgacttccccatcccctgccccctgagaatgttcgagatgctggtggtgcccgagcaggagtaccccctggtgtgcgtgggcgtgagcagaggcagagacttcaaccaggtggtgagattcgagaccgtgaaccccaacagcaccagcagctggttcaccgagagcgacaccccccagaccaacgtgacccacgtgacccagctggagagagacaccatcctggtgtgcctggactgctgcatcaagatcgtgaacctgcagggcagactgaagagcagcagaaagctgagcagcgagctgaccttcgacttccagatcgagagcatcgtgtgcctgcaggacagcgtgctggccttctggaagcacggcatgcagggcagaagcttcagaagcaacgaggtgacccaggagatcagcgacagcaccagaatcttcagactgctgggcagcgacagagtggtggtgctggagagcagacccaccgacaaccccaccgccaacagcaacctgtacatcctggccggccacgagaacagctactag

SEQ ID NO: 139570 - DNA, 2685 bp, Artificial Sequence
  derived and/or modified sequence
atgaacccaggatttgatctgtctagaaggaacccacaggaggactttgagttgattcagagaattggaagtggcacctatggcgacgtttacaaggcccggaatgtgaacaccggagagctggccgccattaaagtgataaaactggaaccaggcgaagattttgccgtcgttcagcaggagattatcatgatgaaagattgcaaacaccccaacatcgtcgcatacttcggttcttatctgcgcagagataagctgtggatctgtatggagttctgcggagggggaagcctccaagacatctaccacgtgaccggacccttgagtgagctgcaaatagcctacgtgagtagggagaccctccaaggcctttattatctgcactctaagggcaaaatgcatagggatatcaagggagcaaacattctcctgaccgataacgggcacgtgaagttagcagactttggtgtatcagctcagattactgccactatcgccaaacgaaaatcttttattggaactccttactggatggctccagaggtagcagccgtggagcgcaaaggtggctacaatcaactgtgtgatctctgggcagttggaattactgctattgagctggccgaattacagcctcctatgttcgatttgcatccaatgcgcgccctctttctcatgactaagtccaattttcagccacccaaattaaaagataaaatgaagtggtccaactcctttcatcacttcgtgaagatggccctcacaaagaacccaaaaaaaagaccaactgcagaaaagctgcttcagcatccgttcgtgacacagcacctgacacgcagcctggccatcgagctgctggataaagtaaataacccagaccactcaacctaccatgacttcgacgacgatgacccggaaccccttgtggcagtgccacatagaatacactcaactagtcgtaatgtgcgggaagaaaagactcgtagtgagatcacattcggccaggtcaaattcgaccctccactgcgtaaagagactgaaccacatcacgagctgcccgactctgatggattcttggatagctctgaggagatctattacaccgctcgttctaacctggacctgcagctggagtatgggcaaggtcaccaaggtggatactttctaggagccaataaatctctgctcaaaagtgtggaggaagagctgcatcaaagggggcacgtggcccaccttgaggacgatgagggcgatgatgacgaatctaagcactcgaccctaaaagcaaagattccccctcctctgcccccaaagcctaagtcaatcttcatccctcaggaaatgcacagcactgaagatgagaatcaaggaaccattaaacgctgccctatgtcaggatctccagcaaagccttctcaggttccacccagaccccccccaccgaggttgccccctcataagccggtggcactaggtaatgggatgagctccttccaattgaatggagagcgagatggatccctctgccagcaacagaatgagcatcggggaacaaacctctctcggaaggagaaaaaggatgttcccaaacccatctctaacggactgccacctacccctaaggtccacatgggcgcctgcttttccaaagtgttcaatggctgccctttgaaaatccattgcgcatcttcgtggatcaatccagacaccagggatcagtatctgatctttggggctgaggagggaatatatacacttaacctgaacgagcttcatgagacaagcatggaacagctatttccaagacgctgcacttggctgtatgtgatgaacaactgtctactctctatctcgggcaaagctagccagctgtatagtcataatctcccagggctgtttgactacgcgcgccagatgcagaagttgcctgtggctattcctgctcataagctaccggaccgtatcttgccccggaaattttctgttagtgccaagattcccgaaaccaaatggtgccagaagtgttgtgtggtgcggaatccatatactgggcacaagtatttgtgcggtgcgctgcaaacaagtatcgtgcttcttgaatgggtcgaacccatgcaaaaattcatgctgattaaacatatcgattttcctattccctgcccccttaggatgttcgagatgctggtagtccccgaacaggaatatccactggtgtgtgtgggagtatctagaggcagagactttaaccaagtggtgagatttgagacagtgaatccaaattctacttcctcctggttcaccgagtcggacaccccacaaaccaatgtcacacacgttacacaactcgaaagagacacgattctcgtgtgcttggattgctgcatcaagatcgtcaacctgcagggaaggctcaagagttctcggaagctgtcgtctgaattgaccttcgactttcagattgagtctattgtctgtttgcaggacagcgtgctcgctttttggaaacatggcatgcagggccggtcctttagatcaaacgaggtaacccaggaaatcagcgactcgactaggatatttaggctgctcggaagcgaccgcgtggtcgtactagagagccgacctacagataaccccaccgcaaatagcaatttgtatatccttgccgggcacgagaattcatactag

SEQ ID NO: 139571 - DNA, 2685 bp, Artificial Sequence
  derived and/or modified sequence
atgaaccctggctttgacctgagcagaagaaacccccaggaggactttgagctgatccagagaattggcagcggcacctatggagatgtgtacaaggccagaaatgtgaacacaggagagctggccgccatcaaggtgatcaagctggagcctggagaagattttgctgtggtgcagcaggagatcatcatgatgaaggactgcaagcaccccaacatcgtggcctacttcggcagctacctgcggcgggacaagctgtggatctgcatggagttctgtggcggcggcagcctgcaggacatctaccacgtgacaggccccctgtctgagctgcagatcgcctacgtgtcccgggagaccctgcagggcctgtactacctgcacagcaagggcaagatgcaccgggacatcaagggggccaacatcctgctgacagacaatggacatgtgaagctggccgactttggagtgtctgcccagatcacagccaccatcgccaagaggaagagcttcatcggcaccccctactggatggcccctgaggtggccgctgtggagaggaagggcggctacaaccagctgtgtgacctgtgggccgtgggcatcacagccatcgagctggccgagctgcagccccccatgtttgacctgcaccccatgagggccctcttcctgatgaccaagagcaacttccagccccccaagctgaaggacaagatgaagtggagcaacagcttccaccactttgtgaagatggccctgaccaagaaccccaagaagaggcccacagctgagaagctgctgcagcacccctttgtgacccagcacctgaccaggagcctggccatcgagctgctggacaaggtgaacaacccagaccacagcacctaccatgactttgatgatgatgatcctgagcccctggtggccgtgccccaccgcatccacagcaccagcagaaatgtgcgggaggagaagaccaggtctgagatcaccttcggccaggtgaagtttgacccccccctgaggaaggagacagagccccaccacgagctgcctgacagtgatggcttcctggacagcagcgaggagatctactacacagcccggagcaacctggacctgcagctggagtatggccagggccaccagggcggctacttcctgggcgccaacaagagcctgctgaagtctgtggaggaggagctgcaccagaggggccacgtggcccacctggaggatgatgaaggagatgatgatgagagcaagcacagcaccctgaaggccaagatccccccacccctgccccccaagcccaagagcatcttcatcccccaggagatgcacagcacagaagatgagaaccagggcaccatcaagcgctgccccatgagcggcagccctgccaagcccagccaggtgcccccccggcccccaccaccccggctgcccccccacaagcctgtggccctgggcaatggcatgagcagcttccagctgaatggagagagagatggcagcctgtgccagcagcagaatgagcaccggggcaccaacctgagcaggaaggagaagaaggatgtgcccaagcccatcagcaatggcctgccccccacccccaaggtgcacatgggcgcctgcttcagcaaggtgttcaacggctgccccctgaagatccactgtgccagctcctggatcaacccagacacccgggaccagtacctgatctttggagctgaggagggcatctacaccctgaacctgaatgagctgcacgagacctccatggagcagctgttcccccggcgctgcacctggctgtatgtgatgaacaactgcctgctgagcatcagcggcaaggccagccagctgtacagccacaacctgcccggcctgtttgattatgcccggcagatgcagaagctgcctgtggccatcccagcccacaagctgcctgaccgcatcctgcccaggaagttctctgtgtctgccaagatccctgagaccaagtggtgccagaagtgctgcgtggtgaggaacccctacacaggccacaagtacctgtgtggggccctgcagaccagcatcgtgctgctggagtgggtggagcccatgcagaagttcatgctgatcaagcacatcgacttccccatcccctgccccctgaggatgtttgagatgctggtggtgcctgagcaggagtaccccctggtgtgtgtgggcgtgtcccggggccgggacttcaaccaggtggtgcgctttgagaccgtgaaccccaacagcaccagctcctggttcacagaaagtgacaccccccagaccaacgtgacccacgtgacccagctggagcgggacaccatcctggtgtgcctggactgctgcatcaagatcgtgaacctgcagggccgcctgaagagcagcaggaagctgagcagcgagctgacctttgacttccagatcgagagcatcgtgtgcctgcaggacagcgtgctggccttctggaagcacggcatgcagggccgctccttccgcagcaatgaggtgacccaggagatcagtgacagcacccgcatcttccggctgctgggcagtgacagagtggtggtgctggagagccggcccacagacaaccccacagccaacagcaacctgtacatcctggccggccatgaaaattcctactag

SEQ ID NO: 139572 - DNA, 2685 bp, Artificial Sequence
  derived and/or modified sequence
atgaaccccggcttcgacctgagccggcggaacccccaggaggacttcgagctcattcagcgcattgggagcggaacttatggcgacgtgtataaggccaggaacgtgaatactggcgagctcgctgctatcaaggtgattaagctcgagccaggcgaggacttcgccgtggtccagcaggagataatcatgatgaaggactgtaagcacccaaacatcgtcgcatacttcggtagttaccttcgacgagacaagttgtggatctgcatggagttctgtggcggcgggtctctccaggacatttatcacgtgaccggaccactgtctgaacttcagatagcttatgtatccagagaaaccttgcagggcctgtactacctgcactccaagggcaaaatgcaccgagacattaagggggccaacattctgcttacggacaacggccacgtgaagctggcggacttcggcgtgagcgcgcagatcaccgcgactattgccaagcgcaagtctttcatcggtacaccttactggatggcgcccgaagtagctgccgtcgagcgcaaaggaggctataatcaactatgtgacctgtgggctgtgggcattaccgcaatcgagctcgctgagttgcagccgcctatgtttgatctccacccaatgagggccctctttctgatgacaaaatctaattttcagccacccaaattgaaggacaaaatgaagtggtccaattcatttcaccacttcgtgaagatggccctcactaagaatcctaagaaaagaccaacggccgagaagctgctacagcacccctttgtcacacagcaccttacccggtcgctcgctatagagctcttggataaagttaataatcccgatcacagcacttaccacgactttgacgatgacgacccagagcctttggttgccgttccgcatcgtatccatagcacctcgcgtaatgtccgggaggagaaaacccggagcgaaattaccttcggccaggtcaagttcgaccccccactccggaaggagaccgagccccaccacgagttgccagactccgatggcttcctggatagctcggaggagatttattatacagcaagaagtaaccttgatctgcaattagaatacggacagggccaccaggggggctactttttgggcgccaataagtctctgctgaaatccgtcgaagaggagctgcaccaacgagggcatgtcgctcaccttgaagacgacgagggagatgacgacgaaagcaaacacagcaccctcaaagctaaaatccccccccccctgccgcctaagcccaagtcaatcttcatcccccaagaaatgcactccacagaagatgagaaccaaggcacgatcaagagatgcccaatgtctgggtcgcctgccaagccgtcccaggtcccccctcgaccccctccacctcggctgccccctcataagcccgtcgcactcggtaacgggatgtcctcattccaattaaatggcgagcgcgacggcagcctgtgccagcagcagaacgagcacagagggaccaaccttagtcggaaagaaaagaaagacgtcccaaagccaatcagcaacggtttgccaccgaccccgaaggttcacatgggagcttgcttttctaaggttttcaacgggtgtcctttgaagatccattgtgccagcagctggattaaccccgacactcgggaccagtatttgatcttcggggccgaggagggtatctacaccctgaatcttaacgaactgcacgagactagcatggagcaacttttcccgcgacgatgtacctggttgtatgtgatgaataattgcctgctgtcgattagtgggaaggccagccaactctactcccacaacctgcctggtctgtttgattacgcacgccagatgcagaagctgccggtcgctatccctgctcataaacttcccgatcgtatcttgcccaggaagtttagcgttagtgccaaaattcctgagaccaaatggtgccagaaatgctgtgtggtgcggaatccctatacagggcacaagtacctatgtggggctcttcagacctctatcgttcttctggaatgggtcgagcctatgcagaaattcatgctgatcaaacacatcgattttccaattccatgccccctacgaatgtttgagatgctggttgttcccgaacaagagtatcctctggtgtgcgttggcgtgtccaggggccgggatttcaaccaggtcgtgcggtttgaaactgtgaatccaaattctacctcgtcatggtttacagagtcagacaccccccagaccaacgtcacccacgtgacacagctagagcgagacacaatcctggtgtgcctggactgctgcattaagatcgtgaacctgcaagggcgactgaagtcctctcggaaactttctagcgaactaacatttgacttccagattgaatccattgtgtgcttacaggattccgttctcgcgttttggaaacacggaatgcaggggaggtcatttcgcagcaacgaagttacccaggagataagtgacagcacgcgcattttcaggctgcttggctccgaccgcgtagtggttctggagtctaggcccactgataatcccaccgcaaactcgaacctgtacatcttagctgggcatgaaaactcatattag

SEQ ID NO: 139573 - DNA, 4362 bp, Artificial Sequence
  derived and/or modified sequence
aaggggagggggaggagcggcgaaagcggaagccatgttggagtttcaccccgagcgaggggctgcgagggttctcctctccttgtgggtgtgaccaggttcggcgcggcggcgggccgcggggggcggggacgattggccgcttgtcgtcgtccgcagcggcgtgaggggagcggcggcggcggcggcggccgcagcgtggagccgggtgattgtgaccgccgggggagccgggagccggccgcggcgccctctctccgtgtggccccctgagcggcccccctcccctgcccgggagggaggcggggggcacctggggcccgccatgaaccccggcttcgatttgtcccgccggaacccgcaggaggacttcgagctgattcagcgcatcggcagcggcacctacggcgacgtctacaaggcacggaatgttaacactggtgaattagcagcaattaaagtaataaaattggaaccaggagaagactttgcagttgtgcagcaagaaattattatgatgaaagactgtaaacacccaaatattgttgcttattttggaagctatctcaggcgagataagctttggatttgcatggagttttgtggaggtggttctttacaggatatttatcacgtaactggacctctgtcagaactgcaaattgcatatgttagcagagaaacactgcagggattatattatcttcacagtaaaggaaaaatgcacagagatataaagggagctaacattctattaacggataatggtcatgtgaaattggctgattttggagtatctgcacagataacagctacaattgccaaacggaagtctttcattggcacaccatattggatggctccagaagttgcagctgttgagaggaaggggggttacaatcaactctgtgatctctgggcagtgggaatcactgccatagaacttgcagagcttcagcctcctatgtttgacttacacccaatgagagcattatttctaatgacaaaaagcaattttcagcctcctaaactaaaggataaaatgaaatggtcaaatagttttcatcactttgtgaaaatggcacttaccaaaaatccgaaaaaaagacctactgctgaaaaattattacagcatccttttgtaacacaacatttgacacggtctttggcaatcgagctgttggataaagtaaataatccagatcattccacttaccatgatttcgatgatgatgatcctgagcctcttgttgctgtaccacatagaattcactcaacaagtagaaacgtgagagaagaaaaaacacgctcagagataacctttggccaagtgaaatttgatccacccttaagaaaggagacagaaccacatcatgaacttcccgacagtgatggttttttggacagttcagaagaaatatactacactgcaagatctaatctggatctgcaactggaatatggacaaggacaccaaggtggttactttttaggtgcaaacaagagtcttctcaagtctgttgaagaagaattgcatcagcgaggacacgtcgcacatttagaagatgatgaaggagatgatgatgaatctaaacactcaactctgaaagcaaaaattccacctcctttgccaccaaagcctaagtctatcttcataccacaggaaatgcattctactgaggatgaaaatcaaggaacaatcaagagatgtcccatgtcagggagcccagcaaagccatcccaagttccacctagaccaccacctcccagattacccccacacaaacctgttgccttaggaaatggaatgagctccttccagttaaatggtgaacgagatggctcattatgtcaacaacagaatgaacatagaggcacaaacctttcaagaaaagaaaagaaagatgtaccaaagcctattagtaatggtcttcctccaacacctaaagtgcatatgggtgcatgtttttcaaaagtttttaatgggtgtcccttgaaaattcactgtgcatcatcatggataaacccagatacaagagatcagtacttgatatttggtgccgaagaagggatttataccctcaatcttaatgaacttcatgaaacatcaatggaacagctattccctcgaaggtgtacatggttgtatgtaatgaacaattgcttgctatcaatatctggtaaagcttctcagctttattcccataatttaccagggctttttgattatgcaagacaaatgcaaaagttacctgttgctattccagcacacaaactccctgacagaatactgccaaggaaattttctgtatcagcaaaaatccctgaaaccaaatggtgccagaagtgttgtgttgtaagaaatccttacacgggccataaatacctatgtggagcacttcagactagcattgttctattagaatgggttgaaccaatgcagaaatttatgttaattaagcacatagattttcctataccatgtccacttagaatgtttgaaatgctggtagttcctgaacaggagtaccctttagtttgtgttggtgtcagtagaggtagagacttcaaccaagtggttcgatttgagacggtcaatccaaattctacctcttcatggtttacagaatcagataccccacagacaaatgttactcatgtaacccaactggagagagataccatccttgtatgcttggactgttgtataaaaatagtaaatctccaaggaagattaaaatctagcaggaaattgtcatcagaactcacctttgatttccagattgaatcaatagtgtgcctacaagacagtgtgctagctttctggaaacatggaatgcaaggtagaagttttagatctaatgaggtaacacaagaaatttcagatagcacaagaattttcaggctgcttggatctgacagggtcgtggttttggaaagtaggccaactgataaccccacagcaaatagcaatttgtacatcctggcgggtcatgaaaacagttactgagaattgttgtgctttgacagttaactctagaaagaaagaacactaccactgcaacattaatggatgcttgaagctgtacaaaagctgcagtaacctgtcttcagttactttgtaatttattgtggcatgagataagatggggaaaattttgttttaagtggtatggatatatttagcatattgaaccacacaagtgcttaattcattgttatgtaatctttgtacatataggcagtattttttctgtgaaacttcatattgctgaagacatacactaagaatttatgtagataatgtacttttatgagatgtacaagtaagtgtcttatctgtacagatgtaaatgttgatgaaaatgcaattggggttaatattttaagaattctttagtatattcttgggtgtggctatattacaaaatgggatgctggcaatgaaacaatacatttaacactattgtatttttattatatgtaatttagtaatatgaatataaatcttgtaacttttaaaattgtaatggaggctgtaatcattttataatctttttaattttaatgcaagtacactggtgtttatatttgcacaaagtattgatatgtgatgtattaagtcacaaaagtaagctgtgacattgtctataagcatttggctccacaaatgtatttggattgttttctatgtgaagcaaaccaattataattaaccacatgttgtagtaactggtctttttatatttaagcagaatcctgtaagattgcttgtctttgcttaaaaacaatacctttgaacatttttgaatcacagaatagcggtaccatgatagaatactgcaattgtggtcagaattacagtatgcacaaagaattaattagcattattaaagagtcctcactaaacatttcatatgatcacactgaagaactgtaacattccatagagtgaagtggttcaaatttctcttggaatttttacttttgttggccttattttatgatccttttcatatttcttttgacttagagtattaatacatggccaaaataatttagttactacctcatacaaacaatataatggttactacacatcacaggaacttagttttggtttaagtcatttttgattgcttttttccaatggaatatgtatataccaggttttagcaaaatgcacacttttggctctttttggtatatgttctttatattttaatgtgagtatatacactaagaacaaactaaattgtgatttatgatcttcatttattttaatgataatggttttaaaatatgttcctgattgtacatattgtaaaataaacatgttttttaacatgctgttgtatagta

SEQ ID NO: 139574 - DNA, 2564 bp, Artificial Sequence
  derived and/or modified sequence
tttcagcctcctaaactaaaggataaaatgaaatggtcaaatagttttcatcactttgtgaaaatggcacttaccaaaaatccgaaaaaaagacctactgctgaaaaattattacagcatccttttgtaacacaacatttgacacggtctttggcaatcgagctgttggataaagtaaataatccagatcattccacttaccatgatttcgatgatgatgatcctgagcctcttgttgctgtaccacatagaattcactcaacaagtagaaacgtgagagaagaaaaaacacgctcagagataacctttggccaagtgaaatttgatccacccttaagaaaggagacagaaccacatcatgaacttcccgacagtgatggttttttggacagttcagaagaaatatactacactgcaagatctaatctgtgaactgtatcaattctattgacttcctgctgctttctcatcaggatctgcaactggaatatggacaaggacaccaaggtggttactttttaggtgcaaacaagagtcttctcaagtctgttgaagaagaattgcatcagcgaggacacgtcgcacatttagaagatgatgaaggagatgatgatgaatctaaacactcaactctgaaagcaaaaattccacctcctttgccaccaaagcctaagtctatcttcataccacaggaaatgcattctactgaggatgaaaatcaaggaacaatcaagagatgtcccatgtcagggagcccagcaaagccatcccaagttccacctagaccaccacctcccagattacccccacacaaacctgttgccttaggaaatggaatgagctccttccagttaaatggtgaacgagatggctcattatgtcaacaacagaatgaacatagaggcacaaacctttcaagaaaagaaaagaaagatgtaccaaagcctattagtaatggtcttcctccaacacctaaagtgcatatgggtgcatgtttttcaaaagtttttaatgggtgtcccttgaaaattcactgtgcatcatcatggataaacccagatacaagagatcagtacttgatatttggtgccgaagaagggatttataccctcaatcttaatgaacttcatgaaacatcaatggaacagctattccctcgaaggtgtacatggttgtatgtaatgaacaattgcttgctatcaatatctggtaaagcttctcagctttattcccataatttaccagggctttttgattatgcaagacaaatgcaaaagttacctgttgctattccagcacacaaactccctgacagaatactgccaaggaaattttctgtatcagcaaaaatccctgaaaccaaatggtgccagaagtgttgtgttgtaagaaatccttacacgggccataaatacctatgtggagcacttcagactagcattgttctattagaatgggttgaaccaatgcagaaatttatgttaattaagcacatagattttcctataccatgtccacttagaatgtttgaaatgctggtagttcctgaacaggagtaccctttagtttgtgttggtgtcagtagaggtagagacttcaaccaagtggttcgatttgagacggtcaatccaaattctacctcttcatggtttacagaatcagataccccacagacaaatgttactcatgtaacccaactggagagagataccatccttgtatgcttggactgttgtataaaaatagtaaatctccaaggaagattaaaatctagcaggaaattgtcatcagaactcacctttgatttccagattgaatcaatagtgtgcctacaagacagtgtgctagctttctggaaacatggaatgcaaggtagaagttttagatctaatgaggtaacacaagaaatttcagatagcacaagaattttcaggctgcttggatctgacagggtcgtggttttggaaagtaggccaactgataaccccacagcaaatagcaatttgtacatcctggcgggtcatgaaaacagttactgagaattgttgtgctttgacagttaactctagaaagaaagaacactaccactgcaacattaatggatgcttgaagctgtacaaaagctgcagtaacctgtcttcagttactttgtaatttattgtggcatgagataagatggggaaaattttgttttaagtggtatggatatatttagcatattgaaccacacaagtgcttaattcattgttatgtaatctttgtacatataggcagtattttttctgtgaaacttcatattgctgaagacatacactaagaatttatgtagataatgtacttttatgagatgtacaagtaagtgtcttatctgtacagatgtaaatgttgatgaaaatgcaattggggttaatattttaagaattctttagtatattcttgggtgtggctatattacaaaatgggatgctggcaatgaaacaatacatttaacactattgtatttttattatatgtaatttagtaatatgaatataaatcttgtaacttttaaaattgtaatggag

SEQ ID NO: 139575 - DNA, 1242 bp, Artificial Sequence
  derived and/or modified sequence
tagaatgggttgaaccaatgcagaaatttatgttaattaagcacatagattttcctataccatgtccacttagaatgtttgaaatgctggtagttcctgaacaggagtaccctttagtttgtgttggtgtcagtagaggtagagacttcaaccaagtggttcgatttgagacggtcaatccaaattctacctcttcatggtttacagaatcagataccccacagacaaatgttactcatgtaacccaactggagagagataccatccttgtatgcttggactgttgtataaaaatagtaaatctccaaggaagattaaaatctagcaggaaattgtcatcagaactcacctttgatttccagattgaatcaatagtgtgcctacaagacagtgtgctagctttctggaaacatggaatgcaaggtagaagttttagatctaatgaggtaacacaagaaatttcagatagcaagaattttcaggctgcttggatctgacagggtcgtggttttggaaagtaggccaactgataaccccacagcaaatagcaatttgtacatcctggcgggtcatgaaaacagttactgagaattgttgtgctttgacagttaactctagaaagaaagaacactaccactgcaacattaatggatgcttgaagctgtacaaaagctgcagtaacctgtcttcagttactttgtaatttattgtggcatgagataagatggggaaaattttgttttaagtggtatggatatatttagcatattgaaccacacaagtgcttaattcattgttatgtaatctttgtacatataggcagtattttttctgtgaaacttcatattgctgaagacatacactaagaatttatgtagataatgtacttttatgagatgtacaagtaagtgtcttatctgtacagatgtaaatgttgatgaaaatgcaattggggttaatattttaagaattctttagtatattcttgggtgtggctatattacaaaatgggatgctggcaatgaaacaatacatttaacactattgtatttttattatatgtaatttagtaatatgaatataaatcttgtaacttttaaaattgtaatggaggctgtaatcattttataatctttttaattttaatgcaagtacactggtgtttatatttgcacaaagtattgatatgtgatgtattaagtcacaaaagtaagctgtgacattgtctataagcatttggct

SEQ ID NO: 139576 - DNA, 2685 bp, Artificial Sequence
  derived and/or modified sequence
atgaaccccggttttgatctctccagaagaaaccctcaggaggactttgagttgattcagagaatcgggtccgggacctacggcgatgtctacaaggcccgtaatgtcaatactggagaactggccgctattaaggtcataaagttggaaccgggtgaagactttgcagtggtgcagcaggagatcattatgatgaaagattgtaaacatcccaacatcgttgcctactttgggtcgtatcttaggagggacaagctatggatatgcatggagttttgtggcggaggctcactccaggacatttatcacgtgaccggtccactttccgagctgcagattgcctacgtcagccgggagaccctgcagggcctgtactatctgcattcgaagggtaaaatgcacagggacatcaagggagcgaatatactcctgacagacaacggacatgtgaaattggccgatttcggggtgtcagctcaaatcaccgccacgatcgccaagcgcaagtcgttcatcggaaccccttactggatggcaccggaagttgccgcagtggagaggaagggcggttacaaccagctgtgcgatctgtgggcagttggtattacagcaatagaactcgccgaattacaacctcccatgttcgatctacaccccatgagagcccttttcctgatgacaaagagcaatttccagccaccaaagctgaaggataagatgaaatggtcaaatagcttccaccactttgttaaaatggctctcacaaaaaatccaaagaaaaggcccaccgccgagaagctgcttcagcatcccttcgtcacccagcatctgacccgtagccttgcaatagaactcctcgacaaggtcaataatccagatcacagcacgtaccacgacttcgacgatgacgaccctgaacccctggtggctgtgcctcacagaatccactcaacatccaggaatgtcagagaagagaagactcgatccgaaatcactttcggacaggtgaaattcgatccacctctcaggaaggaaacggagcctcaccacgagctgcccgatagtgatggcttccttgactcatctgaggagatttattacacagctcgatctaacctcgacttgcagttggaatatgggcagggacaccagggcggatacttcttaggggctaataagagcctgctcaaaagcgttgaggaagaactccatcaacgaggtcacgtggctcacctcgaagacgatgagggcgatgacgacgaatccaagcattctacacttaaggcgaaaatccctccacctctccccccaaaaccaaaatcaatcttcatcccccaggagatgcacagtaccgaggatgagaatcagggcaccataaagcggtgtcccatgagcggttctccagcgaagccgtctcaggtcccgccacgcccacccccacccagactgcctccacacaagccggtggccctgggcaacggaatgtcgagtttccaactcaatggggaacgggatggatctctctgtcagcaacagaacgagcaccggggtacaaatctgtcacgaaaagagaagaaagacgtcccaaagccaatctcgaatggtctccccccaacccccaaagtccatatgggggcttgtttcagtaaggtgttcaatgggtgccctctaaagatccattgcgcctcgtcatggataaatcccgacactcgagaccagtacctgatttttggcgcagaggaaggaatttacacactcaatcttaacgaactccacgagacttccatggaacagttatttcctagaagatgcacgtggctttacgtcatgaacaactgtctgctgagcatttctgggaaggcctcccaactgtactcccacaatctccccggtctgtttgactatgctagacagatgcagaagctgccagtagcaatccctgcccacaaattgccagaccgaattcttcccaggaagttttccgtctcagctaagatccccgaaacgaagtggtgtcagaagtgttgcgttgttcggaatccttatacaggccataagtatctgtgcggagcacttcaaacctccattgtcctgctggagtgggtggaaccaatgcaaaagttcatgttgattaagcatattgatttccccattccctgtcctctgcggatgtttgagatgttggtggtgcccgagcaagagtaccccctggtgtgtgtcggcgtcagcagaggtagggatttcaatcaggttgtcagatttgagaccgtgaatccaaactccactagctcatggtttacagaatccgacacacctcaaaccaatgtgactcacgttacacaattggagagagacaccatcctggtctgcttggactgttgcataaagatcgttaatttgcagggcagattaaagtctagtcgaaaactctccagcgaattgacatttgatttccagattgagtcgatcgtgtgcttgcaggatagtgtgttagccttttggaaacatggaatgcagggacggtcttttaggtcaaacgaggtgacacaggaaatctccgactccactcggatctttcgcctgctaggaagcgacagggtcgtggtcttagagagccggcctacagacaatccgactgccaactccaatctttacattctcgctgggcacgaaaattcatattag

SEQ ID NO: 139577 - protein, 875 aa, Artificial Sequence
  derived and/or modified sequence
MTLARFVLALMLGALPEVVGFDSVLNDSLHHSHRHSPPAGPHYPYYLPTQQRPPRTRPPPPLPRFPRPPRALPAQRPHALQAGHTPRPHPWGCPAGEPWVSVTDFGAPCLRWAEVPPFLERSPPASWAQLRGQRHNFCRSPDGAGRPWCFYGDARGKVDWGYCDCRHGSVRLRGGKNEFEGTVEVYASGVWGTVCSSHWDDSDASVICHQLQLGGKGIAKQTPFSGLGLIPIYWSNVRCRGDEENILLCEKDIWQGGVCPQKMAAAVTCSFSHGPTFPIIRLAGGSSVHEGRVELYHAGQWGTVCDDQWDDADAEVICRQLGLSGIAKAWHQAYFGEGSGPVMLDEVRCTGNELSIEQCPKSSWGEHNCGHKEDAGVSCTPLTDGVIRLAGGKGSHEGRLEVYYRGQWGTVCDDGWTELNTYVVCRQLGFKYGKQASANHFEESTGPIWLDDVSCSGKETRFLQCSRRQWGRHDCSHREDVSIACYPGGEGHRLSLGFPVRLMDGENKKEGRVEVFINGQWGTICDDGWTDKDAAVICRQLGYKGPARARTMAYFGEGKGPIHVDNVKCTGNERSLADCIKQDIGRHNCRHSEDAGVICDYFGKKASGNSNKESLSSVCGLRLLHRRQKRIIGGKNSLRGGWPWQVSLRLKSSHGDGRLLCGATLLSSCWVLTAAHCFKRYGNSTRSYAVRVGDYHTLVPEEFEEEIGVQQIVIHREYRPDRSDYDIALVRLQGPEEQCARFSSHVLPACLPLWRERPQKTASNCYITGWGDTGRAYSRTLQQAAIPLLPKRFCEERYKGRFTGRMLCAGNLHEHKRVDSCQGDSGGPLMCERPGESWVVYGVTSWGYGCGVKDSPGVYTKVSAFVPWIKSVTKL

SEQ ID NO: 139578 - DNA, 85 bp, Artificial Sequence
  derived and/or modified sequence
aatggaatcgaatggaatgcaatccaatggaatggaatgcaatgcaatggaatggaatcgaacggaatgcagtggaagggaatgg

SEQ ID NO: 139579 - DNA, 2628 bp, Artificial Sequence
  derived and/or modified sequence
atgactctggcacggttcgtgttagccctgatgctcggcgccctgcctgaagttgtgggcttcgacagcgtcctcaatgattctctccatcactcacatcgacacagcccacctgccgggcctcactatccttattacctacctacgcagcaaaggcccccacgcacacggcctcctccacccctgcccaggttcccccggccccctcgggcacttcctgcccagagaccacacgctcttcaggctgggcacaccccgcgaccacatccatgggggtgcccagcgggtgagccctgggtctctgttacagatttcggggctccttgtctgagatgggcggaagttccgccttttttagagcggtccccccctgccagttgggcccaactacggggccagcggcataatttttgtcggtctccagacggggcaggtcgtccttggtgtttctacggcgacgccagaggaaaggttgattggggctactgcgattgcagacacggctccgttcgcctgcgaggtgggaagaatgagtttgagggaacggttgaagtatacgcttcaggagtttggggcaccgtgtgttccagtcactgggacgacagtgacgcgtcagttatctgccaccagttgcagcttggcgggaaggggatcgccaagcagacccccttctctgggttgggcctaattcccatatactggtccaacgtcaggtgtagaggtgatgaggagaacatcctgctgtgtgagaaggatatctggcaggggggtgtatgcccccagaagatggctgccgccgtgacatgctctttctctcatggacctacttttccaattatccggctggctgggggcagtagcgtacacgagggcagggttgagctttatcacgcaggccagtggggtaccgtatgcgacgaccagtgggacgacgctgatgctgaggttatctgtagacagctaggcctctcaggaattgccaaggcttggcaccaagcatattttggcgagggttcgggacccgttatgctggatgaagtgcgctgtacaggtaatgagttgagcatcgaacaatgccctaagtcgtcttggggggagcataattgtggtcacaaagaggacgccggcgtgtcatgcaccccacttacagacggggtgatcagacttgccgggggcaagggctcccacgagggtagactggaggtatattaccgcgggcaatggggaacagtgtgtgacgacggttggacagaactgaacacatatgtcgtgtgcagacagttgggttttaagtatggcaagcaggcaagtgccaatcactttgaggaaagcaccggacctatctggctcgatgatgtaagttgctccggtaaggagacaagattcttgcagtgctctaggcggcagtgggggcggcatgattgcagtcaccgggaagacgtcagcattgcctgttacccaggcggcgaaggtcacaggctgtccctaggcttcccagttagattaatggacggcgagaataagaaggagggtcgagtagaggtcttcatcaacggacagtgggggacaatatgtgacgatggttggaccgataaggatgctgctgtcatttgccggcagctcgggtataaaggaccagcccgggcccggaccatggcgtattttggagaaggcaaagggcccatccatgtggataacgtgaaatgcactgggaacgaaaggagcctggccgattgcataaaacaagacattggccggcacaactgtagacatagtgaggacgcgggggtgatttgcgattactttggcaaaaaggccagcggtaactcaaataaagagtctttgagctctgtatgcggactgaggctgctccacaggcgccagaagagaatcattggagggaagaattccctgcgagggggttggccttggcaagtgtccctccgcctgaaatcctctcacggggacggacgtctcctttgtggagctacgcttctctcaagttgttgggtgttgactgcagctcactgctttaagagatatggaaattccacacggagctacgcagttagggtgggggactaccatactctggtccccgaagagtttgaagaggagatcggagtgcaacagattgtaattcacagggagtacagacctgacagaagcgattatgatatcgccctggtacgacttcagggacctgaggagcagtgcgcccgcttttcgagccatgtgctacctgcatgtctccctttgtggagagaacgtccacagaagacagcatccaattgttacatcactggttggggcgataccggaagggcttacagccgcaccctccagcaggcagccatacctctcctacctaaaaggttctgcgaagaacgctacaagggtcggtttactggaagaatgttgtgtgccggcaacttgcacgaacacaagcgagtggacagttgccagggtgacagcggcggaccactgatgtgtgagcgtccaggcgagtcatgggttgtctacggcgtaacgagctgggggtacggctgtggtgtgaaagacagcccaggtgtctacacaaaggtgagcgccttcgtgccttggataaaatcagtcacaaaactatag

SEQ ID NO: 139580 - DNA, 2628 bp, Artificial Sequence
  derived and/or modified sequence
atgaccctggccaggtttgtgctggccctgatgctgggcgccctgcctgaggtggtgggctttgattctgtgctgaatgacagcctgcaccacagccaccgccacagccccccagctggcccccactacccctactacctgcccacccagcagaggcctcccaggacccggcccccaccacccctgccccgcttcccccggcccccccgggccctgcctgcccagaggccccacgccctgcaggccggccacaccccccggccccacccctggggctgcccagctggggagccctgggtgtctgtgacagactttggagccccctgcctgcgctgggccgaggtgccccccttcctggagaggagccccccagcctcctgggcccagctgcggggccagaggcacaacttctgccgcagcccagatggagctggccggccctggtgcttctatggagatgcccggggcaaggtggactggggctactgtgactgcagacatggctctgtgcggctgcggggcggcaagaatgaatttgagggcaccgtggaggtgtatgccagcggcgtgtggggcaccgtgtgcagcagccactgggatgacagtgatgccagcgtcatctgccaccagctgcagctgggcggcaagggcatcgccaagcagacccccttcagcggcctgggcctcatccccatctactggagcaatgtgcgctgcagaggagatgaggagaacatcctgctgtgtgagaaggacatctggcagggcggcgtgtgcccccagaagatggctgctgctgtgacctgcagcttcagccacggccccaccttccccatcatccggctggccggcggcagctctgtgcatgagggccgggtggagctgtaccacgccggccagtggggcaccgtgtgtgatgaccagtgggatgatgctgatgctgaggtgatctgccggcagctgggcctgagcggcatcgccaaggcctggcaccaggcctactttggagagggcagcggccctgtgatgctggatgaggtgcgctgcacaggaaatgagctgagcattgagcagtgccccaagagctcctggggcgagcacaactgtggccacaaggaggatgctggggtgtcctgcacccccctgacagatggagtcatccggctggccggcggcaagggcagccatgagggccgcctggaggtgtactaccggggccagtggggcaccgtgtgtgatgatggctggacagagctgaacacctacgtggtgtgccggcagctgggcttcaagtatggcaagcaggccagcgccaaccactttgaggagagcacaggccccatctggctggatgatgtgtcctgcagcggcaaggagacccgcttcctgcagtgcagccggcggcagtggggcagacatgactgcagccacagagaagatgtgtccatcgcctgctacccaggaggagagggccaccggctgagcctgggcttccctgtgcggctgatggatggagagaacaagaaggagggccgggtggaggtgttcatcaatggccagtggggcaccatctgtgatgatggctggacagacaaggatgctgctgtgatctgccggcagctgggctacaagggccctgcccgggcccggaccatggcctactttggagagggcaagggccccatccacgtggacaacgtgaagtgcacaggaaatgaaagaagcctggccgactgcatcaagcaggacatcggccgccacaactgccgccacagtgaagatgctggggtcatctgtgactactttgggaagaaggccagcggcaacagcaacaaggagagcctgagctctgtgtgtggcctgcggctgctgcaccggcggcagaagaggatcatcggcggcaagaacagcctgcggggcggctggccctggcaggtgtccctgcggctgaagagcagccatggagatggccgcctgctgtgtggggccaccctgctgagcagctgctgggtgctgacagctgcccactgcttcaagagatatggcaacagcaccaggagctatgctgtgcgggtgggggactaccacaccctggtgcctgaggagtttgaggaggagattggagtgcagcagatcgtcatccaccgggagtacagaccagacagaagtgactatgacatcgccctggtgcggctgcagggccctgaggagcagtgtgcccgcttcagcagccacgtgctgcctgcctgcctgcccctgtggagggagcggccccagaagacagccagcaactgctacatcaccggctggggagacaccggccgggcctacagcaggaccctgcagcaggccgccatccccctgctgcccaagcgcttctgtgaggagcgctacaagggccgcttcaccggccgcatgctgtgtgccggcaacctgcacgagcacaagagggtggacagctgccagggcgacagcggcggccccctgatgtgtgagaggcctggagagagctgggtggtgtatggagtgacctcctggggctacggctgcggcgtgaaggacagccctggggtgtacaccaaggtgtctgcctttgtgccctggatcaagtctgtgaccaagctgtag

SEQ ID NO: 139581 - DNA, 2628 bp, Artificial Sequence
  derived and/or modified sequence
atgaccctggcccggttcgtgctggccctgatgctgggcgccctgcctgaagtggtggggttcgacagtgtcctgaacgacagtttgcatcattctcatagacactccccccctgctggccctcattatccttactatttaccaactcagcagcgccctccgcgaacccggccgccccctccactacccagattccctcggccaccccgtgccctgccagcccagaggccgcacgcgcttcaagccggacacactccccgcccgcacccatggggatgccccgctggtgagccatgggtatctgtcacagacttcggagcaccctgcttgcgatgggctgaggtgcctccattcctcgagcggtctccccccgcctcctgggcgcagttgaggggacagaggcataacttttgcaggagcccagacggtgccggacggccttggtgtttctatggcgatgcccgaggaaaagtcgactgggggtattgtgattgtagacatggctccgtacggttgcggggtggaaagaacgagtttgaaggcacagtagaggtctacgcaagcggagtgtggggtaccgtctgttcctctcactgggatgacagcgacgcctcagtgatctgccaccaactgcagctgggggggaagggcatagcaaaacagacaccattttcaggcttggggctgatccccatttactggagcaatgtgcggtgcagaggggatgaggagaatattctcctgtgtgagaaggacatctggcaggggggcgtttgccctcagaagatggccgctgcagttacctgtagcttcagccacgggcccacttttccgataatcaggctggctggaggctcctcagtccacgaaggcagggttgaactgtaccacgctggacaatggggcaccgtgtgcgatgatcagtgggacgacgctgacgcagaagttatctgccgtcagctgggactgtctgggatcgccaaagcatggcatcaggcatactttggggaggggagcgggcccgtgatgctggatgaggttaggtgcacaggaaacgagctgtcaatcgagcagtgtcccaagagcagttggggagaacataactgcgggcataaagaggatgctggagtcagttgtaccccccttaccgatggagtaatcagactcgctggtggaaaaggatctcacgaagggcgcttggaggtttactacagaggccaatgggggactgtgtgtgacgacgggtggacggaactcaatacttatgtggtgtgccgccagttgggcttcaagtacgggaagcaagcctcggccaaccacttcgaggaatccactggccccatttggcttgacgacgtgtcctgctccggcaaagaaacccgcttccttcagtgttcacggcgacaatggggaaggcatgattgtagtcaccgcgaggatgtttcaatcgcttgttacccgggcggagagggtcataggctcagcttagggtttcccgtgcgtctaatggatggggaaaataaaaaagaaggccgcgtggaggtgtttattaacggccagtggggcacaatctgcgacgacgggtggactgacaaagacgcagccgtgatttgcaggcagctcggttacaaaggcccggcccgagcccgaacaatggcgtacttcggcgaagggaaaggacccatacatgtggacaatgtgaaatgtacaggaaacgaaaggagccttgccgactgtatcaagcaggatatcggcaggcataactgtcgccatagtgaagatgccggagtgatctgtgattacttcggcaagaaggcgtctgggaattccaataaagagagcctttccagcgtttgtggcctcaggttgctgcaccggcgacaaaagcgtatcatcggtggcaaaaattccttacgggggggttggccttggcaagtgtccttgaggctgaagtcatcccatggcgacggaaggctgctatgtggcgcaacactgctgtccagctgttgggtgctgacagccgcccactgctttaagagatatggaaacagtactcgttcatatgccgtgcgcgtcggtgattatcatacgctcgtgcctgaggagttcgaggaggaaattggggtgcagcagattgtcatacaccgcgagtaccggcctgaccggtctgattacgatatcgcccttgtgagacttcagggccctgaggagcagtgcgccagattttcatctcacgttttgcctgcctgtctgccattgtggagggagcgtccacagaaaacagctagcaattgttatattacagggtggggggacacaggacgtgcctacagtcgcacattgcagcaggctgccatcccgttactgcccaaaagattttgcgaggagcgctacaagggccggttcaccggtaggatgttatgtgccggaaacctgcatgagcacaagcgggtggacagttgccagggagattcggggggtcccctaatgtgcgaacgccccggggaaagttgggtggtgtacggtgtcacatcctgggggtacggctgtggagtaaaagattccccaggtgtgtatacaaaggtaagtgcatttgtgccctggatcaaatccgtgactaaactctag

SEQ ID NO: 139582 - DNA, 2628 bp, Artificial Sequence
  derived and/or modified sequence
atgactctggcgcgtttcgttctcgccctgatgcttggcgctctgccggaagtagttggattcgacagcgttttgaatgattccttacatcattcccaccgacactctcccccagcaggccctcattatccatattacctacccacgcagcagcgcccaccacggacaagaccaccacctcctctgcctcggttcccaagacccccacgcgcactccccgcacagcgccctcacgctctgcaggccggtcacactcctcggccacacccctggggctgccccgctggagagccgtgggttagtgtcacagactttggggctccgtgcttacgttgggccgaggtccccccattcttggagaggtcccccccagcatcctgggcccagctccgaggacaaagacacaatttctgtcggagcccagatggagcaggcagaccctggtgcttttacggcgatgccaggggaaaggtggactggggatactgcgattgcagacacgggagcgtccggctgaggggaggaaagaatgagttcgagggcacagttgaagtatatgcctcaggcgtatgggggacggtgtgctcctcacattgggatgattcagatgcaagcgttatatgccaccaactgcagcttggaggcaaaggcattgctaagcagacgcccttttccggtttgggacttattccaatctattggtcaaatgtccgctgtagaggtgacgaggaaaatattctgctgtgcgagaaagatatctggcagggcggagtctgcccccagaaaatggccgcagccgtgacctgctccttttcccatggacccacattcccaattatcaggctcgctgggggaagctcagtccatgaaggtcgggttgaactataccacgccggacaatggggtactgtgtgcgatgatcagtgggacgacgccgatgctgaggtgatctgccgccagctgggtctctccggtatcgctaaggcctggcatcaagcttacttcggggaaggaagtggcccagtaatgcttgacgaagtccggtgcaccggaaacgaactgtctatcgaacagtgtcccaagtccagttggggcgagcacaactgtgggcacaaagaggatgccggtgtgtcatgcactccgctgaccgatggcgtgatccgactagccggtggtaaaggaagtcatgagggcaggctggaggtatactatcgtggacagtggggaactgtgtgcgatgacggctggaccgaattgaatacatatgttgtatgccgccagctcggctttaagtatgggaagcaggcctctgctaaccacttcgaggaatcaactggccctatttggctggatgatgtgagctgcagtggtaaagaaaccagattcttacagtgcagccggcgacaatgggggagacacgactgctcacatagggaagatgtatcaattgcttgctaccccggtggggaaggacacagattatctcttggattccctgttagactgatggatggggaaaacaagaaagagggcagagtggaagtcttcataaatggccaatggggcactatatgcgatgacggctggaccgacaaggacgcagctgttatttgtagacagttgggatacaaggggccagccagagcaagaaccatggcctattttggtgagggtaaaggccctatccatgtggataacgtcaagtgcaccggcaacgagcgcagtcttgcggactgcatcaagcaggatattggtcggcacaattgtaggcactcagaggacgccggagtcatttgcgattacttcggtaaaaaagcatcaggcaactctaacaaggaatctctgtcctcagtgtgtggactccgtctgctgcaccgacgacagaagaggattatagggggaaagaatagtcttcggggagggtggccttggcaggtctctctaagactgaagagttcacatggagatggcaggctcctgtgtggtgccactttgttgtcctcctgttgggttctgacagcagcacactgcttcaagcgctatggcaactcaaccaggagttacgcagtgagggtcggcgattatcacaccctggtcccagaggagtttgaagaggaaataggagtgcagcaaattgttatccatagagaatataggcccgaccgttctgactatgatattgctctggtccgactccagggccctgaggagcagtgtgctaggttctccagccacgtacttccagcatgcctacccttgtggagagagaggccccagaagacagcaagcaactgttatatcactgggtggggcgacactggcagagcctattcacggacgctacagcaggcagctattccactgttgcctaagcgtttctgcgaagaacgatacaaaggaagatttactggaaggatgttatgtgctggtaatttacacgagcacaaacgggtagactcctgtcagggcgattccggtggtcccctgatgtgtgaaagacccggagaatcctgggtggtatatggcgtcacctcctgggggtatggatgcggcgtaaaggattctccgggtgtgtacaccaaagttagcgctttcgtgccatggattaaaagcgtcaccaaactgtag

SEQ ID NO: 139583 - DNA, 4809 bp, Artificial Sequence
  derived and/or modified sequence
gctgcgtccgcgccttctcttttccggtcctctccgccggccggggctcggctgagctccagatttccccacccgcggccgccgccaggggacaggagccgaggcgcggcagggcaccagcggcgggaggcaaggttggggaggcgagggcggtccgcgtgcgggggcgggagggggctgggggattcgagggacgcggcagccccgcccccgccccctcctcttctccgctccaagcccgagaagctggggagcatggaccagaccccgcagcgctggcaccatgacgctcgcccgcttcgtgctagccctgatgttaggggcgctccccgaagtggtcggctttgattctgtcctcaatgattccctccaccacagccaccgccattcgccccctgcgggtccgcactacccctattaccttcccacccagcagcggcccccgaggacgcgtccgccgccgcctctcccgcgcttcccgcgccccccgcgggcgctccctgcccagcgcccgcacgccctccaggccgggcacacgccccggccgcacccctggggctgccccgccggcgagccatgggtcagcgtgacggacttcggcgccccgtgtctgcggtgggcggaggtgccacccttcctggagcggtcgcccccagcgagctgggctcagctgcgaggacagcgccacaacttttgtcggagccccgacggcgcgggcagaccctggtgtttctacggagacgcccgtggcaaggtggactggggctactgcgactgcagacacggatcagtacgacttcgtggcggcaaaaatgagtttgaaggcacagtggaagtatatgcaagtggagtttggggcactgtctgtagcagccactgggatgattctgatgcatcagtcatttgtcaccagctgcagctgggaggaaaaggaatagcaaaacaaaccccgttttctggactgggccttattcccatttattggagcaatgtccgttgccgaggagatgaagaaaatatactgctttgtgaaaaagacatctggcagggtggggtgtgtcctcagaagatggcagctgctgtcacgtgtagcttttcccatggcccaacgttccccatcattcgccttgctggaggcagcagtgtgcatgaaggccgggtggagctctaccatgctggccagtggggaaccgtttgtgatgaccaatgggatgatgccgatgcagaagtgatctgcaggcagctgggcctcagtggcattgccaaagcatggcatcaggcatattttggggaagggtctggcccagttatgttggatgaagtacgctgcactgggaatgagctttcaattgagcagtgtccaaagagctcctggggagagcataactgtggccataaagaagatgctggagtgtcctgtacccctctaacagatggggtcatcagacttgcaggtgggaaaggcagccatgagggtcgcttggaggtatattacagaggccagtggggaactgtctgtgatgatggctggactgagctgaatacatacgtggtttgtcgacaattgggatttaaatatggtaaacaagcatctgccaaccattttgaagaaagcacagggcccatatggttggatgacgtcagctgctcaggaaaggaaaccagatttcttcagtgttccaggcgacagtggggaaggcatgactgcagccaccgcgaagatgttagcattgcctgctaccctggcggcgagggacacaggctctctctgggttttcctgtcagactgatggatggagaaaataagaaagaaggacgagtggaggtttttatcaatggccagtggggaacaatctgtgatgatggatggactgataaggatgcagctgtgatctgtcgtcagcttggctacaagggtcctgccagagcaagaaccatggcttactttggagaaggaaaaggacccatccatgtggataatgtgaagtgcacaggaaatgagaggtccttggctgactgtatcaagcaagatattggaagacacaactgccgccacagtgaagatgcaggagttatttgtgattattttggcaagaaggcctcaggtaacagtaataaagagtccctctcatctgtttgtggcttgagattactgcaccgtcggcagaagcggatcattggtgggaaaaattctttaaggggtggttggccttggcaggtttccctccggctgaagtcatcccatggagatggcaggctcctctgcggggctacgctcctgagtagctgctgggtcctcacagcagcacactgtttcaagaggtatggcaacagcactaggagctatgctgttagggttggagattatcatactctggtaccagaggagtttgaggaagaaattggagttcaacagattgtgattcatcgggagtatcgacccgaccgcagtgattatgacatagccctggttagattacaaggaccagaagagcaatgtgccagattcagcagccatgttttgccagcctgtttaccactctggagagagaggccacagaaaacagcatccaactgttacataacaggatggggtgacacaggacgagcctattcaagaacactacaacaagcagccattcccttacttcctaaaaggttttgtgaagaacgttataagggtcggtttacagggagaatgctttgtgctggaaacctccatgaacacaaacgcgtggacagctgccagggagacagcggaggaccactcatgtgtgaacggcccggagagagctgggtggtgtatggggtgacctcctgggggtatggctgtggagtcaaggattctcctggtgtttataccaaagtctcagcctttgtaccttggataaaaagtgtcaccaaactgtaattcttcatggaaacttcaaagcagcatttaaacaaatggaaaactttgaacccccactattagcactcagcagagatgacaacaaatggcaagatctgtttttgctttgtgttgtggtaaaaaattgtgtaccccctgctgcttttgagaaatttgtgaacattttcagaggcctcagtgtagtggaagtgataatccttaaatgaacattttctaccctaatttcactggagtgacttattctaagcctcatctatcccctacctatttctcaaaatcattctatgctgattttacaaaagatcatttttacatttgaactgagaaccccttttaattgaatcagtggtgtctgaaatcatattaaatacccacatttgacataaatgcggtaccctttactacactcatgagtggcatatttatgcttaggtcttttcaaaagacttgacaagaaatcttcatattctctgtagcctttgtcaagtgaggaaatcagtggttaaagaattccactataaacttttaggcctgaataggagtagtaaagcctcaaggacatctgcctgtcacaatatattctcaaagtgatctgatatttggaaacaagtatccttgttgagtaccaagtgctacagaaaccataagataaaaatactttctacctacagcgtataaactagcaaaatttgaaaggatttctggtaactaaatgccagctggacatacaacctattttatccaacacattaacatatctactatatttgcttttaacaagcacctcatcatagtccacgttccccgaccatgatgtaagagtgccacccactgacacttccctgtaactgacttatacctgcaggttttcccaagcccaacctgatacaatccaatcttaaaatatactagtcaaaatgctttcctggcctacacattgaaaagttctaatacatacagcagttataacatatgccaggcactgcattaggcagctttgcacatcactgacaatttgcaaaaggccagtaaatcttatggtagtagcccttgttttcaaatgggggaaaacaggcttgcctcaaagtgagaccagttggtgaaactgattccaaactccagaaaaaatgctgatttttttccccatggttctcctacctaaatgattggtttccctatggctatttctccaagagttaagggatagctgcttaactatgcacctttacagaacattcttagcagtaatgctcaaatttaaaaggcacactcaagatacttccatgtcatggatccttccccaggtcccagtagtataaatatagggaagaggttagcatgaacttacaaattgttttaagtaatcctcttgaatgccagtcattaaaggactttgcccttctacatcaaattacatccttttcacaaatccccatttctgtaataactggtgcaaacctaaaggtgctttatagttttactactttgcagatttgcaatgctgcatataatgcagaagagcattaaaaacttttgtaaaaactcatgattttgataaacttttaaagtagcgtttatatgtaaatagaactacacatggcacacacacttgcacaagggcttcagaaaaacgtgcaatataggtgagaaaaatgtctattgaaactttctcacaggctgcccttataattaaactagtgttggggcaagcaacatctgtttcaagtagatcagggactagcaaacctaaaaggcagcaagcagcctgcagtttgctcaatccttaagaatacatggttcatacaacatgcttttactatgtcttaagtgtgacttttgaaagatacaagtgttctgtgcatatttgtgtaaataaatacataattttccaccttgta

SEQ ID NO: 139584 - DNA, 2628 bp, Artificial Sequence
  derived and/or modified sequence
atgaccctggccagattcgtgctggccctgatgctgggcgccctgcccgaggtggtgggcttcgacagcgtgctgaacgacagcctgcaccacagccacagacacagcccccccgccggcccccactacccctactacctgcccacccagcagagaccccccagaaccagaccccccccccccctgcccagattccccagaccccccagagccctgcccgcccagagaccccacgccctgcaggccggccacacccccagaccccacccctggggctgccccgccggcgagccctgggtgagcgtgaccgacttcggcgccccctgcctgagatgggccgaggtgccccccttcctggagagaagcccccccgccagctgggcccagctgagaggccagagacacaacttctgcagaagccccgacggcgccggcagaccctggtgcttctacggcgacgccagaggcaaggtggactggggctactgcgactgcagacacggcagcgtgagactgagaggcggcaagaacgagttcgagggcaccgtggaggtgtacgccagcggcgtgtggggcaccgtgtgcagcagccactgggacgacagcgacgccagcgtgatctgccaccagctgcagctgggcggcaagggcatcgccaagcagacccccttcagcggcctgggcctgatccccatctactggagcaacgtgagatgcagaggcgacgaggagaacatcctgctgtgcgagaaggacatctggcagggcggcgtgtgcccccagaagatggccgccgccgtgacctgcagcttcagccacggccccaccttccccatcatcagactggccggcggcagcagcgtgcacgagggcagagtggagctgtaccacgccggccagtggggcaccgtgtgcgacgaccagtgggacgacgccgacgccgaggtgatctgcagacagctgggcctgagcggcatcgccaaggcctggcaccaggcctacttcggcgagggcagcggccccgtgatgctggacgaggtgagatgcaccggcaacgagctgagcatcgagcagtgccccaagagcagctggggcgagcacaactgcggccacaaggaggacgccggcgtgagctgcacccccctgaccgacggcgtgatcagactggccggcggcaagggcagccacgagggcagactggaggtgtactacagaggccagtggggcaccgtgtgcgacgacggctggaccgagctgaacacctacgtggtgtgcagacagctgggcttcaagtacggcaagcaggccagcgccaaccacttcgaggagagcaccggccccatctggctggacgacgtgagctgcagcggcaaggagaccagattcctgcagtgcagcagaagacagtggggcagacacgactgcagccacagagaggacgtgagcatcgcctgctaccccggcggcgagggccacagactgagcctgggcttccccgtgagactgatggacggcgagaacaagaaggagggcagagtggaggtgttcatcaacggccagtggggcaccatctgcgacgacggctggaccgacaaggacgccgccgtgatctgcagacagctgggctacaagggccccgccagagccagaaccatggcctacttcggcgagggcaagggccccatccacgtggacaacgtgaagtgcaccggcaacgagagaagcctggccgactgcatcaagcaggacatcggcagacacaactgcagacacagcgaggacgccggcgtgatctgcgactacttcggcaagaaggccagcggcaacagcaacaaggagagcctgagcagcgtgtgcggcctgagactgctgcacagaagacagaagagaatcatcggcggcaagaacagcctgagaggcggctggccctggcaggtgagcctgagactgaagagcagccacggcgacggcagactgctgtgcggcgccaccctgctgagcagctgctgggtgctgaccgccgcccactgcttcaagagatacggcaacagcaccagaagctacgccgtgagagtgggcgactaccacaccctggtgcccgaggagttcgaggaggagatcggcgtgcagcagatcgtgatccacagagagtacagacccgacagaagcgactacgacatcgccctggtgagactgcagggccccgaggagcagtgcgccagattcagcagccacgtgctgcccgcctgcctgcccctgtggagagagagaccccagaagaccgccagcaactgctacatcaccggctggggcgacaccggcagagcctacagcagaaccctgcagcaggccgccatccccctgctgcccaagagattctgcgaggagagatacaagggcagattcaccggcagaatgctgtgcgccggcaacctgcacgagcacaagagagtggacagctgccagggcgacagcggcggccccctgatgtgcgagagacccggcgagagctgggtggtgtacggcgtgaccagctggggctacggctgcggcgtgaaggacagccccggcgtgtacaccaaggtgagcgccttcgtgccctggatcaagagcgtgaccaagctgtag

SEQ ID NO: 139585 - protein, 605 aa, Artificial Sequence
  derived and/or modified sequence
MAGLYSLGVSVFSDQGGRKYMEDVTQIVVEPEPTAEEKPSPRRSLSQPLPPRPSPAALPGGEVSGKGPAVAAREARDPLPDAGASPAPSRCCRRRSSVAFFAVCDGHGGREAAQFAREHLWGFIKKQKGFTSSEPAKVCAAIRKGFLACHLAMWKKLAEWPKTMTGLPSTSGTTASVVIIRGMKMYVAHVGDSGVVLGIQDDPKDDFVRAVEVTQDHKPELPKERERIEGLGGSVMNKSGVNRVVWKRPRLTHNGPVRRSTVIDQIPFLAVARALGDLWSYDFFSGEFVVSPEPDTSVHTLDPQKHKYIILGSDGLWNMIPPQDAISMCQDQEEKKYLMGEHGQSCAKMLVNRALGRWRQRMLRADNTSAIVICISPEVDNQGNFTNEDELYLNLTDSPSYNSQETCVMTPSPCSTPPVKSLEEDPWPRVNSKDHIPALVRSNAFSENFLEVSAEIARENVQGVVIPSKDPEPLEENCAKALTLRIHDSLNNSLPIGLVPTNSTNTVMDQKNLKMSTPGQMKAQEIERTPPTNFKRTLEESNSGPLMKKHRRNGLSRSSGAQPASLPTTSQRKNSVKLTMRRRLRGQKKIGNPLLHQHRKTVCVC

SEQ ID NO: 139586 - protein, 430 aa, Artificial Sequence
  derived and/or modified sequence
MAGLYSLGVSVFSDQGGRKYMEDVTQIVVEPEPTAEEKPSPRRSLSQPLPPRPSPAALPGGEVSGKGPAVAAREARDPLPDAGASPAPSRCCRRRSSVAFFAVCDGHGGREAAQFAREHLWGFIKKQKGFTSSEPAKVCAAIRKGFLACHLAMWKKLAEWPKTMTGLPSTSGTTASVVIIRGMKMYVAHVGDSGVVLGIQDDPKDDFVRAVEVTQDHKPELPKERERIEGLGGSVMNKSGVNRVVWKRPRLTHNGPVRRSTVIDQIPFLAVARALGDLWSYDFFSGEFVVSPEPDTSVHTLDPQKHKYIILGSDGLWNMIPPQDAISMCQDQEEKKYLMGEHGQSCAKMLVNRALGRWRQRMLRADNTSAIVICISPEVDNQGNFTNEDELYLNLTDSPSYNSQETCVMTPSPCSTPPVKDFGFELDSRK

SEQ ID NO: 139587 - protein, 278 aa, Artificial Sequence
  derived and/or modified sequence
MWKKLAEWPKTMTGLPSTSGTTASVVIIRGMKMYVAHVGDSGVVLGIQDDPKDDFVRAVEVTQDHKPELPKERERIEGLGGSVMNKSGVNRVVWKRPRLTHNGPVRRSTVIDQIPFLAVARALGDLWSYDFFSGEFVVSPEPDTSVHTLDPQKHKYIILGSDGLWNMIPPQDAISMCQDQEEKKYLMGEHGQSCAKMLVNRALGRWRQRMLRADNTSAIVICISPEVDNQGNFTNEDELYLNLTDSPSYNSQETCVMTPSPCSTPPVKDFGFELDSRK

SEQ ID NO: 139588 - DNA, 1818 bp, Artificial Sequence
  derived and/or modified sequence
atggccggcctgtacagcctgggcgtgagcgtgttcagcgaccagggcggcagaaagtacatggaggacgtgacccagatcgtggtggagcccgagcccaccgccgaggagaagcccagccccagaagaagcctgagccagcccctgccccccagacccagccccgccgccctgcccggcggcgaggtgagcggcaagggccccgccgtggccgccagagaggccagagaccccctgcccgacgccggcgccagccccgcccccagcagatgctgcagaagaagaagcagcgtggccttcttcgccgtgtgcgacggccacggcggcagagaggccgcccagttcgccagagagcacctgtggggcttcatcaagaagcagaagggcttcaccagcagcgagcccgccaaggtgtgcgccgccatcagaaagggcttcctggcctgccacctggccatgtggaagaagctggccgagtggcccaagaccatgaccggcctgcccagcaccagcggcaccaccgccagcgtggtgatcatcagaggcatgaagatgtacgtggcccacgtgggcgacagcggcgtggtgctgggcatccaggacgaccccaaggacgacttcgtgagagccgtggaggtgacccaggaccacaagcccgagctgcccaaggagagagagagaatcgagggcctgggcggcagcgtgatgaacaagagcggcgtgaacagagtggtgtggaagagacccagactgacccacaacggccccgtgagaagaagcaccgtgatcgaccagatccccttcctggccgtggccagagccctgggcgacctgtggagctacgacttcttcagcggcgagttcgtggtgagccccgagcccgacaccagcgtgcacaccctggacccccagaagcacaagtacatcatcctgggcagcgacggcctgtggaacatgatccccccccaggacgccatcagcatgtgccaggaccaggaggagaagaagtacctgatgggcgagcacggccagagctgcgccaagatgctggtgaacagagccctgggcagatggagacagagaatgctgagagccgacaacaccagcgccatcgtgatctgcatcagccccgaggtggacaaccagggcaacttcaccaacgaggacgagctgtacctgaacctgaccgacagccccagctacaacagccaggagacctgcgtgatgacccccagcccctgcagcaccccccccgtgaagagcctggaggaggacccctggcccagagtgaacagcaaggaccacatccccgccctggtgagaagcaacgccttcagcgagaacttcctggaggtgagcgccgagatcgccagagagaacgtgcagggcgtggtgatccccagcaaggaccccgagcccctggaggagaactgcgccaaggccctgaccctgagaatccacgacagcctgaacaacagcctgcccatcggcctggtgcccaccaacagcaccaacaccgtgatggaccagaagaacctgaagatgagcacccccggccagatgaaggcccaggagatcgagagaaccccccccaccaacttcaagagaaccctggaggagagcaacagcggccccctgatgaagaagcacagaagaaacggcctgagcagaagcagcggcgcccagcccgccagcctgcccaccaccagccagagaaagaacagcgtgaagctgaccatgagaagaagactgagaggccagaagaagatcggcaaccccctgctgcaccagcacagaaagaccgtgtgcgtgtgctag

SEQ ID NO: 139589 - DNA, 1293 bp, Artificial Sequence
  derived and/or modified sequence
atggccggcctgtacagcctgggcgtgagcgtgttcagcgaccagggcggcagaaagtacatggaggacgtgacccagatcgtggtggagcccgagcccaccgccgaggagaagcccagccccagaagaagcctgagccagcccctgccccccagacccagccccgccgccctgcccggcggcgaggtgagcggcaagggccccgccgtggccgccagagaggccagagaccccctgcccgacgccggcgccagccccgcccccagcagatgctgcagaagaagaagcagcgtggccttcttcgccgtgtgcgacggccacggcggcagagaggccgcccagttcgccagagagcacctgtggggcttcatcaagaagcagaagggcttcaccagcagcgagcccgccaaggtgtgcgccgccatcagaaagggcttcctggcctgccacctggccatgtggaagaagctggccgagtggcccaagaccatgaccggcctgcccagcaccagcggcaccaccgccagcgtggtgatcatcagaggcatgaagatgtacgtggcccacgtgggcgacagcggcgtggtgctgggcatccaggacgaccccaaggacgacttcgtgagagccgtggaggtgacccaggaccacaagcccgagctgcccaaggagagagagagaatcgagggcctgggcggcagcgtgatgaacaagagcggcgtgaacagagtggtgtggaagagacccagactgacccacaacggccccgtgagaagaagcaccgtgatcgaccagatccccttcctggccgtggccagagccctgggcgacctgtggagctacgacttcttcagcggcgagttcgtggtgagccccgagcccgacaccagcgtgcacaccctggacccccagaagcacaagtacatcatcctgggcagcgacggcctgtggaacatgatccccccccaggacgccatcagcatgtgccaggaccaggaggagaagaagtacctgatgggcgagcacggccagagctgcgccaagatgctggtgaacagagccctgggcagatggagacagagaatgctgagagccgacaacaccagcgccatcgtgatctgcatcagccccgaggtggacaaccagggcaacttcaccaacgaggacgagctgtacctgaacctgaccgacagccccagctacaacagccaggagacctgcgtgatgacccccagcccctgcagcaccccccccgtgaaggacttcggcttcgagctggacagcagaaagtag

SEQ ID NO: 139590 - DNA, 837 bp, Artificial Sequence
  derived and/or modified sequence
atgtggaagaagctggccgagtggcccaagaccatgaccggcctgcccagcaccagcggcaccaccgccagcgtggtgatcatcagaggcatgaagatgtacgtggcccacgtgggcgacagcggcgtggtgctgggcatccaggacgaccccaaggacgacttcgtgagagccgtggaggtgacccaggaccacaagcccgagctgcccaaggagagagagagaatcgagggcctgggcggcagcgtgatgaacaagagcggcgtgaacagagtggtgtggaagagacccagactgacccacaacggccccgtgagaagaagcaccgtgatcgaccagatccccttcctggccgtggccagagccctgggcgacctgtggagctacgacttcttcagcggcgagttcgtggtgagccccgagcccgacaccagcgtgcacaccctggacccccagaagcacaagtacatcatcctgggcagcgacggcctgtggaacatgatccccccccaggacgccatcagcatgtgccaggaccaggaggagaagaagtacctgatgggcgagcacggccagagctgcgccaagatgctggtgaacagagccctgggcagatggagacagagaatgctgagagccgacaacaccagcgccatcgtgatctgcatcagccccgaggtggacaaccagggcaacttcaccaacgaggacgagctgtacctgaacctgaccgacagccccagctacaacagccaggagacctgcgtgatgacccccagcccctgcagcaccccccccgtgaaggacttcggcttcgagctggacagcagaaagtag

SEQ ID NO: 139591 - DNA, 1818 bp, Artificial Sequence
  derived and/or modified sequence
atggcgggtctctattcactgggagtttccgttttcagtgaccagggcggccgaaaatatatggaagatgtgacacagattgtggtggaacccgagcctaccgccgaagagaaaccgagccctcgccgctcgctctcccaaccattacccccaaggccctctcccgcagccctacctgggggggaggttagtggcaaggggccagccgtggctgctcgtgaagcccgcgaccctctgccagacgcgggggcaagcccggccccgagccgttgctgtcgccggcgcagctcagtggcatttttcgcagtttgtgatggacacggcggacgggaggcggcccagtttgccagagagcatctttggggctttatcaaaaagcagaaggggttcacttctagtgagcctgcaaaggtctgcgctgctattagaaagggttttctggcctgccacttggccatgtggaagaagctggccgagtggccgaagacaatgacagggttgccatcaactagcggcactaccgcctctgtggtgatcatcaggggaatgaaaatgtacgtcgctcacgtgggagacagcggggttgttctaggtatacaggatgatcctaaagatgacttcgtgcgggccgtggaggtgacccaggatcacaagcccgaactgcccaaggagagggagaggatcgagggactcggcggtagtgtgatgaacaagagcggtgtcaatcgtgtggtatggaaacgcccacgcttaactcacaacggccccgttagaaggagtacagtgatagaccagattcccttcctggcggtcgcacgggccctgggcgacctctggtcctacgattttttttccggcgaatttgtggtgtcaccagagccggatacgagcgtccatacccttgacccccagaaacacaagtacatcattcttggaagcgacggtttgtggaacatgattcctcctcaagacgcaatctctatgtgccaggaccaggaggaaaagaagtacctcatgggggagcacggccaatcctgcgccaagatgttagtgaaccgggcccttggacgttggcgccagcgaatgctgcgggccgataacacctcagccattgtgatctgtatttcacctgaggtggacaatcaaggcaattttaccaatgaggatgagctttatctcaacctaacggactcaccgtcctataacagtcaggaaacctgcgttatgacaccatcaccatgctcaacacctcccgtgaaaagccttgaggaagatccttggccaagggtgaactcaaaggaccacatccccgcactggtccgaagtaacgccttctctgagaacttccttgaggtctccgccgagattgcgcgggagaatgtgcagggtgttgtgattccctcaaaggatcccgaaccactggaggaaaactgcgccaaagcgcttaccctgcggatccatgacagcctgaacaattcgctgcctattggattagtgcccactaactccaccaatacggtcatggaccagaagaacctcaagatgagtacacctggacagatgaaagcgcaggagattgaaagaaccccaccaacaaacttcaagcggacactcgaggaaagtaactcaggtccactgatgaaaaaacacagacggaacggactctcaaggagctcgggagctcagcctgcgtccctgccgaccactagtcagcggaaaaacagcgtgaaactcacgatgaggcgaaggctgcggggacagaaaaaaatagggaacccactacttcatcaacacagaaaaaccgtgtgtgtgtgttag

SEQ ID NO: 139592 - DNA, 1293 bp, Artificial Sequence
  derived and/or modified sequence
atggcaggtttatacagtcttggagtgagtgtattcagtgaccagggaggccgtaagtacatggaagatgtgactcagattgttgtggagcctgaaccgactgctgaagagaaaccctctccacggaggagcttgagccaaccgctccctcctcgaccatcgcctgccgctctgcccggcggcgaggtgtccgggaagggaccagcggtcgccgcgcgtgaggcacgtgacccgcttcctgatgccggagcctcgcctgcaccctcacggtgttgcagacggcgtagctctgtggctttttttgcagtgtgcgatgggcatggcggacgtgaggcagcccagttcgccagggaacatctttggggttttatcaaaaagcagaaaggcttcaccagcagcgagcctgcaaaggtgtgcgccgcaatccggaaaggattcttagcgtgccacctggctatgtggaagaaactggctgaatggcccaagacaatgactggcctgccttccacaagcggtaccactgcgagcgtggtgattattcgggggatgaagatgtacgtcgcgcacgtgggcgacagcggcgtggtactcggaatccaggacgatccaaaagacgacttcgtgcgggcagtggaggttactcaagatcataagccagagctgcctaaggagcgggagcggattgaaggcctcggaggatcagttatgaacaagagcggagtgaatagagttgtgtggaagaggccaagacttacccacaacgggccggtgagaaggagcacagtaatagatcaaattccttttctggctgtggcacgggctctgggggatctgtggtcatacgacttcttttcaggagaatttgtggtgagcccagagcccgacaccagcgttcacaccctcgaccctcaaaaacacaaatacataatcctcggctctgatggtctgtggaacatgattcccccccaagacgctatctcgatgtgtcaagatcaagaagaaaagaagtacctcatgggggaacatggacaaagttgcgccaagatgctggtgaaccgagcgctcggaaggtggagacagagaatgctgagggccgacaacacttcggccattgtgatctgtatctctcccgaggtggacaatcagggcaactttacaaatgaagacgaactgtacctaaacttaaccgactcaccctcatacaattcccaagagacgtgcgtaatgacgccaagcccttgttcaacgccgcccgtgaaggactttggcttcgaattggactcccgtaaatag

SEQ ID NO: 139593 - DNA, 837 bp, Artificial Sequence
  derived and/or modified sequence
atgtggaaaaagctagctgaatggcctaagactatgaccgggttaccctctacctccgggaccacagcgtccgtggtcatcatccggggcatgaaaatgtacgtggcacacgttggggattcaggcgtggtgctggggattcaggacgaccctaaagacgacttcgtacgcgctgtagaggtcacccaagaccataaaccggaactcccgaaagagagggaacgaattgaagggttaggggggagtgtgatgaataaatcaggggtaaatcgggtagtgtggaagcgaccgaggcttacacacaacggtcccgtaaggcgctcaaccgtgatcgatcagatacctttcttagctgtcgcacgcgccttaggcgatctgtggagttatgacttcttttcaggcgaatttgtagtgtcccctgaaccggacacatccgtgcatacactggatccacagaagcataagtacattatcttaggctctgacggtctgtggaacatgattccaccccaggacgccatctctatgtgccaggatcaagaagaaaagaaatacctgatgggcgaacatggacagagttgtgccaagatgctggtgaatcgcgccctgggccgatggcggcaacgcatgctccgggccgacaacacctcggcaattgtcatctgcatctcgcccgaggttgataaccagggaaatttcacaaacgaagacgaactgtacctgaatctgactgattcaccctcttacaactctcaggagacctgtgtcatgactccctcaccctgctcaactcctcccgtcaaagactttggtttcgaactggacagtaggaagtag

SEQ ID NO: 139594 - DNA, 1818 bp, Artificial Sequence
  derived and/or modified sequence
atggccggcctgtacagcctgggcgtgtctgtgttcagtgaccagggcggcaggaagtacatggaggatgtgacccagatcgtggtggagcctgagcccacagctgaggagaagcccagcccccggcgcagcctgagccagcccctgcccccccggcccagccctgctgccctgcctggaggagaggtgtctgggaagggccctgctgtggccgcccgggaggcccgggaccccctgcctgatgctggggccagccctgcccccagccgctgctgcagaagaagaagctctgtggccttctttgctgtgtgtgatggccatggaggccgggaggccgcccagtttgcccgggagcacctgtggggcttcatcaagaagcagaagggcttcaccagcagcgagcccgccaaggtgtgtgccgccatcaggaagggcttcctggcctgccacctggccatgtggaagaagctggccgagtggcccaagaccatgacaggcctgcccagcaccagcggcaccacagcctctgtggtgatcatccggggcatgaagatgtatgtggcccacgtgggggacagcggcgtggtgctgggcatccaggatgaccccaaggatgactttgtgcgggctgtggaggtgacccaggaccacaagccagagctgcccaaggagcgggagcgcatcgagggcctgggcggctctgtgatgaacaagtctggagtgaacagagtggtgtggaagaggccccggctgacccacaacggccctgtgcggcgcagcacagtgattgaccagatccccttcctggccgtggcccgggccctgggggacctgtggagctatgacttcttctctggagaatttgtggtgtccccagagccagacacctctgtgcacaccctggacccccagaagcacaagtacatcatcctgggcagtgatggcctgtggaacatgatccccccccaggatgccatctccatgtgccaggaccaggaggagaagaagtacctgatgggagagcacggccagagctgtgccaagatgctggtgaacagagccctgggccgctggaggcagaggatgctgcgggctgacaacaccagcgccatcgtcatctgcatcagccctgaggtggacaaccagggcaacttcaccaatgaagatgagctgtacctgaacctgacagacagccccagctacaacagccaggagacctgtgtgatgacccccagcccctgcagcaccccacctgtgaagagcctggaggaggacccctggccccgggtgaacagcaaggaccacatcccagccctggtgcgcagcaatgccttcagcgagaacttcctggaggtgtctgctgagatcgccagagaaaatgtgcagggcgtggtgatccccagcaaggaccctgagcccctggaggagaactgtgccaaggccctgaccctgcgcatccatgacagcctgaacaacagcctgcccatcggcctggtgcccaccaacagcaccaacacagtgatggaccagaagaacctgaagatgagcaccccaggccagatgaaggcccaggagattgaaagaacaccacccaccaacttcaagaggaccctggaggagagcaacagcggccccctgatgaagaagcacagaagaaatggcctgagccgcagcagcggggcccagcctgccagcctgcccaccaccagccagaggaagaacagcgtgaagctgaccatgagaagaaggctgcggggccagaagaagattggcaaccccctgctgcaccagcacaggaagacagtgtgtgtgtgctag

SEQ ID NO: 139595 - DNA, 1293 bp, Artificial Sequence
  derived and/or modified sequence
atggccggcctgtacagcctgggcgtgtctgtgttcagtgaccagggcggcaggaagtacatggaggatgtgacccagatcgtggtggagcctgagcccacagctgaggagaagcccagcccccggcgcagcctgagccagcccctgcccccccggcccagccctgctgccctgcctggaggagaggtgtctgggaagggccctgctgtggccgcccgggaggcccgggaccccctgcctgatgctggggccagccctgcccccagccgctgctgcagaagaagaagctctgtggccttctttgctgtgtgtgatggccatggaggccgggaggccgcccagtttgcccgggagcacctgtggggcttcatcaagaagcagaagggcttcaccagcagcgagcccgccaaggtgtgtgccgccatcaggaagggcttcctggcctgccacctggccatgtggaagaagctggccgagtggcccaagaccatgacaggcctgcccagcaccagcggcaccacagcctctgtggtgatcatccggggcatgaagatgtatgtggcccacgtgggggacagcggcgtggtgctgggcatccaggatgaccccaaggatgactttgtgcgggctgtggaggtgacccaggaccacaagccagagctgcccaaggagcgggagcgcatcgagggcctgggcggctctgtgatgaacaagtctggagtgaacagagtggtgtggaagaggccccggctgacccacaacggccctgtgcggcgcagcacagtgattgaccagatccccttcctggccgtggcccgggccctgggggacctgtggagctatgacttcttctctggagaatttgtggtgtccccagagccagacacctctgtgcacaccctggacccccagaagcacaagtacatcatcctgggcagtgatggcctgtggaacatgatccccccccaggatgccatctccatgtgccaggaccaggaggagaagaagtacctgatgggagagcacggccagagctgtgccaagatgctggtgaacagagccctgggccgctggaggcagaggatgctgcgggctgacaacaccagcgccatcgtcatctgcatcagccctgaggtggacaaccagggcaacttcaccaatgaagatgagctgtacctgaacctgacagacagccccagctacaacagccaggagacctgtgtgatgacccccagcccctgcagcaccccacctgtgaaggactttggatttgagctggacagcaggaagtag

SEQ ID NO: 139596 - DNA, 837 bp, Artificial Sequence
  derived and/or modified sequence
atgtggaagaagctggccgagtggcccaagaccatgacaggcctgcccagcaccagcggcaccacagcctctgtggtgatcatccggggcatgaagatgtatgtggcccacgtgggggacagcggcgtggtgctgggcatccaggatgaccccaaggatgactttgtgcgggctgtggaggtgacccaggaccacaagccagagctgcccaaggagcgggagcgcatcgagggcctgggcggctctgtgatgaacaagtctggagtgaacagagtggtgtggaagaggccccggctgacccacaacggccctgtgcggcgcagcacagtgattgaccagatccccttcctggccgtggcccgggccctgggggacctgtggagctatgacttcttctctggagaatttgtggtgtccccagagccagacacctctgtgcacaccctggacccccagaagcacaagtacatcatcctgggcagtgatggcctgtggaacatgatccccccccaggatgccatctccatgtgccaggaccaggaggagaagaagtacctgatgggagagcacggccagagctgtgccaagatgctggtgaacagagccctgggccgctggaggcagaggatgctgcgggctgacaacaccagcgccatcgtcatctgcatcagccctgaggtggacaaccagggcaacttcaccaatgaagatgagctgtacctgaacctgacagacagccccagctacaacagccaggagacctgtgtgatgacccccagcccctgcagcaccccacctgtgaaggactttggatttgagctggacagcaggaagtag

SEQ ID NO: 139597 - DNA, 1818 bp, Artificial Sequence
  derived and/or modified sequence
atggccggcctgtacagcctgggcgtgagcgtgttcagcgaccagggtggtcggaagtacatggaagatgttacccagattgtagtggagcccgagcccacggccgaggagaagccaagccccagaaggtctttgtctcagcccctccccccccgtccaagtccagcggcattgccaggtggcgaagtgtctggaaagggccctgctgtggccgcaagagaggctagagacccccttcctgacgctggagctagcccggcaccaagccgctgttgcaggcggcgctctagcgtcgcttttttcgctgtctgtgacggccacggcgggcgcgaagccgcccagtttgctcgggagcacctctggggtttcattaaaaaacaaaagggtttcacctcttcagagcctgccaaagtctgtgcggctatccgtaaaggattcctggcatgccacctggctatgtggaagaagcttgctgagtggccaaaaaccatgaccggacttcccagcaccagtggaaccactgcctctgtggtgatcattagaggcatgaagatgtacgtggctcacgttggggacagcggagtggttctgggcattcaggacgatccaaaggatgattttgtaagagctgtggaagttactcaggatcataagccagagctgcccaaagagcgtgaaagaatagaagggctgggagggtctgtcatgaacaagtcaggtgtgaatagagtggtgtggaagagaccacgcctgacccacaatgggcctgtcaggcgatctaccgtgatcgaccagattccattcttagcagttgccagggcccttggcgatctctggagctacgatttcttcagcggagagttcgtcgtgtctcccgagccagacacttctgttcatacccttgacccccagaagcacaaatacatcatcttaggtagcgatggtctctggaacatgattcctccacaggatgccatctccatgtgtcaggaccaggaagaaaaaaaatacctgatgggcgaacatggtcaaagctgtgctaagatgttggtgaatcgagccctgggacgctggagacagaggatgttaagggcagacaacacttcggccattgtgatatgtattagcccagaggtggacaatcagggcaactttacgaacgaagacgagctgtatctcaatcttacagactccccaagttataatagtcaggagacctgcgtcatgactccttccccctgttccacacccccagtgaagagcctcgaggaggatccatggccccgagtcaattcaaaggatcatataccagccctggtgcgatctaacgccttttcagaaaattttctggaggtttccgccgagattgctcgtgagaatgtccagggggtggtaataccctctaaagaccctgagcctcttgaggagaattgcgccaaagctttgacactgcgaatccacgattctcttaacaattctctgcctatcggtctggtcccaaccaattcaaccaatacagttatggaccagaaaaacctgaaaatgtccacacccggccaaatgaaagcccaggagattgagaggaccccacctactaattttaagagaacactggaggaaagtaactcagggccgctgatgaagaaacataggcgcaacggactctctagaagctctggtgctcagcctgcatctctgcctacaacatctcagagaaagaacagtgttaagctaacaatgaggcgccggctgcgcggccaaaagaagattgggaaccccctgctgcatcagcaccggaagactgtttgtgtctgttag

SEQ ID NO: 139598 - DNA, 1293 bp, Artificial Sequence
  derived and/or modified sequence
atggccggcctgtacagcctgggcgtgagcgtgttcagcgaccagggtggtagaaaatacatggaggacgtaactcaaatcgtcgtggaacccgaacctactgccgaggagaagcctagccccagacgcagtttgtcccaacccctccctcctaggccttctcctgccgcccttccaggcggggaagtctccggcaaaggccccgcagtcgccgcacgcgaggcacgcgacccattgcccgacgcaggagcttctcctgcgcctagtcggtgttgtagacgaagatcctctgtggctttttttgcagtgtgcgacggacacggcggtagggaggcagctcagtttgcccgggagcacctctggggttttatcaaaaagcagaaggggtttacatcctctgaacccgctaaggtctgcgctgccattcgcaagggattcctggcttgtcacttggccatgtggaaaaagctcgccgagtggccaaaaaccatgacagggctgccttcaacatctgggacaaccgccagcgttgttataatacgagggatgaaaatgtacgtagctcacgtgggggatagcggagttgtcttgggtattcaggacgatcctaaggacgacttcgtgcgggcagtagaggtcacccaggaccacaagcctgagctccctaaggagcgcgaaaggatcgaagggctgggcgggtctgtgatgaacaagtctggcgtcaaccgtgtcgtatggaaaaggcctaggctcacacacaacggccctgtcaggcggtccaccgtgattgaccagatcccattcttggctgtggcaagagcgctgggagatctctggtcctacgacttcttctcaggagagtttgtggttagccccgagcccgatactagcgtccacacactcgatccccagaagcacaaatacataattctaggttcagacggactgtggaatatgatccctccacaagacgctatttccatgtgtcaggaccaggaagagaagaagtatttgatgggcgaacacggccaatcctgtgccaaaatgctagtgaacagggccttagggagatggcggcagcgtatgctgcgtgctgataatacttccgcgattgtcatctgtatttctccagaagtagataatcagggcaacttcacaaacgaagacgagctctacctgaatctgacagacagcccctcttacaacagccaggagacttgcgtcatgacaccctcgccatgtagcacccctcctgtgaaagacttcggatttgagctggattctaggaagtag

SEQ ID NO: 139599 - DNA, 837 bp, Artificial Sequence
  derived and/or modified sequence
atgtggaagaagctggccgagtggcccaagaccatgaccggcctgccttccacctctggaactacggcctcagtggtgattatcagaggcatgaagatgtatgtcgcacacgtcggggactccggggtggttctggggatccaagatgatcctaaggatgactttgttagagcagtcgaagtcacacaagaccataagcccgaactaccgaaagaaagggagcgcattgaaggcctaggtggttctgttatgaacaaatccggggtgaatcgtgtggtctggaaacggccaagattgactcacaatgggcccgtccggcgctcgacagtaattgaccagatccctttccttgccgtggcacgcgctctgggcgatctatggtcatacgattttttttctggcgagttcgtggtgagccctgaacccgacacgtctgtgcacaccttagatccccaaaaacacaaatacattatcctgggcagcgacggcctgtggaacatgatcccaccacaggacgcaattagcatgtgccaagaccaggaagagaagaagtacctgatgggcgagcacggccagtcatgtgctaagatgctggtgaaccgggctctgggccgctggcgacaaagaatgctccgtgcagataacacttcagccatcgttatatgtataagtccagaagttgacaaccaggggaacttcaccaacgaggatgaactgtatctcaacctgacagatagtccctcctataactcgcaggaaacctgcgtcatgacgcctagtccctgcagtacccctcccgtcaaggattttggcttcgagcttgatagtcggaaatag

SEQ ID NO: 139600 - DNA, 1818 bp, Artificial Sequence
  derived and/or modified sequence
atggcgggactttactcactcggcgtcagtgtattttccgatcagggtggtagaaagtacatggaggatgttactcagattgttgtagaacctgaacccaccgctgaggaaaagcctagtccaaggagatcgctctctcagccccttccaccacggcctagtcccgcagccctcccgggtggggaggttagcggtaaagggccagcagtagccgcaagggaagcgagggaccccctgcccgacgccggagcatctcctgcccctagccgatgttgcaggaggagaagctcagtggcctttttcgctgtttgtgacggacacggcggacgagaggctgctcagtttgcgagggaacatttatggggctttatcaaaaagcagaagggcttcacgtcatccgagccagccaaggtttgcgccgcaatccgaaagggatttctggcctgccatcttgctatgtggaagaaactcgctgaatggccaaaaacaatgacgggcctacccagtaccagcgggacaaccgcctccgtcgtcattatccggggaatgaagatgtacgtcgcccacgtaggcgattcaggcgtggttttggggatccaggacgaccccaaggacgattttgtccgtgcagtggaggtgacacaagaccacaaacctgagctccccaaggagcgcgaaagaatagaaggactgggcggttcagtcatgaataagtcaggggtgaatcgcgtcgtttggaagagacctaggctgacacataacgggcctgtcagaaggtccactgtcattgatcagattcctttcctcgccgtcgcccgtgccctgggcgatttgtggagctacgactttttctctggcgagtttgttgtaagtcctgaacccgatacttctgtgcacacgctggacccccagaagcataagtatatcatactcggcagcgacggcctctggaatatgataccaccccaggatgccatttctatgtgccaggaccaggaggagaagaaatacttgatgggtgaacacgggcagtcctgcgctaagatgctagtcaatagggccctggggagatggcgacagcggatgcttcgcgcagacaacacaagcgcgattgtcatttgtatttccccagaggtggataaccagggcaacttcacaaatgaagacgagctgtatttgaacctgaccgattccccttcgtataatagccaggagacatgcgtaatgaccccatccccttgtagtactccaccagtgaagtctctagaggaggatccttggccaagggttaactccaaggaccatatccctgcattggtgaggtcaaatgcgttctctgagaacttcctcgaagttagtgctgagatagcaagagaaaacgtgcagggcgtagtcatcccttcaaaagaccctgagcccctagaggaaaactgtgccaaagctcttaccctgcgtatacacgatagcctaaacaatagcctgccaataggcctcgtgcccacgaatagcacaaatacagtgatggatcagaaaaacctgaaaatgtccacacctgggcagatgaaggcccaggaaatcgaacgtacacctcccaccaacttcaagaggacattggaggaatccaactctggacctctgatgaagaaacacagaagaaacggattaagtcgttctagcggagcacagcccgcaagcctcccaaccacctctcaacggaagaactccgtcaaactcacgatgcggagacgcttgaggggtcagaaaaaaatcggaaatcctttgctgcatcagcaccgcaaaaccgtgtgtgtgtgttag

SEQ ID NO: 139601 - DNA, 1293 bp, Artificial Sequence
  derived and/or modified sequence
atggcaggtctttactcgctaggcgtgagtgtcttcagcgaccagggaggtaggaagtacatggaggatgtgacgcaaatcgtggtggagcccgagccaaccgctgaggaaaagcctagccccaggcgttcactttcccagccgctgccacctcgcccatctccggcagccctgcctggtggagaggtgtccggaaagggtcccgcagtcgccgctagggaggccagggatcccctgcctgacgccggtgcatcacccgctcctagtcgttgctgtcggaggaggagcagcgtagcttttttcgcagtgtgcgatgggcacgggggacgggaggccgcacagttcgcgcgagagcacctgtgggggtttattaagaagcagaagggctttactagttctgagccagccaaggtctgcgcggcaatccggaagggcttcttggcttgtcatctggctatgtggaaaaagcttgccgaatggcccaagactatgactggtttgcccagcacaagtgggaccaccgccagcgtggttattatcagaggcatgaagatgtatgtggctcatgttggagattccggcgtggtgcttgggattcaagacgaccctaaggatgacttcgtccgggcagttgaggttacacaagatcataagcccgagctaccgaaagagcgcgagaggatcgaagggctgggaggcagcgtgatgaataaatccggggttaaccgggtggtttggaaacgccctagactgacccataacgggcctgtccgtaggagcacagtgattgatcaaataccgtttctcgcagtcgctagagccttaggagacctctggtcttacgatttcttttccggggagtttgtggtctccccggagccagacacctcggtgcacacactcgatcctcagaagcacaagtacatcattctgggctctgacggcctctggaatatgataccgcctcaagacgctatatccatgtgtcaggaccaagaggagaaaaagtacctgatgggagagcatggacagtcgtgtgctaagatgttggtgaatagggccttgggcagatggcggcagagaatgttgagagcagataacacaagcgccatcgtgatctgtatttcgccagaggttgacaatcaggggaattttacgaacgaagatgaactatatttgaacctgacagatagcccgagctataacagtcaagagacctgcgtcatgacaccttccccatgttcgacaccccctgtgaaagactttggatttgagctggactctcgcaagtag

SEQ ID NO: 139602 - DNA, 837 bp, Artificial Sequence
  derived and/or modified sequence
atgtggaagaaactggccgaatggccgaagacaatgacaggactgcctagcaccagtggcacgaccgctagtgtcgttattattaggggaatgaaaatgtacgtcgcccatgtcggcgatagcggagttgtgctgggcatccaggacgaccccaaggacgattttgtgagagcagtagaagtgactcaggaccacaagcccgagctgcccaaggaacgcgaaagaatcgaaggcttaggtggaagcgttatgaataagagtggggttaaccgcgtcgtgtggaaacgccctagattgactcacaacggacccgttcgccgatccaccgtgatcgatcaaataccatttctggccgtcgcaagagctttgggggatctctggtcgtatgatttcttttcgggagagttcgtcgtaagtcctgaacctgatactagcgtccatacactggatcctcagaagcacaagtacattatcttaggaagcgacggtctctggaatatgattccaccccaagacgctatttctatgtgccaggatcaagaggaaaagaaatacctcatgggggaacatggccagagctgtgccaagatgctggtgaacagagccctagggagatggcgtcagcgcatgctgcgggctgataatacctccgccatcgttatatgtatatcccccgaagtcgacaaccagggcaactttacaaatgaggacgagctatatctaaatctgacagactcgcccagctacaattcccaagaaacctgcgtcatgaccccatctccatgcagcactcccccagtgaaggacttcgggtttgagctggattctcgcaagtag

SEQ ID NO: 139603 - DNA, 3163 bp, Artificial Sequence
  derived and/or modified sequence
agtgcgcaggcgcaactgcctggctctgctcgctccggcgctccggcccagctctcgcggacaagtccagacatcgcgcgcccccccttctccgggtccgccccctcccccttctcggcgtcgtcgaagataaacaatagttggccggcgagcgcctagtgtgtctcccgccgccggattcggcgggctgcgtgggaccggcgggatcccggccagccggccatggcggggctgtactcgctgggagtgagcgtcttctccgaccagggcgggaggaagtacatggaggacgttactcaaatcgttgtggagcccgaaccgacggctgaagaaaagccctcgccgcggcggtcgctgtctcagccgttgcctccgcggccgtcgccggccgcccttcccggcggcgaagtctcggggaaaggcccagcggtggcagcccgagaggctcgcgaccctctcccggacgccggggcctcgccggcacctagccgctgctgccgccgccgttcctccgtggcctttttcgccgtgtgcgacgggcacggcgggcgggaggcggcacagtttgcccgggagcacttgtggggtttcatcaagaagcagaagggtttcacctcgtccgagccggctaaggtttgcgctgccatccgcaaaggctttctcgcttgtcaccttgccatgtggaagaaactggcggaatggccaaagactatgacgggtcttcctagcacatcagggacaactgccagtgtggtcatcattcggggcatgaagatgtatgtagctcacgtaggtgactcaggggtggttcttggaattcaggatgacccgaaggatgactttgtcagagctgtggaggtgacacaggaccataagccagaacttcccaaggaaagagaacgaatcgaaggacttggtgggagtgtaatgaacaagtctggggtgaatcgtgtagtttggaaacgacctcgactcactcacaatggacctgttagaaggagcacagttattgaccagattccttttctggcagtagcaagagcacttggtgatttgtggagctatgatttcttcagtggtgaatttgtggtgtcacctgaaccagacacaagtgtccacactcttgaccctcagaagcacaagtatattatattggggagtgatggactttggaatatgattccaccacaagatgccatctcaatgtgccaggaccaagaggagaaaaaatacctgatgggtgagcatggacaatcttgtgccaaaatgcttgtgaatcgagcattgggccgctggaggcagcgtatgctccgagcagataacactagtgccatagtaatctgcatctctccagaagtggacaatcagggaaactttaccaatgaagatgagttatacctgaacctgactgacagcccttcctataatagtcaagaaacctgtgtgatgactccttccccatgttctacaccaccagtcaagtcactggaggaggatccatggccaagggtgaattctaaggaccatatacctgccctggttcgtagcaatgccttctcagagaattttttagaggtttcagctgagatagctcgagagaatgtccaaggtgtagtcataccctcaaaagatccagaaccacttgaagaaaattgcgctaaagccctgactttaaggatacatgattctttgaataatagccttccaattggccttgtgcctactaattcaacaaacactgtcatggaccaaaaaaatttgaagatgtcaactcctggccaaatgaaagcccaagaaattgaaagaacccctccaacaaactttaaaaggacattagaagagtccaattctggccccctgatgaagaagcatagacgaaatggcttaagtcgaagtagtggtgctcagcctgcaagtctccccacaacctcacagcgaaagaactctgttaaactcaccatgcgacgcagacttaggggccagaagaaaattggaaatcctttacttcatcaacacaggaaaactgtttgtgtttgctgaaatgcatctgggaaatgaggtttttccaaacttaggatataagagggctttttaaatttggtgccgatgttgaactttttttaaggggagaaaattaaaagaaatatacagtttgactttttggaattcagcagttttatcctggccttgtacttgcttgtattgtaaatgtggattttgtagatgttagggtataagttgctgtaaaatttgtgtaaatttgtatccacacaaattcagtctctgaatacacagtattcagagtctctgatacacagtaattgtgacaatagggctaaatgtttaaagaaatcaaaagaatctattagattttagaaaaacatttaaactttttaaaatacttattaaaaaatttgtataagccacttgtcttgaaaactgtgcaactttttaaagtaaattattaagcagactggaaaagtgatgtattttcatagtgacctgtgtttcacttaatgtttcttagagccaagtgtcttttaaacattattttttatttctgatttcataattcagaactaaatttttcatagaagtgttgagccatgctacagttagtcttgtcccaattaaaatactatgcagtatctcttacatcagtagcatttttctaaaaccttagtcatcagatatgcttactaaatcttcagcatagaaggaagtgtgtttgcctaaaacaatctaaaacaattcccttctttttcatcccagaccaatggcattattaggtcttaaagtagttactcccttctcgtgtttgcttaaaatatgtgaagttttccttgctatttcaataacagatggtgctgctaattcccaacatttcttaaattattttatatcatacagttttcattgattatatgggtatatattcatctaataaatcagtgaactgttcctcatgttgctgaatttgtagttgttggtttattttaatggtatgtacaagttgagtatcccttatccaaaatgcttgggaccagaagtgtttcagattttttaaaattttggaatatttgctttatactgagcttttgagtgttcccaatctgaaattcaaaatgctctaatgagcatttcctttgagcatcatgcctgc

SEQ ID NO: 139604 - DNA, 2996 bp, Artificial Sequence
  derived and/or modified sequence
cgcgcccccccttctccgggtccgccccctcccccttctcggcgtcgtcgaagataaacaatagttggccggcgagcgcctagtgtgtctcccgccgccggattcggcgggctgcgtgggaccggcgggatcccggccagccggccatggcggggctgtactcgctgggagtgagcgtcttctccgaccagggcgggaggaagtacatggaggacgttactcaaatcgttgtggagcccgaaccgacggctgaagaaaagccctcgccgcggcggtcgctgtctcagccgttgcctccgcggccgtcgccggccgcccttcccggcggcgaagtctcggggaaaggcccagcggtggcagcccgagaggctcgcgaccctctcccggacgccggggcctcgccggcacctagccgctgctgccgccgccgttcctccgtggcctttttcgccgtgtgcgacgggcacggcgggcgggaggcggcacagtttgcccgggagcacttgtggggtttcatcaagaagcagaagggtttcacctcgtccgagccggctaaggtttgcgctgccatccgcaaaggctttctcgcttgtcaccttgccatgtggaagaaactggcggaatggccaaagactatgacgggtcttcctagcacatcagggacaactgccagtgtggtcatcattcggggcatgaagatgtatgtagctcacgtaggtgactcaggggtggttcttggaattcaggatgacccgaaggatgactttgtcagagctgtggaggtgacacaggaccataagccagaacttcccaaggaaagagaacgaatcgaaggacttggtgggagtgtaatgaacaagtctggggtgaatcgtgtagtttggaaacgacctcgactcactcacaatggacctgttagaaggagcacagttattgaccagattccttttctggcagtagcaagagcacttggtgatttgtggagctatgatttcttcagtggtgaatttgtggtgtcacctgaaccagacacaagtgtccacactcttgaccctcagaagcacaagtatattatattggggagtgatggactttggaatatgattccaccacaagatgccatctcaatgtgccaggaccaagaggagaaaaaatacctgatgggtgagcatggacaatcttgtgccaaaatgcttgtgaatcgagcattgggccgctggaggcagcgtatgctccgagcagataacactagtgccatagtaatctgcatctctccagaagtggacaatcagggaaactttaccaatgaagatgagttatacctgaacctgactgacagcccttcctataatagtcaagaaacctgtgtgatgactccttccccatgttctacaccaccagtcaaggattttggatttgaactcgattcaagaaagtgatgtaacttattatcagagagccatctttacatcaatactaatctgaatgccagccatgtgtacagcactaataaaaagtcactggaggaggatccatggccaagggtgaattctaaggaccatatacctgccctggttcgtagcaatgccttctcagagaattttttagaggtttcagctgagatagctcgagagaatgtccaaggtgtagtcataccctcaaaagatccagaaccacttgaagaaaattgcgctaaagccctgactttaaggatacatgattctttgaataatagccttccaattggccttgtgcctactaattcaacaaacactgtcatggaccaaaaaaatttgaagatgtcaactcctggccaaatgaaagcccaagaaattgaaagaacccctccaacaaactttaaaaggacattagaagagtccaattctggccccctgatgaagaagcatagacgaaatggcttaagtcgaagtagtggtgctcagcctgcaagtctccccacaacctcacagcgaaagaactctgttaaactcaccatgcgacgcagacttaggggccagaagaaaattggaaatcctttacttcatcaacacaggaaaactgtttgtgtttgctgaaatgcatctgggaaatgaggtttttccaaacttaggatataagagggctttttaaatttggtgccgatgttgaactttttttaaggggagaaaattaaaagaaatatacagtttgactttttggaattcagcagttttatcctggccttgtacttgcttgtattgtaaatgtggattttgtagatgttagggtataagttgctgtaaaatttgtgtaaatttgtatccacacaaattcagtctctgaatacacagtattcagagtctctgatacacagtaattgtgacaatagggctaaatgtttaaagaaatcaaaagaatctattagattttagaaaaacatttaaactttttaaaatacttattaaaaaatttgtataagccacttgtcttgaaaactgtgcaactttttaaagtaaattattaagcagactggaaaagtgatgtattttcatagtgacctgtgtttcacttaatgtttcttagagccaagtgtcttttaaacattattttttatttctgatttcataattcagaactaaatttttcatagaagtgttgagccatgctacagttagtcttgtcccaattaaaatactatgcagtatctcttacatcagtagcatttttctaaaaccttagtcatcagatatgcttactaaatcttcagcatagaaggaagtgtgtttgcctaaaacaatctaaaacaattcccttctttttcatcccagaccaatggcattattaggtcttaaagtagttactcccttctcgtgtttgcttaaaatatgtgaagttttccttgctatttcaataacagatggtgctgctaattcccaacatttcttaaattattttatatcatacagttttcattgattatatgggtatatattcatctaataaatcagtgaactgtt

SEQ ID NO: 139605 - DNA, 1751 bp, Artificial Sequence
  derived and/or modified sequence
gtgcgcaggcgcaactgcctggctctgctcgctccggcgctccggcccagctctcgcggacaagtccagacatcgcgcgcccccccttctccgggtccgccccctcccccttctcggcgtcgtcgaagataaacaatagttggccggcgagcgcctagtgtgtctcccgccgccggattcggcgggctgcgtgggaccggcgggatcccggccagccggccatggcggggctgtactcgctgggagtgagcgtcttctccgaccagggcgggaggcggcacagtttgcccgggagcacttgtggggtttcatcaagaagcagaagggtttcacctcgtccgagccggctaaggtttgcgctgccatccgcaaaggctttctcgcttgtcaccttgccatgtggaagaaactggcggaatggccaaagactatgacgggtcttcctagcacatcagggacaactgccagtgtggtcatcattcggggcatgaagatgtatgtagctcacgtaggtgactcaggggtggttcttggaattcaggatgacccgaaggatgactttgtcagagctgtggaggtgacacaggaccataagccagaacttcccaaggaaagagaacgaatcgaaggacttggtgggagtgtaatgaacaagtctggggtgaatcgtgtagtttggaaacgacctcgactcactcacaatggacctgttagaaggagcacagttattgaccagattccttttctggcagtagcaagagcacttggtgatttgtggagctatgatttcttcagtggtgaatttgtggtgtcacctgaaccagacacaagtgtccacactcttgaccctcagaagcacaagtatattatattggggagtgatggactttggaatatgattccaccacaagatgccatctcaatgtgccaggaccaagaggagaaaaaatacctgatgggtgagcatggacaatcttgtgccaaaatgcttgtgaatcgagcattgggccgctggaggcagcgtatgctccgagcagataacactagtgccatagtaatctgcatctctccagaagtggacaatcagggaaactttaccaatgaagatgagttatacctgaacctgactgacagcccttcctataatagtcaagaaacctgtgtgatgactccttccccatgttctacaccaccagtcaaggattttggatttgaactcgattcaagaaagtgatgtaacttattatcagagagccatctttacatcaatactaatctgaatgccagccatgtgtacagcactaataaaaagtcactggaggaggatccatggccaagggtgaattctaaggaccatatacctgccctggttcgtagcaatgccttctcagagaattttttagaggtttcagctgagatagctcgagagaatgtccaaggtgtagtcataccctcaaaagatccagaaccacttgaagaaaattgcgctaaagccctgactttaaggatacatgattctttgaataatagccttccaattggccttgtgcctactaattcaacaaacactgtcatggaccaaaaaaatttgaagatgtcaactcctggccaaatgaaagcccaagaaattgaaagaacccctccaacaaactttaaaaggacattagaagagtccaattctggccccctgatgaagaagcatagacgaaatggcttaagtcgaagtagtggtgctcagcctgcaagtctcc

SEQ ID NO: 139606 - protein, 718 aa, Artificial Sequence
  derived and/or modified sequence
MLQQELLSRTSLETQKLDLMTEVSELKLKLVGMEKEQREQEEKQRKAEELLQELRHLKIKVEELENERNQYEWKLKATKAEVAQLQEQVALKDAEIERLHSQLSRTAALHSESHTERDQEIQRLKMGMETLLLANEDKDRRIEELTGLLNQYRKVKEIVMVTQGPSERTLSINEEEPEGGFSKWNATNKDPEELFKQEMPPRCSSPTVGPPPLPQKSLETRAQKKLSCSLEDLRSESVDKCMDGNQPFPVLEPKDSPFLAEHKYPTLPGKLSGATPNGEAAKSPPTICQPDATGSSLLRLRDTESGWDDTAVVNDLSSTSSGTESGPQSPLTPDGKRNPKGIKKFWGKIRRTQSGNFYTDTLGMAEFRRGGLRATAGPRLSRTRDSKGQKSDANAPFAQWSTERVCAWLEDFGLAQYVIFARQWVSSGHTLLTATPQDMEKELGIKHPLHRKKLVLAVKAINTKQEEKSALLDHIWVTRWLDDIGLPQYKDQFHESRVDRRMLQYLTVNDLLFLKVTSQLHHLSIKCAIHVLHVNKFNPHCLHRRPADESNLSPSEVVQWSNHRVMEWLRSVDLAEYAPNLRGSGVHGGLIILEPRFTGDTLAMLLNIPPQKTLLRRHLTTKFNALIGPEAEQEKREKMASPAYTPLTTTAKVRPRKLGFSHFGNIRKKKFDESTDYICPMEPSDGVSDSHRVYSGYRGLSPLDAPELDGLDQVGQIS

SEQ ID NO: 139607 - protein, 876 aa, Artificial Sequence
  derived and/or modified sequence
MASDASHALEAALEQMDGIIAGTKTGADLSDGTCEPGLASPASYMNPFPVLHLIEDLRLALEMLELPQERAALLSQIPGPTAAYIKEWFEESLSQVNHHSAASNETYQERLARLEGDKESLILQVSVLTDQVEAQGEKIRDLEVCLEGHQVKLNAAEEMLQQELLSRTSLETQKLDLMTEVSELKLKLVGMEKEQREQEEKQRKAEELLQELRHLKIKVEELENERNQYEWKLKATKAEVAQLQEQVALKDAEIERLHSQLSRTAALHSESHTERDQEIQRLKMGMETLLLANEDKDRRIEELTGLLNQYRKVKEIVMVTQGPSERTLSINEEEPEGGFSKWNATNKDPEELFKQEMPPRCSSPTVGPPPLPQKSLETRAQKKLSCSLEDLRSESVDKCMDGNQPFPVLEPKDSPFLAEHKYPTLPGKLSGATPNGEAAKSPPTICQPDATGSSLLRLRDTESGWDDTAVVNDLSSTSSGTESGPQSPLTPDGKRNPKGIKKFWGKIRRTQSGNFYTDTLGMAEFRRGGLRATAGPRLSRTRDSKGQKSDANAPFAQWSTERVCAWLEDFGLAQYVIFARQWVSSGHTLLTATPQDMEKELGIKHPLHRKKLVLAVKAINTKQEEKSALLDHIWVTRWLDDIGLPQYKDQFHESRVDRRMLQYLTVNDLLFLKVTSQLHHLSIKCAIHVLHVNKFNPHCLHRRPADESNLSPSEVVQWSNHRVMEWLRSVDLAEYAPNLRGSGVHGGLIILEPRFTGDTLAMLLNIPPQKTLLRRHLTTKFNALIGPEAEQEKREKMASPAYTPLTTTAKVRPRKLGFSHFGNIRKKKFDESTDYICPMEPSDGVSDSHRVYSGYRGLSPLDAPELDGLDQVGQIS

SEQ ID NO: 139608 - protein, 217 aa, Artificial Sequence
  derived and/or modified sequence
MLQYLTVNDLLFLKVTSQLHHLSIKCAIHVLHVNKFNPHCLHRRPADESNLSPSEVVQWSNHRVMEWLRSVDLAEYAPNLRGSGVHGGLIILEPRFTGDTLAMLLNIPPQKTLLRRHLTTKFNALIGPEAEQEKREKMASPAYTPLTTTAKVRPRKLGFSHFGNIRKKKFDESTDYICPMEPSDGVSDSHRVYSGYRGLSPLDAPELDGLDQVGQIS

SEQ ID NO: 139609 - protein, 400 aa, Artificial Sequence
  derived and/or modified sequence
MLQQELLSRTSLETQKLDLMTEVSELKLKLVGMEKEQREQEEKQRKAEELLQELRHLKIKVEELENERNQYEWKLKATKAEVAQLQEQVALKDAEIERLHSQLSRTAALHSESHTERDQEIQRLKMGMETLLLANEDKDRRIEELTGLLNQYRKVKEIVMVTQGPSERTLSINEEEPEGGFSKWNATNKDPEELFKQEMPPRCSSPTVGPPPLPQKSLETRAQKKLSCSLEDLRSESVDKCMDGNQPFPVLEPKDSPFLAEHKYPTLPGKLSGATPNGEAAKSPPTICQPDATGSSLLRLRDTESGWDDTAVVNDLSSTSSGTESGPQSPLTPDGKRNPKGIKKFWGKIRRTQSGNFYTDTLGMAEFRRGGLRATAGPRLSRTRDSKGQGLQWLPGPQPP

SEQ ID NO: 139610 - DNA, 2631 bp, Artificial Sequence
  derived and/or modified sequence
atggccagcgacgccagccacgccctggaggccgccctggagcagatggacggcatcatcgccggcaccaagaccggcgccgacctgagcgacggcacctgcgagcccggcctggccagccccgccagctacatgaaccccttccccgtgctgcacctgatcgaggacctgagactggccctggagatgctggagctgccccaggagagagccgccctgctgagccagatccccggccccaccgccgcctacatcaaggagtggttcgaggagagcctgagccaggtgaaccaccacagcgccgccagcaacgagacctaccaggagagactggccagactggagggcgacaaggagagcctgatcctgcaggtgagcgtgctgaccgaccaggtggaggcccagggcgagaagatcagagacctggaggtgtgcctggagggccaccaggtgaagctgaacgccgccgaggagatgctgcagcaggagctgctgagcagaaccagcctggagacccagaagctggacctgatgaccgaggtgagcgagctgaagctgaagctggtgggcatggagaaggagcagagagagcaggaggagaagcagagaaaggccgaggagctgctgcaggagctgagacacctgaagatcaaggtggaggagctggagaacgagagaaaccagtacgagtggaagctgaaggccaccaaggccgaggtggcccagctgcaggagcaggtggccctgaaggacgccgagatcgagagactgcacagccagctgagcagaaccgccgccctgcacagcgagagccacaccgagagagaccaggagatccagagactgaagatgggcatggagaccctgctgctggccaacgaggacaaggacagaagaatcgaggagctgaccggcctgctgaaccagtacagaaaggtgaaggagatcgtgatggtgacccagggccccagcgagagaaccctgagcatcaacgaggaggagcccgagggcggcttcagcaagtggaacgccaccaacaaggaccccgaggagctgttcaagcaggagatgccccccagatgcagcagccccaccgtgggccccccccccctgccccagaagagcctggagaccagagcccagaagaagctgagctgcagcctggaggacctgagaagcgagagcgtggacaagtgcatggacggcaaccagcccttccccgtgctggagcccaaggacagccccttcctggccgagcacaagtaccccaccctgcccggcaagctgagcggcgccacccccaacggcgaggccgccaagagcccccccaccatctgccagcccgacgccaccggcagcagcctgctgagactgagagacaccgagagcggctgggacgacaccgccgtggtgaacgacctgagcagcaccagcagcggcaccgagagcggcccccagagccccctgacccccgacggcaagagaaaccccaagggcatcaagaagttctggggcaagatcagaagaacccagagcggcaacttctacaccgacaccctgggcatggccgagttcagaagaggcggcctgagagccaccgccggccccagactgagcagaaccagagacagcaagggccagaagagcgacgccaacgcccccttcgcccagtggagcaccgagagagtgtgcgcctggctggaggacttcggcctggcccagtacgtgatcttcgccagacagtgggtgagcagcggccacaccctgctgaccgccaccccccaggacatggagaaggagctgggcatcaagcaccccctgcacagaaagaagctggtgctggccgtgaaggccatcaacaccaagcaggaggagaagagcgccctgctggaccacatctgggtgaccagatggctggacgacatcggcctgccccagtacaaggaccagttccacgagagcagagtggacagaagaatgctgcagtacctgaccgtgaacgacctgctgttcctgaaggtgaccagccagctgcaccacctgagcatcaagtgcgccatccacgtgctgcacgtgaacaagttcaacccccactgcctgcacagaagacccgccgacgagagcaacctgagccccagcgaggtggtgcagtggagcaaccacagagtgatggagtggctgagaagcgtggacctggccgagtacgcccccaacctgagaggcagcggcgtgcacggcggcctgatcatcctggagcccagattcaccggcgacaccctggccatgctgctgaacatccccccccagaagaccctgctgagaagacacctgaccaccaagttcaacgccctgatcggccccgaggccgagcaggagaagagagagaagatggccagccccgcctacacccccctgaccaccaccgccaaggtgagacccagaaagctgggcttcagccacttcggcaacatcagaaagaagaagttcgacgagagcaccgactacatctgccccatggagcccagcgacggcgtgagcgacagccacagagtgtacagcggctacagaggcctgagccccctggacgcccccgagctggacggcctggaccaggtgggccagatcagctag

SEQ ID NO: 139611 - DNA, 213 bp, Artificial Sequence
  derived and/or modified sequence
atggccagcgacgccagccacgccctggaggccgccctggagcagatggacggcatcatcgccggcaccaagaccggcgccgacctgagcgacggcacctgcgagcccggcctggccagccccgccagctacatgaaccccttccccgtgctgcacctgatcgaggacctgagactggccctggagatgctggagctgccccaggagagatag

SEQ ID NO: 139612 - DNA, 270 bp, Artificial Sequence
  derived and/or modified sequence
atggccagcgacgccagccacgccctggaggccgccctggagcagatggacggcatcatcgccggcaccaagaccggcgccgacctgagcgacggcacctgcgagcccggcctggccagccccgccagctacatgaaccccttccccgtgctgcacctgatcgaggacctgagactggccctggagatgctggagctgccccaggagagagccgccctgctgagccagatccccggccccaccgccgcctacatcaaggagtggttctag

SEQ ID NO: 139613 - DNA, 513 bp, Artificial Sequence
  derived and/or modified sequence
atggccagcgacgccagccacgccctggaggccgccctggagcagatggacggcatcatcgccggcaccaagaccggcgccgacctgagcgacggcacctgcgagcccggcctggccagccccgccagctacatgaaccccttccccgtgctgcacctgatcgaggacctgagactggccctggagatgctggagctgccccaggagagagccgccctgctgagccagatccccggccccaccgccgcctacatcaaggagtggttcgaggagagcctgagccaggtgaaccaccacagcgccgccagcaacgagacctaccaggagagactggccagactggagggcgacaaggagagcctgatcctgcaggtgagcgtgctgaccgaccaggtggaggcccagggcgagaagatcagagacctggaggtgtgcctggagggccaccaggtgaagctgaacgccgccgaggagatgctgcagcaggagctgctgagcagaaccagcctgtag

SEQ ID NO: 139614 - DNA, 2631 bp, Artificial Sequence
  derived and/or modified sequence
atggcgtccgacgcgtcccatgcgctggaggcagcactggagcagatggacggtattatcgctggaactaagaccggcgcggacctcagcgacggcacatgcgaacctggactggcttctcccgcaagctacatgaatccttttcccgtgttgcatttgattgaagatttgagattggccctggagatgctagagctgccccaggagcgcgctgccttactgagccagattcctggcccaaccgccgcatatattaaggagtggtttgaggagagtttgtcccaggtgaatcaccattcagccgcctcgaatgagacctatcaggaaagactcgccaggctggaaggggataaggagagccttattttgcaggtatccgtgctgacagatcaggtcgaggcccagggagaaaaaattagggacctggaggtgtgcctagaaggccaccaagtgaagctgaatgccgctgaggagatgctccagcaagaactgctgtctaggactagtctggaaacgcagaagctggacctcatgacagaggtgagtgaactcaaattgaagctggttggaatggagaaggagcagcgcgaacaggaggaaaaacagagaaaagccgaagagttgctacaggaacttcggcacttgaagatcaaagtagaggagctggaaaatgagagaaatcagtatgaatggaagctcaaggctactaaagcagaagtggcccagctgcaggaacaagtggctttgaaggatgcagagatagaaaggctgcatagtcagctctcaagaacggccgctctgcactccgagtcacatacagagagagaccaggaaatccagagattgaaaatgggcatggaaacactcctgttagcaaatgaagacaaagaccgacgaatcgaagaacttaccggactcctgaatcagtataggaaagtgaaggaaatcgtcatggttacgcaaggtccgtccgaacggaccctaagtattaatgaggaagagccggaaggtgggttttccaagtggaacgcaaccaacaaagatccagaggaactttttaaacaagagatgcctcctcgatgtagctcccccaccgttggccctccacctctcccccagaagtccctggagactcgcgctcaaaagaagctttcctgttcccttgaggatcttcgctccgaatcagtcgacaaatgtatggacgggaaccagccatttcccgtgctggagccaaaagattcaccattcctggccgagcacaaatacccgacgctaccaggcaagctgtccggcgcgaccccgaacggagaagccgcgaagtcgccccccacgatctgtcagcccgacgccactggcagcagtctcttgcggttacgagacaccgagagcggatgggatgacacagctgtagtcaacgatttgagctctacgagctctggcaccgaatctggtcctcaaagccccctgactcctgacggtaaaagaaaccctaaaggaatcaaaaaattttggggaaagattcggcgtactcagagtggcaatttctacaccgacacgctgggaatggcggaattccggcgtggtggtctccgcgcaacagctgggccacgcttgagcagaacaagagattccaaagggcagaaaagcgacgccaacgctccattcgctcagtggagcactgagcgggtctgcgcttggctcgaagacttcggattggcccagtacgtcatctttgcccgacaatgggtgtctagcggccacaccctgctgacagcaacgccacaggatatggaaaaagaactgggcatcaagcaccctctccacaggaaaaaactggtcttggctgtgaaggccatcaatacaaaacaggaggagaagagtgcactactcgaccatatttgggtgactaggtggctggacgacattggcctgccccagtacaaggaccagtttcacgaatcaagagtggacagacgaatgctccagtacctgactgtgaacgatctcttgtttctgaaagtcacaagccaactgcatcatttgagcataaagtgcgccattcatgtgctgcatgtgaataaatttaatcctcattgcttgcatcgccgcccggccgacgagagtaacctttcacccagcgaagtggtccagtggtctaatcacagggtcatggagtggctgagatccgttgatctagctgagtatgctcccaacctcagaggcagtggcgtgcatggtggcctgatcatactggagcctcgttttacaggggataccctggctatgctgctgaatattcctccgcagaagacattacttagaagacatctgacgaccaagttcaatgcccttataggccctgaggcggagcaagaaaagagagaaaagatggcctcgcccgcctacacacctctaaccactacagccaaggtccgcccgcgcaaattaggtttctcacacttcggcaacattaggaaaaaaaagtttgacgaatcgaccgactacatttgtcccatggagccttcagatggcgtgtccgactcacatcgtgtctattcaggatatcgagggctctctcctctggacgcccccgagttagatggtctcgatcaggttggtcaaatatcgtag

SEQ ID NO: 139615 - DNA, 213 bp, Artificial Sequence
  derived and/or modified sequence
atggccagcgacgcaagtcacgcattggaggcagctttagagcagatggacggcatcattgccgggacaaagacaggggcagacctgtccgacggaacttgtgaacctggtttagcgtcacctgcttcctacatgaacccctttccggttttgcatctgatcgaagacctccgtctggcactggagatgctggagttgccacaggagcgctag

SEQ ID NO: 139616 - DNA, 270 bp, Artificial Sequence
  derived and/or modified sequence
atggcgtccgatgcctcccacgctctcgaagccgcccttgaacagatggatggcataatcgccggaactaaaacaggggcagatctctccgatggcacctgtgagcccggacttgcatccccggccagctacatgaacccctttcctgtgctgcacctcatcgaggatctgcgcttggctctggaaatgcttgaacttccacaggagagagccgcattgctctcacaaattccgggcccaaccgcggcctacataaaggaatggttctag

SEQ ID NO: 139617 - DNA, 513 bp, Artificial Sequence
  derived and/or modified sequence
atggcttctgatgcttcacacgccttagaagccgcactggagcagatggacgggattattgccggcaccaagacaggcgcagacctgtccgacgggacctgtgagcctggccttgcgtccccggcatcgtacatgaaccctttccctgtgctgcacctgattgaagacctccgactcgccctggagatgctagaactgcctcaggagagggccgcacttctttcccaaatacccggacctaccgctgcttacatcaaagagtggttcgaggaatctctgtcgcaggtgaatcatcattcggctgcaagtaatgaaacctaccaggaaaggcttgctaggttagaaggagataaggaatccttgattttgcaggttagtgtgctgacagaccaggtcgaggcacagggtgaaaagatcagagacctggaagtgtgtctggaaggtcaccaggtgaaactgaacgctgcagaagaaatgctgcagcaggagctccttagtcgcacgtccctctag

SEQ ID NO: 139618 - DNA, 270 bp, Artificial Sequence
  derived and/or modified sequence
atggcatcggatgcctcacacgccctcgaggctgccctcgagcagatggatggtatcattgccggaactaaaactggtgctgacctgtcagatggaacttgtgaaccaggccttgcttccccagccagttacatgaatccctttcccgtactgcacctgattgaggaccttaggctcgcattggaaatgctggagctgcctcaggaacgcgcagccctgttatctcagatacccggtccaacagccgcctacattaaagaatggttttag

SEQ ID NO: 139619 - DNA, 2631 bp, Artificial Sequence
  derived and/or modified sequence
atggccagtgatgccagccacgccctggaggccgccctggagcagatggatggcatcatcgccggcaccaagacaggagctgacctgagtgatggcacctgtgagcccggcctggccagccctgccagctacatgaaccccttccctgtgctgcacctgattgaggacctgcggctggccctggagatgctggagctgccccaggagagagctgccctgctgagccagatccctggccccacagctgcctacatcaaggagtggtttgaggagagcctgagccaggtgaaccaccacagcgctgccagcaatgagacctaccaggagcggctggcccggctggagggggacaaggagagcctcatcctgcaggtgtctgtgctgacagaccaggtggaggcccagggcgagaagatccgggacctggaggtgtgcctggagggccaccaggtgaagctgaatgctgctgaggagatgctgcagcaggagctgctgagcaggaccagcctggagacccagaagctggacctgatgacagaggtgtctgagctgaagctgaagctggtgggcatggagaaggagcagcgggagcaggaggagaagcagaggaaggccgaggagctgctgcaggagctgcggcacctgaagatcaaggtggaggagctggagaatgaaagaaaccagtatgagtggaagctgaaggccaccaaggccgaggtggcccagctgcaggagcaggtggccctgaaggatgctgagattgaaaggctgcacagccagctgagcaggacagctgccctgcacagcgagagccacacagagcgggaccaggagatccagaggctgaagatgggcatggagaccctgctgctggccaatgaagacaaggaccggcgcatcgaggagctgaccggcctgctgaaccagtacaggaaggtgaaggagatcgtgatggtgacccagggccccagcgagaggaccctgagcatcaatgaggaggagcctgagggcggcttcagcaagtggaatgccaccaacaaggaccctgaggagctgttcaagcaggagatgccaccccgctgcagcagccccaccgtgggccccccacccctgccccagaagagcctggagacccgggcccagaagaagctgagctgcagcctggaggacctgcggtctgagagcgtggacaagtgcatggatggcaaccagcccttccctgtgctggagcccaaggacagccccttcctggccgagcacaagtaccccaccctgcccgggaagctgagcggggccaccccaaatggagaggccgccaagagcccccccaccatctgccagccagatgccaccggcagcagcctgctgcggctgcgggacacagaaagtggctgggatgacacagctgtggtgaatgacctgagcagcaccagcagcggcacagaaagtggcccccagagccccctgaccccagatggcaagaggaaccccaagggcatcaagaagttctggggcaagatccggaggacccagagcggcaacttctacacagacaccctgggcatggccgagttccggcggggcggcctgcgggccacagctggcccccggctgagcaggacccgggacagcaagggccagaagagtgatgccaatgccccctttgcccagtggagcacagagcgggtgtgtgcctggctggaggactttggcctggcccagtatgtgatctttgcccggcagtgggtgagcagcggccacaccctgctgacagccaccccccaggacatggagaaggagctgggcatcaagcaccccctgcacaggaagaagctggtgctggccgtgaaggccatcaacaccaagcaggaggagaagagcgccctgctggaccacatctgggtgacccgctggctggatgacatcggcctgccccagtacaaggaccagttccacgagagccgggtggacaggaggatgctgcagtacctgactgtgaatgacctgctcttcctgaaggtgaccagccagctgcaccacctgagcatcaagtgtgccatccacgtgctgcacgtgaacaagttcaacccccactgcctgcaccggcggccagcagatgagagcaacctgagccccagcgaggtggtgcagtggagcaaccaccgggtgatggagtggctgcggtctgtggacctggccgagtatgcccccaacctgcggggcagcggcgtgcatggaggcctcatcatcctggagccccgcttcaccggggacaccctggccatgctgctgaacatccccccccagaagaccctgctgcggcggcacctgaccaccaagttcaatgccctgattggccctgaggccgagcaggagaagcgggagaagatggccagccctgcctacacccccctgaccaccacagccaaggtgcggcccaggaagctgggcttcagccactttggaaacatcaggaagaagaagtttgatgagagcacagactacatctgccccatggagcccagtgatggagtgtctgacagccaccgggtgtacagcggctaccggggcctgagccccctggatgcccctgagctggatggcctggaccaggtgggccagatctcctag

SEQ ID NO: 139620 - DNA, 213 bp, Artificial Sequence
  derived and/or modified sequence
atggccagtgatgccagccacgccctggaggccgccctggagcagatggatggcatcatcgccggcaccaagacaggagctgacctgagtgatggcacctgtgagcccggcctggccagccctgccagctacatgaaccccttccctgtgctgcacctgattgaggacctgcggctggccctggagatgctggagctgccccaggagaggtag

SEQ ID NO: 139621 - DNA, 270 bp, Artificial Sequence
  derived and/or modified sequence
atggccagtgatgccagccacgccctggaggccgccctggagcagatggatggcatcatcgccggcaccaagacaggagctgacctgagtgatggcacctgtgagcccggcctggccagccctgccagctacatgaaccccttccctgtgctgcacctgattgaggacctgcggctggccctggagatgctggagctgccccaggagagagctgccctgctgagccagatccctggccccacagctgcctacatcaaggagtggttctag

SEQ ID NO: 139622 - DNA, 513 bp, Artificial Sequence
  derived and/or modified sequence
atggccagtgatgccagccacgccctggaggccgccctggagcagatggatggcatcatcgccggcaccaagacaggagctgacctgagtgatggcacctgtgagcccggcctggccagccctgccagctacatgaaccccttccctgtgctgcacctgattgaggacctgcggctggccctggagatgctggagctgccccaggagagagctgccctgctgagccagatccctggccccacagctgcctacatcaaggagtggtttgaggagagcctgagccaggtgaaccaccacagcgctgccagcaatgagacctaccaggagcggctggcccggctggagggggacaaggagagcctcatcctgcaggtgtctgtgctgacagaccaggtggaggcccagggcgagaagatccgggacctggaggtgtgcctggagggccaccaggtgaagctgaatgctgctgaggagatgctgcagcaggagctgctgagcaggaccagcctgtag

SEQ ID NO: 139623 - DNA, 2631 bp, Artificial Sequence
  derived and/or modified sequence
atggccagcgacgccagccacgccctggaggccgccctggagcagatggatgggatcattgctgggactaagactggtgccgacctttccgacggcacctgcgagcccggattggccagcccagcatcttatatgaatccattccccgtgctgcatcttatagaggacctccggctggccctcgagatgttggaacttcctcaggaacgggccgccctactgagccagattcctggccccaccgcggcttacattaaggaatggttcgaagagtctctgtcccaagtcaaccaccattccgctgcctctaatgagacctaccaggagcgattggctcgcctcgaaggcgacaaggaatcattgatcttgcaagtgtctgtgttgactgaccaagtagaagcgcaaggagagaagattcgggatctggaggtttgtctcgagggtcatcaggttaagctgaacgctgctgaagaaatgttgcagcaggaactcctgtcacggacatccctggaaacccagaagctagatctgatgacagaggtgtcggagctgaagttaaagcttgtaggcatggaaaaggaacagcgcgagcaagaagagaaacagcggaaggcggaagaactgttgcaggagttacgccatctaaaaattaaggtcgaagaactggagaatgagagaaaccaatatgagtggaagttgaaggcaaccaaggcagaagtggctcagcttcaggagcaggtagcgctaaaggatgcggaaattgagcggctccattcccagctctctcgcacagccgccttacacagtgagtcccacacagaacgagaccaggaaattcaacggctgaaaatgggcatggaaactctccttctggctaatgaggataaggatcggcgcatcgaggagctgacaggacttctcaaccagtaccggaaagtcaaggagatcgtcatggttactcaggggccctcagagcggaccctgtcgattaatgaggaggagccagagggaggattctcgaaatggaatgcaacaaacaaggatccggaggaattattcaaacaggagatgccccccagatgttcttcaccaaccgtcggcccgccacccttaccccagaagagtctcgagacaagggctcaaaagaagctctcttgctctctggaggacctcaggtccgaatctgtggacaagtgtatggacgggaatcaaccctttcctgtcttggagcctaaagactccccattcttggccgaacacaaatacccaacactgccaggcaagttgtctggtgccactccaaacggagaagcagcaaaaagtccgcctaccatctgtcaacctgatgccacaggcagttcgctgcttagactccgggacacagagagcggctgggacgacacagccgttgttaatgacctaagcagtacgtccagcggtactgagtctggaccccagtctccgctgacacctgatggaaaaaggaatccaaagggcatcaagaaattctggggcaagattagacgaactcaatcaggtaatttttacacagacacactcggcatggctgagtttcgtcggggtgggctgcgggccacggcaggcccaagactgtctcgcacgagagattcaaaggggcagaaatctgatgccaatgctccctttgctcaatggtcaacagagcgcgtgtgtgcatggcttgaggacttcggcctcgcccagtatgtgattttcgccagacagtgggtgtcttcagggcatactctcctcacagctacaccccaggatatggaaaaagaactcggaatcaagcatccactgcatagaaaaaagcttgtactcgctgtgaaggccataaacactaaacaggaggagaaatccgccctgctggaccacatctgggttacgagatggctcgatgacatagggcttccacagtataaagaccagtttcacgagtctcgtgtggaccggcggatgttgcagtatctgacagtcaacgatctgcttttcctgaaagtgaccagtcagctgcaccatttaagtattaagtgtgccatacatgttttacacgtgaacaaatttaatccccactgcctgcatcgcaggccggccgacgagtcaaatctgtcccccagtgaagtagtgcagtggtctaaccatcgggtgatggagtggctgaggtccgtagatttggctgagtacgctccaaacctgcgcggttctggtgtgcacggtgggctcatcatcttagaaccaagatttacgggggacaccctggcaatgttgcttaatattccgccacagaagactttactgaggcgtcacttaaccacgaagttcaacgctcttattggacccgaggcggagcaggaaaaaagagagaagatggccagtcctgcttacacaccactcacaacaactgctaaagtccgcccaaggaagttgggattcagtcactttggaaacatccgaaaaaagaagttcgatgagagtactgactacatctgcccaatggagccatccgacggggtgtcagattcgcacagggtatactccgggtacaggggtctttcccccctggatgcgcccgaactcgacgggctggatcaagtgggtcagatttcttag

SEQ ID NO: 139624 - DNA, 213 bp, Artificial Sequence
  derived and/or modified sequence
atggccagcgacgccagccacgccctggaggccgccctggagcagatggacggaatcatagccggcaccaagacaggtgctgatcttagtgatggcacctgcgaacccgggcttgccagtcccgcaagttacatgaatccctttcccgtgctacatctgatcgaagatctgaggctggcgttggagatgctggagctgccccaggagaggtag

SEQ ID NO: 139625 - DNA, 270 bp, Artificial Sequence
  derived and/or modified sequence
atggccagcgacgccagccacgccctggaggccgccctggagcagatggatggcataatcgccggcacaaaaacgggtgcagatctgagcgacggaacctgcgagcccgggctcgcatcccccgcttcatacatgaatccctttcctgtcctgcacctgatagaggacctgcgtttggcgctggagatgttggagctgccccaagagagagccgccttgctcagtcagatacctggcccaaccgcagcttacataaaggaatggttttag

SEQ ID NO: 139626 - DNA, 513 bp, Artificial Sequence
  derived and/or modified sequence
atggccagcgacgccagccacgccctggaggccgccctggagcagatggatggcatcattgccgggacaaagaccggcgcagatctgtctgacggtacctgtgaaccaggcctggccagcccagctagttatatgaatcctttcccagtcctgcacctaatagaagatttgagattagccctggagatgttggagctcccacaagaacgtgcagccctgctgagtcagatcccagggccgaccgcagcctacatcaaggagtggttcgaagaaagtctgtcccaggtgaatcatcactccgcggcctccaatgaaacatatcaggagcggctcgctcgccttgaaggcgataaggagtcattgatcctccaggtttccgtccttacagatcaggtggaggcacaaggagaaaaaatcagggaccttgaagtctgtttggaagggcaccaggtgaaattgaacgccgcagaagagatgctgcaacaggaactgctgagcaggacttcattgtag

SEQ ID NO: 139627 - DNA, 270 bp, Artificial Sequence
  derived and/or modified sequence
atggccagcgacgccagccacgccctggaggccgccctggagcagatggacggaatcatcgctggcactaagacaggcgccgatctctctgacggtacctgcgaacctggcctggcttctcctgctagttacatgaacccgttccccgtgttacacctcattgaagatttgcggttggcgcttgagatgctcgaattaccccaagagagggcagcacttttgagtcagatcccaggtcctaccgctgcttatataaaagagtggttctag

SEQ ID NO: 139628 - DNA, 2631 bp, Artificial Sequence
  derived and/or modified sequence
atggcctccgacgcctcgcatgccctggaggcggcacttgagcagatggatggcattatcgctggaactaaaaccggtgcggacctgtctgatggtacttgtgaacccggactcgcttcacctgcaagctatatgaaccctttccctgtgctgcacctgattgaggacctgcgtttggcgctcgaaatgctggaactgccacaggagcgcgcagcccttctgagccagattcctggaccaacagccgcttacataaaagagtggttcgaggaaagtctctctcaggtcaaccaccactccgccgcatctaatgagacttaccaggagcgactggcacgcttagagggtgataaggagtccctcatccttcaagtatccgtcctgactgaccaggttgaggcccagggcgagaaaatcagagacctcgaggtctgtctggagggccaccaggtgaagctgaatgctgcggaggagatgctgcagcaagagctgctaagtcggactagccttgagacacagaaactagacctgatgacggaagtcagtgaactgaaactgaagctcgtgggcatggagaaggagcagagagagcaagaagaaaaacagcgcaaagccgaggaactgcttcaggagctgagacacctcaagatcaaagtggaggagctcgaaaacgaaagaaatcaatacgagtggaaactgaaggcaaccaaagcagaagtagcacagctgcaggagcaggtggcccttaaagacgcagagattgaacggctgcattcacagctctctcgaactgccgctttgcattccgaaagccacaccgaaagggatcaggagatccagagactcaagatgggaatggagaccttgcttctggccaatgaagataaagacagacggattgaggaactcactggactgctgaatcagtaccgaaaagtcaaggagatagttatggtcacccagggaccctctgaacggacactttccattaatgaggaagaacccgagggaggattctcgaagtggaatgcaactaataaggacccggaagagctgtttaaacaggaaatgcctccccgttgctcatctccaaccgtaggtccacccccactacctcagaagagtttggagacacgggctcagaaaaagttgtcatgcagccttgaggaccttaggagcgaatcggtagacaaatgcatggacggtaatcagccatttcctgtgctggagcctaaggatagccccttccttgccgagcataaataccctaccctgcctggcaagcttagcggcgcaactcccaatggcgaagcggcaaaatctcccccaaccatttgccaacccgatgctaccgggagttcattactgaggctgcgagatacagaatctgggtgggatgacaccgccgtggtgaatgacctgtcttctacttcatcaggcaccgagtctggaccccagtcacctttgacgcctgacgggaagcggaacccaaaggggatcaaaaaattttggggcaaaatccgacgaacccagtctggaaatttctatactgacactctcggcatggctgaattccggagaggaggactgagggcaactgccggacctcgactgtctaggacaagagacagtaagggacaaaaaagcgatgcgaatgccccatttgcgcagtggagtacagagcgggtgtgcgcatggcttgaggacttcggactggcccagtatgttatcttcgctcgccaatgggtgagctcaggacataccctcctgacggcgacgccccaggacatggagaaggaactcgggatcaaacacccactgcataggaagaaactggtccttgcggttaaggcaatcaacaccaagcaagaggagaagtcagctctcctggaccatatctgggtgactagatggctggacgacattggcctcccccagtacaaggaccagttccatgagtctcgggtggacaggagaatgctccaatacctcacagtgaatgacctgttgtttctgaaggtcacatcccagctccatcatctgtcgatcaaatgtgccattcatgtcctgcacgtgaacaaatttaacccacactgtctgcacagaaggcctgcggacgagtcaaatctttcaccaagcgaagttgtacaatggtccaaccaccgagtgatggaatggttaaggtcagtcgacctggcagaatacgccccaaatctccggggtagcggcgttcacgggggtttaatcattctcgagccaagatttaccggtgacaccctggccatgttgttgaacatcccaccccagaaaacacttctgcggaggcacttgacaactaaattcaacgcgctgataggtcctgaggccgaacaggaaaagcgggaaaagatggccagtcctgcctatacccctctgaccaccacagcaaaggtgcggcctagaaaactggggtttagtcattttggcaacatacgtaagaagaaattcgacgaatctaccgattacatatgcccaatggaaccgagcgatggggtctctgactctcacagagtgtatagcggctatagagggctgagcccactggacgctcctgagcttgatgggctggatcaggtgggacagatttcctag

SEQ ID NO: 139629 - DNA, 213 bp, Artificial Sequence
  derived and/or modified sequence
atggccagcgatgcgagccatgccttggaagcagcattggaacaaatggacgggatcattgccggaactaaaacaggagcagacctctcagacggtacatgcgagccaggtctggcatcacctgcatcctacatgaatcccttccctgtgctgcacctgatcgaggatctgcgactggctctggagatgctggagctgccccaggagcgctag

SEQ ID NO: 139630 - DNA, 270 bp, Artificial Sequence
  derived and/or modified sequence
atggcttcagacgcaagccatgcgcttgaagctgcactggaacagatggacggaattatcgccggtacgaagacaggcgctgacctgagcgatggcacatgcgaacctgggctggcctcccccgcttcatacatgaatccgtttcccgtcttgcacctaattgaggatctcagattagccttagagatgctcgagttgccgcaggaacgggcagccctgttaagccagatacctggaccaactgccgcttatatcaaagagtggttctag

SEQ ID NO: 139631 - DNA, 513 bp, Artificial Sequence
  derived and/or modified sequence
atggccagcgacgccagtcatgcactggaggctgcgttggagcagatggacggcatcatcgccggaacgaaaaccggagctgacttatctgatggcacttgtgaacctggcctggcgtccccggctagttatatgaacccgttccccgtgttgcatctcatagaagaccttcggctcgccctcgagatgcttgaactcccccaggaaagagctgccctgcttagtcagattcctggtccaacggcagcctatatcaaagaatggtttgaggagtccctttcccaggtcaatcatcactccgccgcatccaatgaaacttatcaggagcggctggcgaggttggagggagataaagagagcctgattctccaggtctccgtgctgaccgaccaggtggaggctcagggtgaaaagattcgtgaccttgaagtgtgtttggagggacaccaggttaaacttaatgctgccgaagagatgctgcagcaagaacttctgtctagaacatccctgtag

SEQ ID NO: 139632 - DNA, 270 bp, Artificial Sequence
  derived and/or modified sequence
atggcgtccgatgcgtcccatgcgctggaggccgcattagagcagatggacggaattatcgcaggcaccaagaccggcgcagacctgtccgatggaacatgcgagccagggttggctagccctgcttcttatatgaatcccttccctgtcctacatcttattgaggacctgcgcctggccctggagatgctcgagctcccccaagagcgggcagccttactttcccaaataccaggaccaacggctgcgtatatcaaagagtggttttag

SEQ ID NO: 139633 - DNA, 3003 bp, Artificial Sequence
  derived and/or modified sequence
gatgggaataggaggaggtggggggtggcatctagggagtgctggaggggccacctggagagcctgcatgtgacctgccctgaaaggaggaaaacagctgcagctccagtcccaggtaaaccaccacagtgctgctagtaatgaaacctaccaggaacgcttggcacgtctagaaggggataaggagtccctcatattgcaggtgagtgtcctcacagaccaagtagaagcccagggagaaaagattcgagacctggaagtgtgtctggaaggacaccaggtgaaactcaatgctgctgaagagatgcttcaacaggagctgctaagccgcacatctcttgagacccagaagctcgatctgatgactgaagtgtctgagctgaagctcaagctggttggcatggagaaggagcagagagagcaggaggagaagcagagaaaagcagaggagttactgcaagagctcaggcacctcaaaatcaaagtggaagagttggaaaatgaaaggaatcagtatgaatggaagctaaaggccactaaggctgaagtcgcccagctgcaagaacaggtggccctgaaagatgcagaaattgagcgtctgcacagccagctctcccggacagcagctctccacagtgagagtcacacagagagagaccaagaaattcaacgtctgaaaatggggatggaaactttgctgcttgccaatgaagataaggaccgtcggatagaggagcttacggggctgttaaaccagtaccggaaggtaaaggagattgtgatggtcactcaagggccttcggagagaactctctcaatcaatgaagaagaaccggagggaggtttcagcaagtggaacgctacaaataaggaccctgaagaattatttaaacaagagatgcctccaagatgtagctctcctacagtggggccacctccattgccacagaaatcactggaaaccagggctcagaaaaagctctcttgtagtctagaagacttgagaagtgaatctgtggataagtgtatggatgggaaccagcccttcccggtgttagaacccaaggacagccctttcttggcggagcacaaatatcccactttacctgggaagctttcaggagccacgcccaatggagaggctgccaaatctcctcccaccatctgccagcctgacgccacggggagcagcctgctgaggctgagagacacagaaagtggctgggacgacactgctgtggtcaatgacctctcatccacatcatcgggcactgaatcaggtcctcagtctcctctgacaccagatggtaaacggaatcccaaaggcattaagaagttctggggaaaaatccgaagaactcagtcaggaaatttctacactgacacgctggggatggcagagtttcgacgaggtgggctccgggcaaccgcagggccaagactctctaggaccagggactccaagggacagaaaagtgacgccaatgccccctttgcccagtggagcacagagcgtgtgtgtgcatggctggaggactttggcctggctcagtatgtgatctttgccaggcagtgggtatcttctggccacaccttattgacagccacccctcaggacatggaaaaggagctaggaattaagcacccactccacaggaagaagcttgttttagcagtgaaagccatcaacaccaaacaggaggagaagtctgcactgctagaccacatttgggtgacaaggtggcttgatgatattggcttaccccagtacaaagaccagtttcatgaatctagagttgacagacgaatgctgcaatacctaactgtgaacgatttactcttcttaaaagtcaccagccaactacatcatctcagcatcaaatgtgccattcacgtgctgcatgtcaacaagttcaacccccactgcctgcaccggcggccagctgatgagagtaacctttctccttcagaagttgtacagtggtccaaccacagggtgatggagtggttacgatctgtggacctggcagagtatgcacccaatcttcgagggagtggagtccatggaggcctcattatcctggagccacgcttcactggggacaccctggctatgcttctcaacatccccccacaaaagacgctcctcaggcgccacctgaccaccaagttcaatgccttgattggtccggaggctgaacaggagaagcgagagaaaatggcctcaccagcttacacaccactgaccaccacagccaaagtccggccaaggaaactaggattttcacacttcggaaacataagaaaaaagaagttcgatgaatcgacggactacatttgcccaatggagcccagtgacggtgtcagtgatagtcacagggtctacagtggctaccggggcctcagcccccttgatgcccctgaactggatgggctggaccaggtgggacagattagctgatgcccttgtcacctgccctctgtgcaccctgagagctcacagtaacactgtgtgtgtcaccatataactgcacctcacccccgcacgtgtgcatgactcgcagagaatattccagcaattgtgtacccctgggccagtctctttgaaccctgagggtggccaggatctggagctgcatctctaaggggccaggctttggggaccattgccaaaggtggactcaggaggaaagacacttaaagacacttttacatgtctagtaattcttgatgttcatcttcagcaccagtggaaacacatgaacttcgatgcaggtccagagaccatggacactcccacgaggctcagctctcaggcaccccctacacttcagttgagggaaaagctcaagtgccttaggcccgtggaccacagtcttggctgagatcaaagggatgagcaacagggacttctgccacagtgacaatggaattgtgttgtgccttacttcagaggtggtctcttctttcttgtaataaaagcaatatttatgcggaaagcaa

SEQ ID NO: 139634 - DNA, 3557 bp, Artificial Sequence
  derived and/or modified sequence
gctgaccaggccggtcccccgggaacaggaaccctggtggacgggtcccagcaggcttcttcggtgcccgagagggagcgggtgcccaagggggtggtccctgtggcaggtcccggggtgggggcgcggcgctccgggaagagccttccgcaggtccccgccccgtcacgtgggcgccggccccggccgctgcggtcggtccgctggttggtcgggcgcttggtccggcagttggtcggtgggccagtggcccgtcgctcgcttctgggctctcatgtttgaaggtgggagggacacgggagcggcccgcacacctgagccgcccggagaggagcctcggccccgtacccagtaagaagaggaggaggccaggcaggcaaaaggagtcatggcttctgatgctagtcatgcgctggaagctgccctggagcaaatggacgggatcattgcaggcactaaaacaggtgcagatcttagtgatggtacttgtgagcctggactggcttccccggcctcctacatgaaccccttcccggtgctccatctcatcgaggacttgaggctggccttggagatgctggagcttcctcaggagagagcagccctcctgagccagatccctggcccaacagctgcctacataaaggaatggtttgaagagagcttgtcccaggtaaaccaccacagtgctgctagtaatgaaacctaccaggaacgcttggcacgtctagaaggggataaggagtccctcatattgcaggtgagtgtcctcacagaccaagtagaagcccagggagaaaagattcgagacctggaagtgtgtctggaaggacaccaggtgaaactcaatgctgctgaagagatgcttcaacaggagctgctaagccgcacatctcttgagacccagaagctcgatctgatgactgaagtgtctgagctgaagctcaagctggttggcatggagaaggagcagagagagcaggaggagaagcagagaaaagcagaggagttactgcaagagctcaggcacctcaaaatcaaagtggaagagttggaaaatgaaaggaatcagtatgaatggaagctaaaggccactaaggctgaagtcgcccagctgcaagaacaggtggccctgaaagatgcagaaattgagcgtctgcacagccagctctcccggacagcagctctccacagtgagagtcacacagagagagaccaagaaattcaacgtctgaaaatggggatggaaactttgctgcttgccaatgaagataaggaccgtcggatagaggagcttacggggctgttaaaccagtaccggaaggtaaaggagattgtgatggtcactcaagggccttcggagagaactctctcaatcaatgaagaagaaccggagggaggtttcagcaagtggaacgctacaaataaggaccctgaagaattatttaaacaagagatgcctccaagatgtagctctcctacagtggggccacctccattgccacagaaatcactggaaaccagggctcagaaaaagctctcttgtagtctagaagacttgagaagtgaatctgtggataagtgtatggatgggaaccagcccttcccggtgttagaacccaaggacagccctttcttggcggagcacaaatatcccactttacctgggaagctttcaggagccacgcccaatggagaggctgccaaatctcctcccaccatctgccagcctgacgccacggggagcagcctgctgaggctgagagacacagaaagtggctgggacgacactgctgtggtcaatgacctctcatccacatcatcgggcactgaatcaggtcctcagtctcctctgacaccagatggtaaacggaatcccaaaggcattaagaagttctggggaaaaatccgaagaactcagtcaggaaatttctacactgacacgctggggatggcagagtttcgacgaggtgggctccgggcaaccgcagggccaagactctctaggaccagggactccaagggacagaaaagtgacgccaatgccccctttgcccagtggagcacagagcgtgtgtgtgcatggctggaggactttggcctggctcagtatgtgatctttgccaggcagtgggtatcttctggccacaccttattgacagccacccctcaggacatggaaaaggagctaggaattaagcacccactccacaggaagaagcttgttttagcagtgaaagccatcaacaccaaacaggaggagaagtctgcactgctagaccacatttgggtgacaaggtggcttgatgatattggcttaccccagtacaaagaccagtttcatgaatctagagttgacagacgaatgctgcaatacctaactgtgaacgatttactcttcttaaaagtcaccagccaactacatcatctcagcatcaaatgtgccattcacgtgctgcatgtcaacaagttcaacccccactgcctgcaccggcggccagctgatgagagtaacctttctccttcagaagttgtacagtggtccaaccacagggtgatggagtggttacgatctgtggacctggcagagtatgcacccaatcttcgagggagtggagtccatggaggcctcattatcctggagccacgcttcactggggacaccctggctatgcttctcaacatccccccacaaaagacgctcctcaggcgccacctgaccaccaagttcaatgccttgattggtccggaggctgaacaggagaagcgagagaaaatggcctcaccagcttacacaccactgaccaccacagccaaagtccggccaaggaaactaggattttcacacttcggaaacataagaaaaaagaagttcgatgaatcgacggactacatttgcccaatggagcccagtgacggtgtcagtgatagtcacagggtctacagtggctaccggggcctcagcccccttgatgcccctgaactggatgggctggaccaggtgggacagattagctgatgcccttgtcacctgccctctgtgcaccctgagagctcacagtaacactgtgtgtgtcaccatataactgcacctcacccccgcacgtgtgcatgactcgcagagaatattccagcaattgtgtacccctgggccagtctctttgaaccctgagggtggccaggatctggagctgcatctctaaggggccaggctttggggaccattgccaaaggtggactcaggaggaaagacacttaaagacacttttacatgtctagtaattcttgatgttcatcttcagcaccagtggaaacacatgaacttcgatgcaggtccagagaccatggacactcccacgaggctcagctctcaggcaccccctacacttcagttgagggaaaagctcaagtgccttaggcccgtggaccacagtcttggctgagatcaaagggatgagcaacagggacttctgccacagtgacaatggaattgtgttgtgccttacttcagaggtggtctcttctttcttgtaataaaagcaatatttatgcggaaa

SEQ ID NO: 139635 - DNA, 534 bp, Artificial Sequence
  derived and/or modified sequence
attcagcaactctgatagcaacgttctcagcagcctggcccctctgtcctgctatggctcctctttgtcctgacaggatatctcgctgtgttgggctcctctgtcctgagggaaatttagcacaatggccttgtccctcattgtgatataaagccagtgtctgtgggctctgccattgctctgaggagctgtcttcgcaggccaggtgtgcggcttctcctctccactgtcagatctgatcctgtgggggtcgtgacctctggatgttataggacctgtggaggacagtaagaagaggaggaggccaggcaggcaaaaggagtcatggcttctgatgctagtcatgcgctggaagctgccctggagcaaatggacgggatcattgcaggcactaaaacaggtgcagatcttagtgatggtacttgtgagcctggactggcttccccggcctcctacatgaaccccttcccggtgctccatctcatcgaggacttgaggctggccttggagatgctggagcttcctcaggagaga

SEQ ID NO: 139636 - DNA, 484 bp, Artificial Sequence
  derived and/or modified sequence
actagagggacctccaccccaggttgcgagtgcagcgcggcgggacctgggatgattcgggggctttccgacctgcttagggagggcggctcagagacaacctcaattttgcctggattgcacgcgggccgaggaagtcgggatgctccgaagggtttctgctctgggagtgcctctaattaagaagaggaggaggccaggcaggcaaaaggagtcatggcttctgatgctagtcatgcgctggaagctgccctggagcaaatggacgggatcattgcaggcactaaaacaggtgcagatcttagtgatggtacttgtgagcctggactggcttccccggcctcctacatgaaccccttcccggtgctccatctcatcgaggacttgaggctggccttggagatgctggagcttcctcaggagagagcagccctcctgagccagatccctggcccaacagctgcctacataaaggaatggtttg

SEQ ID NO: 139637 - DNA, 625 bp, Artificial Sequence
  derived and/or modified sequence
cagtaggaggaggatgtcgctgctgagactgtgggacagctaggctcagagggagtctgacttcggggcacccggagtaagaagaggaggaggccaggcaggcaaaaggagtcatggcttctgatgctagtcatgcgctggaagctgccctggagcaaatggacgggatcattgcaggcactaaaacaggtgcagatcttagtgatggtacttgtgagcctggactggcttccccggcctcctacatgaaccccttcccggtgctccatctcatcgaggacttgaggctggccttggagatgctggagcttcctcaggagagagcagccctcctgagccagatccctggcccaacagctgcctacataaaggaatggtttgaagagagcttgtcccaggtaaaccaccacagtgctgctagtaatgaaacctaccaggaacgcttggcacgtctagaaggggataaggagtccctcatattgcaggtgagtgtcctcacagaccaagtagaagcccagggagaaaagattcgagacctggaagtgtgtctggaaggacaccaggtgaaactcaatgctgctgaagagatgcttcaacaggagctgctaagccgcacatctcttga

SEQ ID NO: 139638 - DNA, 814 bp, Artificial Sequence
  derived and/or modified sequence
gggctgaccaggccggtcccccgggaacaggaaccctggtggacgggtcccagcaggcttcttcggtgcccgagagggagcgggtgcccaagggggtggtccctgtggcaggtcccggggtgggggcgcggcgctccgggaagagccttccgcaggtccccgccccgtcacgtgggcgccggccccggccgctgcggtcggtccgctggttggtcgggcgcttggtccggcagttggtcggtgggccagtggcccgtcgctcgcttctgggctctcatgtttgaaggtgggagggacacgggagcggcccgcacacctgagccgcccggagaggagcctcggccccgtacccaggaaaaactggcggagagcctcagaaccacctgtttcctctgctgcaccatgcttgagtgtggaagccgtgcccctgttctccacagcgtgtatggccattcggcacatgtgtagatttgctgaatgagcaaacagcaactcctccagtttacagactaagaagaggaggaggccaggcaggcaaaaggagtcatggcttctgatgctagtcatgcgctggaagctgccctggagcaaatggacgggatcattgcaggcactaaaacaggtgcagatcttagtgatggtacttgtgagcctggactggcttccccggcctcctacatgaaccccttcccggtgctccatctcatcgaggacttgaggctggccttggagatgctggagcttcctcaggagagagcagccctcctgagccagatccctggcccaacagctgcctacataaaggaatggtttg

SEQ ID NO: 139639 - protein, 1005 aa, Artificial Sequence
  derived and/or modified sequence
MMSDASDMLAAALEQMDGIIAGSKALEYSNGIFDCQSPTSPFMGSLRALHLVEDLRGLLEMMETDEKEGLRCQIPDSTAETLVEWLQSQMTNGHLPGNGDVYQERLARLENDKESLVLQVSVLTDQVEAQGEKIRDLEFCLEEHREKVNATEEMLQQELLSRTSLETQKLDLMAEISNLKLKLTAVEKDRLDYEDKFRDTEGLIQEINDLRLKVSEMDSERLQYEKKLKSTKDELASLKEQLEEKESEVKRLQEKLVCKMKGEGVEIVDRDENFKKKLKEKNIEVQKMKKAVESLMAANEEKDRKIEDLRQCLNRYKKMQDTVVLAQGKKGKDGEYEELLNSSSISSLLDAQGFSDLEKSPSPTPVMGSPSCDPFNTSVPEEFHTTILQVSIPSLLPATVSMETSEKSKLTPKPETSFEENDGNIILGATVDTQLCDKLLTSSLQKSSSLGNLKKETSDGEKETIQKTSEDRAPAESRPFGTLPPRPPGQDTSMDDNPFGTRKVRSSFGRGFFKIKSNKRTASAPNLDRKRSASAPTLAETEKETAEHLDLAGASSRPKDSQRNSPFQIPPPSPDSKKKSRGIMKLFGKLRRSQSTTFNPDDMSEPEFKRGGTRATAGPRLGWSRDLGQSNSDLDMPFAKWTKEQVCNWLMEQGLGSYLNSGKHWIASGQTLLQASQQDLEKELGIKHSLHRKKLQLALQALGSEEETNHGKLDFNWVTRWLDDIGLPQYKTQFDEGRVDGRMLHYMTVDDLLSLKVVSVLHHLSIKRAIQVLRINNFEPNCLRRRPSDENTIAPSEVQKWTNHRVMEWLRSVDLAEYAPNLRGSGVHGGLMVLEPRFNVETMAQLLNIPPNKTLLRRHLATHFNLLIGAEAQHQKRDAMELPDYVLLTATAKVKPKKLAFSNFGNLRKKKQEDGEEYVCPMELGQASGSASKKGFKPGLDMRLYEEDDLDRLEQMEDSEGTVRQIGAFSEGINNLTHMLKEDDMFKDFAARSPSASITDEDSNV

SEQ ID NO: 139640 - DNA, 5933 bp, Artificial Sequence
  derived and/or modified sequence
gactcgtgtgctgcgagctggcggccgggccggagtgctggggctttgaactccgagaggaggtggaccagaacttttggaactagtgccggcggctctccaccccccagtataaaagaacgtgtggatcactttgctgagtacatccaagatttgaagaactgaaataaatcagctttaaacctgctttttaaaaatatctgggttggaatttgcccctgacaaataataaaatgatgagtgatgcaagtgacatgttggctgcagcgttggagcagatggatggtatcatagcaggttctaaggctctggaatattccaatgggatttttgattgccaatctcccacctctccattcatgggaagtttgcgagctctgcaccttgtggaagacctgcgtggattgttagagatgatggaaacagatgagaaagaaggcttgagatgccagatcccagattcaacagcagaaacgcttgttgaatggcttcagagtcaaatgacaaatggacacctaccagggaacggagatgtgtatcaagaaaggctggcacgtttagaaaatgataaagaatccctcgttcttcaggtaagtgtgttaacagaccaggtggaggctcagggagagaagattcgagatttggagttttgtcttgaagagcacagagagaaggtgaatgccacagaagaaatgctgcagcaggagcttctaagtaggacatccttagaaactcagaagttggatctgatggctgaaatatctaacttgaagttgaaactgacagctgtagagaaggacagattggattatgaagataagttcagagacacagaggggctgattcaggagatcaatgatttgaggttaaaagttagtgaaatggacagtgagagacttcagtatgaaaaaaagcttaaatcaaccaaagatgaactggcatctttaaaagaacaactagaagaaaaggaatctgaagtaaaaaggctacaagaaaaattggtttgcaagatgaaaggagaaggggttgaaattgttgatagagatgaaaattttaaaaagaagctcaaagaaaaaaacatcgaagtacaaaaaatgaaaaaagctgtggagtccttgatggcagcaaatgaagaaaaggatcggaaaatagaagatcttcgacagtgcctgaacaggtacaagaaaatgcaagacacggtggtactggcccaaggtaaaaaaggcaaagatggagaatatgaagagctgctcaattccagttccatctcctctttgctggatgcacagggtttcagtgatctggagaaaagtccatcacccactccagtaatgggatctcccagttgtgacccatttaacacaagtgttcccgaagagttccatactaccatcttgcaagtttccatcccttcattattgccagcaactgtaagcatggaaacttctgaaaaatcaaagttgactcctaagccagagacttcatttgaagaaaatgatggaaacataatccttggtgccactgttgatacccaactgtgtgataaacttttaacttcaagtctgcagaagtccagcagcctgggcaatctgaagaaagagacatctgatggggaaaaggaaactattcagaagacttcagaggacagagctccggcagaaagcaggccatttgggacccttcctcccaggcccccagggcaggacacctccatggatgacaaccccttcggcactcgaaaagtcagatcttcctttggccggggcttttttaaaatcaaaagtaacaagagaacagcaagtgcaccaaacttagatcgtaaacgaagtgccagtgcacccaccctagctgaaacagaaaaagagacagcagagcacctagatctggctggtgcttcttctcggccaaaagattcacagaggaacagtcccttccagataccgcctccatctccagattccaaaaagaaatccagaggtatcatgaaactctttggaaaacttaggagaagtcaatcaactacattcaacccagatgacatgtctgagcctgaattcaaaagaggagggacaagggcaaccgcggggccccgattaggttggtctcgagacttgggacagtctaacagtgacttggatatgccatttgccaagtggaccaaggagcaggtttgcaattggctgatggaacagggcttgggctcgtacctgaattctggcaagcactggattgcatctggccaaacgcttttgcaggcttctcaacaagatctagagaaggaacttggaatcaagcattcacttcatcgaaagaaactccagctagcactccaagccctgggatctgaagaagaaaccaatcatgggaagctggatttcaactgggtcactagatggttggatgacattggcctccctcaatataagacccagtttgatgaaggacgggttgatggtcgaatgctacattacatgactgttgatgacttactgtctctgaaggttgtaagtgtgctacaccatctcagtatcaaaagggccatccaggtcctgaggatcaataactttgaaccaaactgtctacggaggcggccatctgatgagaataccatcgccccatcagaagttcagaagtggactaaccatcgagtgatggagtggctgcgctccgtggacttggcagaatatgcgcccaatctcagaggcagtggtgtccatggtgggctcatggttctagagcctcgttttaacgtagaaacaatggctcagttattgaacatcccacccaataagactttgctgcgaagacatttggccactcatttcaaccttctgattggggctgaggcacagcaccagaagcgagatgccatggagctgccggattatgtacttctaacagctactgccaaagtgaagccaaagaaacttgcctttagcaattttgggaatttgagaaagaagaaacaggaagatggtgaagaatatgtttgtccaatggaattgggacaggcatcaggaagtgcatctaagaaaggatttaaacctggtttggatatgcgcctgtatgaggaagatgatttggaccggttagagcagatggaagattcagaagggacagtgagacagataggtgcattctctgaaggcatcaacaatctgacgcacatgttaaaagaagatgacatgtttaaagattttgctgcccgttcccccagtgccagcattacagatgaagactcaaacgtttgaccgtagcacctggatgaacattaggagtgcttagtcttttttctacttgcttttccaaacactcacagtatatacaacaggcagcggattgtctattgtttgttgttccaacttctgctgtcgagaagtttaaacagaaagcaggagtaatgtgccgattctgaagttgccacaaaaaataagacactggtgaatgagagtataattgtttttcttctatttaatgtaaaaatctgtgatatattatatttaaagtgttgcatttaagatgagtattttaccagagtgtttccattcatatccgcggtatggaggatttgaggaacagtaaccaggatgtgaatgattttgttacatcagtgttcactgtagccacctaagtaggacattatatgatttcagaatcaatatgtggaacttctttaagcattcagtgtgcccactaaatgccagccacacctccacttgcctcttattgtcttatttttatatatttttctaaatatatgtatatatacagtacatagaaaatagaacttttattttgtgacctaaggacgatggtgaaaagatcacgttttcaaaacaatctggtgatcagaatgttcatataccagctggtttctgaagaggtcagaatgatctttctccatactgacttttaacaatgttgatcattgaggctaaattaatatatatgaaatattcctttttgatgacaccacaaaattgttgaacagtttaagaatttcaaccttaatcttggatccctttacctcatatggaagaacttgagggacattagtatacttttttttaagatggagtcttgctctgtcacccaggttggagtgccatggcatgatcttggctcactgcaacctccacctcctgggtcaagccattctgcttcagccccaagtaggtgggactccaggcatgcaccaccatgcctggctaatttttgcatttttagtagagacagggtttcaccatattggccaggctgggactcgaactcctgaccttgtgatctgcccgcctcagcctcccaaagtactgggattataggcatgagccaccacgcccagcctgttatttttttattattattgtttttttttagtgacagagtctcattctgttgcccatgctggagtgcagtggcgtgatcatagctcactgcagccttgaattcctaggctccagtgatcctctcacctcagcttccctaatagctaggattacaggtgtgtggcctcccaccccaccccacccttcacacctggctgatttttcaaaaagtttttttgtagaaacagggtctcaccatgttgtccagcctggtctcaaactcctgtcctcaagtgatcctcccacctcagcctttcaaagtgctggaattacaggtgtgagccactctgcctggcctaccactaacttgaatacattcagaatcacctcctctccccaaaatttgtagaaatagtttttgaggaagccaaaagcaaagcagaaacctttacagtattgtttcttttctctttgttaactgtgtcattacagcaaaatactagcagtctgcctaaacatgttcattgtacatttctcaggctatcaatgaatggaggtttttaaaaagttgaatatttgtctgaacattttatttcaaagttcaaaaaaacagaggctgcaaaattcattttataatggctattttgtgacgataagatgtagttcatgtttttctgtagcactgggcccaaatattctttgtaaagaaaatcgctgcagcaaaaactgttactgtgtttattatatttgtagaagtattagaaaaatattctattttttattcagtgctgcgtaattacccatggtagccaaccctacaaaagacaggttttcacaaattgaggtggaggtgggcggttcagtatctgccactggacttgattataaactgtatttgaatatcagtggtattatcttttaagttgtcagcaagttaccaaggtattcattaaagaacttgtaatatcaaattactatttattcataacaattgatttgatgctaataataattttctttaaactctaccattcattatgtggtaactgtattgaacttactttatttggattttattttaatgtgactagatgtcaccacttcaaaaaatcaatttgttcttagaacctggttgaaaataccaggaaactgttacagacgccattttttttttttttgagacggagtcttgctctgttgcccaggctggagtgcagtggcacaatctcagctcactgcaagctccgcctcctgggttcacgccattctcccacctcagcttcccaagcagctgggactacaggtacctgccaccacgcctggctaattttgtttttgtatttttagtagagacggggtttcaccgtgttagccaggaaggtctcaatctcctgacctcgtgaatcgcccccctcggtctcccaaagtgctgggattacaggcgtgagccaccatgcccggcccaaatattttttattcaggatggtataacctaactgataataggtaataaggttaaatttttttatgacgtattttatttacaaatatcatacactgctggtgttaccatatgaaaggaaataaagtcaattgataattgcctca

SEQ ID NO: 139641 - DNA, 6082 bp, Artificial Sequence
  derived and/or modified sequence
gattcctgcagggagggaggagagaagggcggcagtgggagggggaggtacctggaactgggagtgatgtcagctcccagctcggtgcctgcccggattcctgacatggtgtagtgcaggcagggtggggaaaggacggggaaggactcgtgtgctgcgagctggcggccgggccggagtgctggggctttgaactccgagaggaggtggaccagaacttttggaactagtgccggcggctctccaccccccagtataaaagaacgtgtggatcactttgctgagtacatccaagatttgaagaactgaaataaatcagctttaaacctgctttttaaaaatatctgggttggaatttgcccctgacaaataataaaatgatgagtgatgcaagtgacatgttggctgcagcgttggagcagatggatggtatcatagcaggttctaaggctctggaatattccaatgggatttttgattgccaatctcccacctctccattcatgggaagtttgcgagctctgcaccttgtggaagacctgcgtggattgttagagatgatggaaacagatgagaaagaaggcttgagatgccagatcccagattcaacagcagaaacgcttgttgaatggcttcagagtcaaatgacaaatggacacctaccagggaacggagatgtgtatcaagaaaggctggcacgtttagaaaatgataaagaatccctcgttcttcaggcaatggtaagtgtgttaacagaccaggtggaggctcagggagagaagattcgagatttggagttttgtcttgaagagcacagagagaaggtgaatgccacagaagaaatgctgcagcaggagcttctaagtaggacatccttagaaactcagaagttggatctgatggctgaaatatctaacttgaagttgaaactgacagctgtagagaaggacagattggattatgaagataagttcagagacacagaggggctgattcaggagatcaatgatttgaggttaaaagttagtgaaatggacagtgagagacttcagtatgaaaaaaagcttaaatcaaccaaagatgaactggcatctttaaaagaacaactagaagaaaaggaatctgaagtaaaaaggctacaagaaaaattggtttgcaagatgaaaggagaaggggttgaaattgttgatagagatgaaaattttaaaaagaagctcaaagaaaaaaacatcgaagtacaaaaaatgaaaaaagctgtggagtccttgatggcagcaaatgaagaaaaggatcggaaaatagaagatcttcgacagtgcctgaacaggtacaagaaaatgcaagacacggtggtactggcccaaggtaaaaaaggcaaagatggagaatatgaagagctgctcaattccagttccatctcctctttgctggatgcacagggtttcagtgatctggagaaaagtccatcacccactccagtaatgggatctcccagttgtgacccatttaacacaagtgttcccgaagagttccatactaccatcttgcaagtttccatcccttcattattgccagcaactgtaagcatggaaacttctgaaaaatcaaagttgactcctaagccagagacttcatttgaagaaaatgatggaaacataatccttggtgccactgttgatacccaactgtgtgataaacttttaacttcaagtctgcagaagtccagcagcctgggcaatctgaagaaagagacatctgatggggaaaaggaaactattcagaagacttcagaggacagagctccggcagaaagcaggccatttgggacccttcctcccaggcccccagggcaggacacctccatggatgacaaccccttcggcactcgaaaagtcagatcttcctttggccggggcttttttaaaatcaaaagtaacaagagaacagcaagtgcaccaaacttagatcgtaaacgaagtgccagtgcacccaccctagctgaaacagaaaaagagacagcagagcacctagatctggctggtgcttcttctcggccaaaagattcacagaggaacagtcccttccagataccgcctccatctccagattccaaaaagaaatccagaggtatcatgaaactctttggaaaacttaggagaagtcaatcaactacattcaacccagatgacatgtctgagcctgaattcaaaagaggagggacaagggcaaccgcggggccccgattaggttggtctcgagacttgggacagtctaacagtgacttggatatgccatttgccaagtggaccaaggagcaggtttgcaattggctgatggaacagggcttgggctcgtacctgaattctggcaagcactggattgcatctggccaaacgcttttgcaggcttctcaacaagatctagagaaggaacttggaatcaagcattcacttcatcgaaagaaactccagctagcactccaagccctgggatctgaagaagaaaccaatcatgggaagctggatttcaactgggtcactagatggttggatgacattggcctccctcaatataagacccagtttgatgaaggacgggttgatggtcgaatgctacattacatgactgttgatgacttactgtctctgaaggttgtaagtgtgctacaccatctcagtatcaaaagggccatccaggtcctgaggatcaataactttgaaccaaactgtctacggaggcggccatctgatgagaataccatcgccccatcagaagttcagaagtggactaaccatcgagtgatggagtggctgcgctccgtggacttggcagaatatgcgcccaatctcagaggcagtggtgtccatggtgggctcatggttctagagcctcgttttaacgtagaaacaatggctcagttattgaacatcccacccaataagactttgctgcgaagacatttggccactcatttcaaccttctgattggggctgaggcacagcaccagaagcgagatgccatggagctgccggattatgtacttctaacagctactgccaaagtgaagccaaagaaacttgcctttagcaattttgggaatttgagaaagaagaaacaggaagatggtgaagaatatgtttgtccaatggaattgggacaggcatcaggaagtgcatctaagaaaggatttaaacctggtttggatatgcgcctgtatgaggaagatgatttggaccggttagagcagatggaagattcagaagggacagtgagacagataggtgcattctctgaaggcatcaacaatctgacgcacatgttaaaagaagatgacatgtttaaagattttgctgcccgttcccccagtgccagcattacagatgaagactcaaacgtttgaccgtagcacctggatgaacattaggagtgcttagtcttttttctacttgcttttccaaacactcacagtatatacaacaggcagcggattgtctattgtttgttgttccaacttctgctgtcgagaagtttaaacagaaagcaggagtaatgtgccgattctgaagttgccacaaaaaataagacactggtgaatgagagtataattgtttttcttctatttaatgtaaaaatctgtgatatattatatttaaagtgttgcatttaagatgagtattttaccagagtgtttccattcatatccgcggtatggaggatttgaggaacagtaaccaggatgtgaatgattttgttacatcagtgttcactgtagccacctaagtaggacattatatgatttcagaatcaatatgtggaacttctttaagcattcagtgtgcccactaaatgccagccacacctccacttgcctcttattgtcttatttttatatatttttctaaatatatgtatatatacagtacatagaaaatagaacttttattttgtgacctaaggacgatggtgaaaagatcacgttttcaaaacaatctggtgatcagaatgttcatataccagctggtttctgaagaggtcagaatgatctttctccatactgacttttaacaatgttgatcattgaggctaaattaatatatatgaaatattcctttttgatgacaccacaaaattgttgaacagtttaagaatttcaaccttaatcttggatccctttacctcatatggaagaacttgagggacattagtatacttttttttaagatggagtcttgctctgtcacccaggttggagtgccatggcatgatcttggctcactgcaacctccacctcctgggtcaagccattctgcttcagccccaagtaggtgggactccaggcatgcaccaccatgcctggctaatttttgcatttttagtagagacagggtttcaccatattggccaggctgggactcgaactcctgaccttgtgatctgcccgcctcagcctcccaaagtactgggattataggcatgagccaccacgcccagcctgttatttttttattattattgtttttttttagtgacagagtctcattctgttgcccatgctggagtgcagtggcgtgatcatagctcactgcagccttgaattcctaggctccagtgatcctctcacctcagcttccctaatagctaggattacaggtgtgtggcctcccaccccaccccacccttcacacctggctgatttttcaaaaagtttttttgtagaaacagggtctcaccatgttgtccagcctggtctcaaactcctgtcctcaagtgatcctcccacctcagcctttcaaagtgctggaattacaggtgtgagccactctgcctggcctaccactaacttgaatacattcagaatcacctcctctccccaaaatttgtagaaatagtttttgaggaagccaaaagcaaagcagaaacctttacagtattgtttcttttctctttgttaactgtgtcattacagcaaaatactagcagtctgcctaaacatgttcattgtacatttctcaggctatcaatgaatggaggtttttaaaaagttgaatatttgtctgaacattttatttcaaagttcaaaaaaacagaggctgcaaaattcattttataatggctattttgtgacgataagatgtagttcatgtttttctgtagcactgggcccaaatattctttgtaaagaaaatcgctgcagcaaaaactgttactgtgtttattatatttgtagaagtattagaaaaatattctattttttattcagtgctgcgtaattacccatggtagccaaccctacaaaagacaggttttcacaaattgaggtggaggtgggcggttcagtatctgccactggacttgattataaactgtatttgaatatcagtggtattatcttttaagttgtcagcaagttaccaaggtattcattaaagaacttgtaatatcaaattactatttattcataacaattgatttgatgctaataataattttctttaaactctaccattcattatgtggtaactgtattgaacttactttatttggattttattttaatgtgactagatgtcaccacttcaaaaaatcaatttgttcttagaacctggttgaaaataccaggaaactgttacagacgccattttttttttttttgagacggagtcttgctctgttgcccaggctggagtgcagtggcacaatctcagctcactgcaagctccgcctcctgggttcacgccattctcccacctcagcttcccaagcagctgggactacaggtacctgccaccacgcctggctaattttgtttttgtatttttagtagagacggggtttcaccgtgttagccaggaaggtctcaatctcctgacctcgtgaatcgcccccctcggtctcccaaagtgctgggattacaggcgtgagccaccatgcccggcccaaatattttttattcaggatggtataacctaactgataataggtaataaggttaaatttttttatgacgtattttatttacaaatatcatacactgctggtgttaccatatgaaaggaaataaagtcaattgataattgcctc

SEQ ID NO: 139642 - DNA, 3018 bp, Artificial Sequence
  derived and/or modified sequence
atgatgtcagatgccagcgacatgcttgcggccgcattggaacagatggacggaatcatcgctggctccaaggctttggagtactccaacggcatttttgattgccaaagcccaactagcccttttatgggtagtcttcgggctctgcacctcgtggaggacctcagaggcctgctcgagatgatggagactgatgaaaaggaggggctgcggtgccagattcccgactccaccgcagagactttggtggaatggctgcagtcccagatgaccaatggtcacctgcctggaaacggtgacgtgtaccaggagagacttgctaggttggaaaatgataaagaatcactggttctccaggtaagcgttctgacagatcaggttgaagcacagggtgaaaaaatcagggacctagagttttgcctcgaagagcacagagagaaagtgaatgcaaccgaagagatgctgcagcaagagcttctatctaggacatcactcgagactcagaagctcgaccttatggctgagatctccaatctgaaactcaaactaacagccgttgagaaagaccggctggactacgaggacaagttcagggatacggagggcctcatccaggaaataaacgatctccgcttgaaggtgagcgagatggacagtgaaaggctccagtatgaaaagaagctgaaatcaacaaaagacgaactggccagccttaaggagcagctggaagagaaagagagcgaagtcaagcggctgcaggaaaagctggtatgcaaaatgaagggtgagggggtcgagatagtcgaccgggacgagaattttaagaagaagctcaaagagaagaatatagaggttcagaagatgaaaaaggccgtagaaagcctaatggccgcaaacgaggagaaagatcggaaaattgaagatctacgccagtgcctcaataggtacaaaaaaatgcaggatactgtcgtcttagcccagggcaagaagggaaaggacggagaatacgaggaattactcaattcctcatcaataagttctctcctagacgctcagggtttctccgatcttgaaaagtccccttctccaaccccagtgatgggctccccttcttgtgacccctttaatacatccgtccccgaggagttccacacaacaatcctccaggtcagcattccatcactgctgcctgccaccgtgtccatggagacctcggagaagtctaaactgacgcccaaaccagagacctcattcgaggaaaacgatgggaacattattctgggcgctaccgtcgatacacaactatgcgataaactgctcacatcttcattacagaaatcatcttccctgggaaacctgaaaaaggagacaagcgatggtgaaaaggaaacaattcagaagacgagcgaagaccgagctccagccgagagccgtcccttcggcacgctccccccccgcccgcctggtcaggatactagtatggacgacaatcctttcggtacaaggaaggtgaggagctcctttggtcgtggctttttcaagattaagtccaacaaaagaaccgcctccgcccctaacctggatagaaaaagaagtgcctccgcccccactctcgctgagaccgaaaaggagaccgccgaacatttggatttagctggcgctagctctcgcccaaaggattctcaacgaaattctccgtttcagatcccgcctccatcaccagacagcaagaagaagtcacggggcattatgaaattgtttgggaagttaaggagaagccagtccactacctttaatccggatgacatgagtgagcctgagttcaaaaggggcgggacgcgggctacagctggaccgcgcttggggtggtccagggaccttggacagtcaaactcagacttggatatgccatttgccaagtggacaaaggaacaagtctgcaactggctcatggagcagggtctggggtcctatctgaattctgggaaacactggatcgcttctggccagacgttattgcaagctagccagcaggatttggagaaggagcttgggattaaacactcgctgcaccggaaaaagctccaactggccctgcaggctctgggaagtgaagaagagacaaaccatgggaagcttgacttcaattgggtgacgcgttggttagatgacataggcttgccacaatataagacccagttcgacgaggggagggtcgacggaaggatgttgcattatatgaccgttgacgacttactgagcctgaaagtcgtgtcagttctgcaccacctgtcaatcaaaagagctatccaggtgctcaggatcaataacttcgaaccaaattgcctaagaaggcggccttcggacgaaaacacaattgcaccttcagaagtccaaaagtggaccaaccaccgtgtgatggagtggctccgttctgtggatctcgctgagtacgcccctaacctgagaggatcaggcgtgcacggtggtctaatggtcttagaaccacgttttaatgtcgagacaatggcccagttattgaatatccctccaaacaaaacactattgagaaggcacttggctacacactttaaccttttgatcggcgctgaggctcagcaccagaagcgggatgccatggagctccccgattacgtgttgctgactgcaaccgcaaaggtcaagccaaaaaaactggcctttagtaatttcggcaatctcagaaaaaaaaaacaagaggacggtgaggagtacgtttgccctatggaactgggccaggcctccggttccgcctccaaaaaggggttcaaaccaggtctggatatgcggctttatgaagaggacgatctggatcgactggagcagatggaggactccgaagggacagtcaggcagattggcgctttcagcgagggaatcaataacctgacacacatgttaaaggaagatgatatgtttaaagatttcgccgccaggtcacctagtgcaagcattacagacgaggatagtaatgtgtag

SEQ ID NO: 139643 - DNA, 3018 bp, Artificial Sequence
  derived and/or modified sequence
atgatgtctgatgccagtgacatgctggccgccgccctggagcagatggatggcatcatcgccggcagcaaggccctggagtacagcaatggcatctttgactgccagagccccaccagccccttcatgggcagcctgcgggccctgcacctggtggaggacctgcggggcctgctggagatgatggagacagatgagaaggagggcctgcgctgccagatcccagacagcacagctgagaccctggtggagtggctgcagagccagatgaccaacggccacctgcctggaaatggagatgtgtaccaggagcggctggcccggctggagaatgacaaggagagcctggtgctgcaggtgtctgtgctgacagaccaggtggaggcccagggcgagaagatccgggacctggagttctgcctggaggagcaccgggagaaggtgaatgccacagaggagatgctgcagcaggagctgctgagcaggaccagcctggagacccagaagctggacctgatggccgagatcagcaacctgaagctgaagctgacagctgtggagaaggaccggctggactatgaggacaagttccgggacacagagggcctcatccaggagatcaatgacctgcggctgaaggtgtctgagatggattctgagcggctgcagtatgagaagaagctgaagagcaccaaggatgagctggccagcctgaaggagcagctggaggagaaggagagcgaggtgaagaggctgcaggagaagctggtgtgcaagatgaagggggagggcgtggagatcgtggacagagatgagaacttcaagaagaagctgaaggagaagaacatcgaggtgcagaagatgaagaaggctgtggagagcctgatggccgccaatgaggagaaggacaggaagattgaggacctgcggcagtgcctgaaccgctacaagaagatgcaggacacagtggtgctggcccagggcaagaagggcaaggatggagaatatgaggagctgctgaacagcagcagcatcagcagcctgctggatgcccagggcttcagtgacctggagaagagccccagccccacccctgtgatgggcagccccagctgtgaccccttcaacacctctgtgcctgaggagttccacaccaccatcctgcaggtgtccatccccagcctgctgcctgccaccgtgtccatggagaccagcgagaagagcaagctgacccccaagccagagaccagctttgaggagaatgatggcaacatcatcctgggcgccaccgtggacacccagctgtgtgacaagctgctgaccagcagcctgcagaagagcagcagcctgggcaacctgaagaaggagaccagtgatggagagaaggagaccatccagaagaccagcgaggaccgggccccagctgagagccggcccttcggcaccctgccccccaggcctcctggccaggacacctccatggatgacaaccccttcggcaccaggaaggtgcgcagcagctttggccggggcttcttcaagatcaagagcaacaagaggacagccagcgcccccaacctggacaggaagaggtctgccagcgcccccaccctggccgagacagagaaggagacagctgagcacctggacctggccggggccagcagccggcccaaggacagccagaggaacagccccttccagatccccccacccagcccagacagcaagaagaagagccggggcatcatgaagctgtttgggaagctgcggcgcagccagagcaccaccttcaacccagatgacatgtctgagcctgagttcaagagaggaggcacccgggccacagctggcccccggctgggctggagccgggacctgggccagagcaacagcgacctggacatgccctttgccaagtggaccaaggagcaggtgtgcaactggctgatggagcagggcctgggcagctacctgaacagcggcaagcactggatcgccagcggccagaccctgctgcaggccagccagcaggacctggagaaggagctgggcatcaagcacagcctgcacaggaagaagctgcagctggccctgcaggccctgggcagcgaggaggagaccaaccacggcaagctggacttcaactgggtgacccgctggctggatgacatcggcctgccccagtacaagacccagtttgatgagggccgggtggatggccgcatgctgcactacatgacagtggatgacctgctgagcctgaaggtggtgtctgtgctgcaccacctgagcatcaagagggccatccaggtgctgcgcatcaacaactttgagcccaactgcctgcggcggcggcccagtgatgagaacaccatcgcccccagcgaggtgcagaagtggaccaaccaccgggtgatggagtggctgcggtctgtggacctggccgagtatgcccccaacctgcggggcagcggcgtgcacggcggcctgatggtgctggagccccgcttcaacgtggagaccatggcccagctgctgaacatcccccccaacaagaccctgctgcggcggcacctggccacccacttcaacctgctgattggagctgaggcccagcaccagaagagagatgccatggagctgcctgactatgtgctgctgacagccacagccaaggtgaagcccaagaagctggccttcagcaactttggaaacctgaggaagaagaagcaggaggatggagaggagtatgtgtgccccatggagctgggccaggccagcggcagcgccagcaagaagggcttcaagccaggcctggacatgaggctgtatgaagaagatgacctggaccggctggagcagatggaggacagcgagggcaccgtgcggcagatcggggccttcagcgagggcatcaacaacctgacccacatgctgaaggaggatgacatgttcaaggactttgctgcccggagccccagcgccagcatcacagatgaggacagcaatgtgtag

SEQ ID NO: 139644 - DNA, 3018 bp, Artificial Sequence
  derived and/or modified sequence
atgatgagcgacgccagcgacatgctggccgccgccctggagcagatggacgggattatcgctgggagtaaagctcttgagtacagcaacggaattttcgattgccagtcaccaacatccccctttatgggcagcctgagagccctccacttggtggaagatctgcgtggactgctggaaatgatggagaccgatgaaaaggagggcttgcgatgtcaaatcccagatagcaccgccgagacgctggtggagtggctacagagccagatgaccaatggccatttgccaggcaatggtgacgtgtatcaggagaggcttgcacgactggagaatgacaaagaaagtttagttctgcaggtcagtgtgctcaccgatcaggtggaggctcagggtgagaaaatcagggatctcgagttctgcctggaggaacacagggagaaggttaatgcaaccgaggagatgctgcagcaggagttactgagccggacatcactggagactcaaaaactggatttgatggctgagatttcaaatctcaagctcaagctgaccgctgtggagaaagataggctagattacgaggacaaatttcgggacacggagggactgattcaggagatcaacgatctccgtctcaaggtatctgaaatggattctgaacgcctccagtacgagaagaagctgaaatcaaccaaagatgagcttgcctcacttaaggagcagctcgaggaaaaagagagtgaagtgaaaagactccaggagaaactcgtctgtaaaatgaagggagagggggttgaaattgtcgatagggacgagaatttcaaaaagaagctgaaggagaagaacatcgaggttcaaaaaatgaaaaaagccgtcgagtcactcatggccgctaacgaggagaaggatcgaaagattgaggacctgcggcagtgtctcaataggtacaagaagatgcaggacactgttgtcctagctcagggcaaaaagggcaaagacggggaatatgaagagctcttaaatagctcatccatcagcagcttgctggacgctcagggattttcagatcttgagaaaagtcctagccccacaccagtaatgggctccccatcatgcgaccccttcaacacgagtgtgcctgaggaatttcacacgaccatcctgcaggtttccattccgtctttgctgcccgctacagtctccatggagaccagtgaaaaatctaagttaacacccaaacctgagacatccttcgaagagaacgacgggaacattatcctgggggccactgtggatacccagctctgcgacaaattgttgacttcctctttgcagaaaagtagctcattgggcaacctaaagaaggaaactagtgatggagagaaggagactatacagaaaacaagtgaagacagagctccggccgaatcacggcctttcgggacgctgccccctagacctcccgggcaggatactagtatggatgacaaccccttcggcaccagaaaggtgcgctcttccttcggccgcggattttttaagataaagtccaataagcggaccgccagcgcccccaacctggaccgtaagcgcagtgcctcggcgcccacgttggccgagacggagaaggagaccgctgagcatctcgatcttgctggtgcctctagcaggcccaaggatagccagcgcaactcccctttccaaatccctccacctagccctgattccaagaaaaagagccgaggcatcatgaagctgtttggaaaactgcgcagaagtcagagtacgacatttaaccccgacgatatgagcgaaccagagttcaaaagaggggggacccgggccacagctggtccacggctgggctggtctcgcgatcttggtcaatccaactctgatctggatatgccgttcgcaaagtggaccaaggagcaggtgtgcaattggctcatggagcaagggctaggtagttatctgaatagcggcaaacactggattgcctccgggcaaacgctgctccaagcttctcagcaggatctcgagaaagagctcggcattaagcacagcttgcaccgaaagaagctccagctcgccttgcaggccctcgggagcgaggaagaaaccaatcacggtaagctggattttaattgggttacgcgctggctcgacgatatcggcctcccgcaatacaaaacccaatttgatgagggccgagtagacggacgtatgctccattatatgactgtcgatgacctcctgagtctgaaggtggtaagcgtgttgcaccacctgtccatcaaacgcgctattcaggtgctcaggattaacaatttcgagcctaactgtctgaggcggcggccctccgacgagaacacaattgccccaagcgaagtgcagaagtggactaatcaccgggtcatggagtggctgcggagcgtcgaccttgcggaatacgccccaaacctgcgggggagcggcgttcacgggggcttaatggtcctggaaccaagatttaatgtggaaaccatggcccagctgctgaatatccctccaaataaaactcttttacggcggcacttagctactcatttcaacctgctgatcggtgccgaggcccagcaccagaagcgggatgctatggagttacctgattatgtgttgctgactgctactgccaaggtgaagccgaaaaaactcgctttttccaacttcggaaatctgagaaaaaagaaacaagaagacggggaggaatacgtgtgcccaatggaactggggcaggcttccggaagtgcaagcaaaaaggggttcaagcccggtcttgacatgcgattgtatgaggaggacgaccttgacagattggagcagatggaggactctgaaggcacggtccggcagatcggcgcattcagcgagggcatcaacaatctgactcacatgttgaaagaggacgacatgttcaaggactttgctgcccgctctcctagtgcctccattacagacgaagacagcaatgtctag

SEQ ID NO: 139645 - DNA, 3018 bp, Artificial Sequence
  derived and/or modified sequence
atgatgagcgacgcctccgatatgttggcggcagcactggagcaaatggacggcataattgcaggctctaaagccctggagtattcgaacgggattttcgattgccagtctccaacttcacccttcatgggcagccttcgcgcactgcatttagtcgaggacctgcgagggttacttgagatgatggagacggatgagaaggaagggctgaggtgtcagatacccgattccacggctgaaacactggtagagtggcttcagtcccagatgacaaatggtcatctgcccggtaatggtgacgtttaccaggaaaggcttgccagactcgagaacgataaggagagcttggtcctgcaagtgtccgtgttgacggatcaagtcgaggcccagggggaaaaaattcgggacctagagttctgccttgaagaacatcgcgagaaagtaaatgcgaccgaggaaatgctgcaacaggagctgctgtctcggacctcgctggaaacccagaagcttgatctcatggctgagatcagtaatctgaaactcaagttgactgccgtagaaaaggacaggttggactacgaggacaagttccgagacaccgaggggcttatacaagagatcaatgacctgcgcttgaaggtgagtgaaatggattccgagcgccttcagtatgaaaaaaagcttaagtctactaaggatgagctggccagcttgaaagagcagctggaggagaaggagtccgaagtgaaacgtctgcaggaaaagctcgtgtgcaagatgaagggagaaggagttgagattgtcgacagagacgagaactttaaaaagaagctgaaggagaagaacattgaagtccagaagatgaaaaaagctgtcgagtcattaatggccgcaaacgaggaaaaagatcgaaaaattgaagacctgcggcagtgcctcaataggtacaaaaagatgcaggatacggtggtgctggcccaaggcaagaaggggaaagatggagaatatgaagaactgctgaatagcagttcaattagctccctgctggatgcccagggtttctccgacctggaaaaaagcccatccccaacccctgtaatgggttccccgtcgtgtgatcccttcaacacatcagtgccggaagagtttcatacaacaattctccaagtgtcaataccatctctactgccagcaacagtgtccatggagacatccgagaaaagtaaactgactccaaagcctgagacaagctttgaggagaatgacggcaacattattctgggcgctacagttgacacacagctatgtgataaactgcttaccagtagcctgcagaagtcaagctcactcggtaatctaaagaaggaaacctcggatggcgagaaagagaccattcaaaaaacaagcgaggacagagccccagctgaatcaaggccatttgggacgcttccgccacggcctcccggacaggatacaagcatggacgataaccctttcggcacaagaaaggtcagatcttcatttggaagggggttctttaaaattaaatctaacaagcgcacggcctccgcacctaacctggatcgaaagaggagcgctagcgccccaaccttagctgaaaccgaaaaggagaccgctgaacacctcgacctagccggagcttcaagtcggccaaaagatagccagcggaattctccatttcagatcccacctccctcccccgacagtaagaaaaaatctcgtgggatcatgaaattatttggtaagctccggaggtcccagagcaccacatttaaccccgatgatatgtcggaaccagagttcaagcggggaggtacaagagccaccgcagggcctagattaggctggagcagagatttggggcagagcaatagcgacttggacatgcctttcgcgaagtggactaaggagcaggtgtgtaactggctgatggagcagggcttaggtagctacttgaactccgggaagcactggattgccagtgggcagacgttactgcaggccagccagcaggatctggaaaaggagttaggaatcaaacattctctgcaccgaaaaaagctccagttggccctacaagctttaggcagtgaggaagagactaaccatggcaagttagacttcaattgggtgacgagatggcttgacgacattggactgccacagtacaagacccagttcgatgaagggcgagtggacggtagaatgctccattacatgaccgtggacgatctgttgtctctgaaggtcgtgagtgtgttgcatcacttatctattaagcgggcaattcaggtattgcggatcaacaattttgaaccaaattgcctccggagaaggcccagcgacgagaatacaattgccccatccgaggtacagaagtggacgaatcatagagtcatggaatggctccgcagcgtggacttagcagagtacgcacctaacttgcggggtagtggagtgcatggagggttgatggtactggaacctagatttaatgtcgagacaatggcccagctgttgaacataccgccaaataagacactcctcaggcgccacttagctacccatttcaacctgctaattggcgctgaggcccaacaccagaaaagggatgccatggaactccccgattatgtgctgttaaccgccacagcaaaagtcaagccaaagaagctggctttctctaatttcggtaaccttaggaaaaaaaagcaggaggacggagaagaatatgtatgcccaatggagctgggacaggcctctgggtctgcttcgaagaagggatttaaacctggcttggacatgcggctgtacgaggaggacgatctggaccgcttggagcagatggaggactccgagggtactgtccgacagataggtgcttttagtgaggggattaataatctgacccacatgcttaaagaggacgatatgtttaaggacttcgcagccagaagtccaagcgcttcaattaccgacgaagatagcaatgtatag

SEQ ID NO: 139646 - DNA, 3018 bp, Artificial Sequence
  derived and/or modified sequence
atgatgagcgacgccagcgacatgctggccgccgccctggagcagatggacggcatcatcgccggcagcaaggccctggagtacagcaacggcatcttcgactgccagagccccaccagccccttcatgggcagcctgagagccctgcacctggtggaggacctgagaggcctgctggagatgatggagaccgacgagaaggagggcctgagatgccagatccccgacagcaccgccgagaccctggtggagtggctgcagagccagatgaccaacggccacctgcccggcaacggcgacgtgtaccaggagagactggccagactggagaacgacaaggagagcctggtgctgcaggtgagcgtgctgaccgaccaggtggaggcccagggcgagaagatcagagacctggagttctgcctggaggagcacagagagaaggtgaacgccaccgaggagatgctgcagcaggagctgctgagcagaaccagcctggagacccagaagctggacctgatggccgagatcagcaacctgaagctgaagctgaccgccgtggagaaggacagactggactacgaggacaagttcagagacaccgagggcctgatccaggagatcaacgacctgagactgaaggtgagcgagatggacagcgagagactgcagtacgagaagaagctgaagagcaccaaggacgagctggccagcctgaaggagcagctggaggagaaggagagcgaggtgaagagactgcaggagaagctggtgtgcaagatgaagggcgagggcgtggagatcgtggacagagacgagaacttcaagaagaagctgaaggagaagaacatcgaggtgcagaagatgaagaaggccgtggagagcctgatggccgccaacgaggagaaggacagaaagatcgaggacctgagacagtgcctgaacagatacaagaagatgcaggacaccgtggtgctggcccagggcaagaagggcaaggacggcgagtacgaggagctgctgaacagcagcagcatcagcagcctgctggacgcccagggcttcagcgacctggagaagagccccagccccacccccgtgatgggcagccccagctgcgaccccttcaacaccagcgtgcccgaggagttccacaccaccatcctgcaggtgagcatccccagcctgctgcccgccaccgtgagcatggagaccagcgagaagagcaagctgacccccaagcccgagaccagcttcgaggagaacgacggcaacatcatcctgggcgccaccgtggacacccagctgtgcgacaagctgctgaccagcagcctgcagaagagcagcagcctgggcaacctgaagaaggagaccagcgacggcgagaaggagaccatccagaagaccagcgaggacagagcccccgccgagagcagacccttcggcaccctgccccccagaccccccggccaggacaccagcatggacgacaaccccttcggcaccagaaaggtgagaagcagcttcggcagaggcttcttcaagatcaagagcaacaagagaaccgccagcgcccccaacctggacagaaagagaagcgccagcgcccccaccctggccgagaccgagaaggagaccgccgagcacctggacctggccggcgccagcagcagacccaaggacagccagagaaacagccccttccagatccccccccccagccccgacagcaagaagaagagcagaggcatcatgaagctgttcggcaagctgagaagaagccagagcaccaccttcaaccccgacgacatgagcgagcccgagttcaagagaggcggcaccagagccaccgccggccccagactgggctggagcagagacctgggccagagcaacagcgacctggacatgcccttcgccaagtggaccaaggagcaggtgtgcaactggctgatggagcagggcctgggcagctacctgaacagcggcaagcactggatcgccagcggccagaccctgctgcaggccagccagcaggacctggagaaggagctgggcatcaagcacagcctgcacagaaagaagctgcagctggccctgcaggccctgggcagcgaggaggagaccaaccacggcaagctggacttcaactgggtgaccagatggctggacgacatcggcctgccccagtacaagacccagttcgacgagggcagagtggacggcagaatgctgcactacatgaccgtggacgacctgctgagcctgaaggtggtgagcgtgctgcaccacctgagcatcaagagagccatccaggtgctgagaatcaacaacttcgagcccaactgcctgagaagaagacccagcgacgagaacaccatcgcccccagcgaggtgcagaagtggaccaaccacagagtgatggagtggctgagaagcgtggacctggccgagtacgcccccaacctgagaggcagcggcgtgcacggcggcctgatggtgctggagcccagattcaacgtggagaccatggcccagctgctgaacatcccccccaacaagaccctgctgagaagacacctggccacccacttcaacctgctgatcggcgccgaggcccagcaccagaagagagacgccatggagctgcccgactacgtgctgctgaccgccaccgccaaggtgaagcccaagaagctggccttcagcaacttcggcaacctgagaaagaagaagcaggaggacggcgaggagtacgtgtgccccatggagctgggccaggccagcggcagcgccagcaagaagggcttcaagcccggcctggacatgagactgtacgaggaggacgacctggacagactggagcagatggaggacagcgagggcaccgtgagacagatcggcgccttcagcgagggcatcaacaacctgacccacatgctgaaggaggacgacatgttcaaggacttcgccgccagaagccccagcgccagcatcaccgacgaggacagcaacgtgtag

SEQ ID NO: 139647 - protein, 562 aa, Artificial Sequence
  derived and/or modified sequence
MADLANEEKPAIAPPVFVFQKDKGQKSPAEQKNLSDSGEEPRGEAEAPHHGTGHPESAGEHALEPPAPAGASASTPPPPAPEAQLPPFPRELAGRSAGGSSPEGGEDSDREDGNYCPPVKRERTSSLTQFPPSQSEERSSGFRLKPPTLIHGQAPSAGLPSQKPKEQQRSVLRPAVLQAPQPKALSQTVPSSGTNGVSLPADCTGAVPAASPDTAAWRSPSEAADEEKEPQKNESSNASEEEACEKKDPATQQAFVFGQNLRDRVKLINESVDEADMENAGHPSADTPTATNYFLQYISSSLENSTNSADASSNKFVFGQNMSERVLSPPKLNEVSSDANRENAAAESGSESSSQEATPEKESLAESAAAYTKATARKCLLEKVEVITGEEAESNVLQMQCKLFVFDKTSQSWVERGRGLLRLNDMASTDDGTLQSRLVMRTQGSLRLILNTKLWAQMQIDKASEKSIRITAMDTEDQGVKVFLISASSKDTGQLYAALHHRILALRSRVEQEQEAKMPAPEPGAAPSNEEDDSDDDDVLAPSGATAAGAGDEGDGQTTGST

SEQ ID NO: 139648 - DNA, 1689 bp, Artificial Sequence
  derived and/or modified sequence
atggcagatcttgcgaacgaagagaaaccagcaattgccccacctgtctttgtttttcagaaggacaaaggacagaaatctcctgcggagcagaaaaatctcagtgactctggagaggaaccccgaggcgaagcagaagcgcctcatcacggcactggacaccccgaaagcgcaggcgagcacgccctggagccaccagcccctgccggagcctccgcatctaccccccccccacccgctcccgaagcccagcttcccccctttccccgagagttggctggacgttccgcgggggggtcatcacccgaaggtggagaagatagcgacagggaagacggaaactactgcccccctgtgaaaagagagagaacatcctcactgacccagtttccccccagtcagtccgaggagaggtcgtccggattccgactgaaaccgcctacacttatccacggtcaggcaccttcagcaggcctgcccagccagaagcccaaggagcagcagcggtcagtgcttcggccagccgtattacaggcccctcagccgaaggccctctcacagactgttccgtcctccggcacgaacggggtgagtttgcctgccgactgcacaggggcagtacctgccgcaagtccagacacggccgcatggcggtccccttccgaggcagccgacgaggagaaagagcctcagaaaaacgagagttccaacgcctctgaggaagaagcttgcgaaaagaaggacccagccacccagcaagcatttgtgttcgggcaaaatttgcgggaccgagtgaagctaatcaatgaatctgttgatgaggccgatatggaaaacgctggccaccctagcgccgatacacccacggctactaactatttcctgcagtacattagtagcagtttagagaactctaccaattccgccgacgcttcatcaaataaatttgtttttgggcaaaacatgagcgaaagggtgttgtctccaccgaagctgaatgaggtaagttctgatgccaatagggaaaacgctgctgctgagtctggtagcgagtcttcctcacaggaagctacacccgagaaagagtccctggcagagtccgctgctgcctacacaaaagctaccgcccggaaatgtctacttgaaaaggtggaggtgatcactggtgaggaggcggaatcgaacgtcctacagatgcaatgcaagcttttcgtcttcgacaagacctcccagagctgggtggaaagagggaggggcttgctgaggctcaatgacatggcatctactgacgacggaacgctccaatccaggcttgttatgcgaactcagggatctctgcgccttatcttgaataccaagctgtgggcccagatgcaaatagataaagcttccgagaaatccatccgcataacagcaatggataccgaagatcagggcgtaaaagtgtttttgatatctgctagctcaaaagacactgggcagctatacgctgccttgcaccacagaattctcgcccttcgatctagagtggagcaggagcaggaagccaaaatgccagcgccagagcccggcgctgccccatcgaacgaagaggacgactcggatgacgacgatgtccttgccccatccggcgcaaccgctgccggggccggcgacgagggcgatggccaaactacgggcagcacatag

SEQ ID NO: 139649 - DNA, 1689 bp, Artificial Sequence
  derived and/or modified sequence
atggctgacctggccaatgaggagaagccagccatcgcccctcctgtgtttgtgttccagaaggacaagggccagaagagccctgctgagcagaagaacctgagtgacagcggggaggagcccagaggagaggccgaggccccccaccacggcaccggccaccctgagagcgctggggagcacgccctggagcccccagccccagctggggccagcgccagcaccccacctcctccagcccctgaggcccagctgccccccttcccccgggagctggccggccgctctgctgggggcagcagccctgagggcggggaggacagcgacagagaagatggcaactactgcccccctgtgaagcgggagaggaccagcagcctgacccagtttcctcccagccagagcgaggagaggagcagcggcttccggctgaagccacccaccctcatccacggccaggcccccagcgctggcctgcccagccagaagcccaaggagcagcagaggtctgtgctgcggcctgctgtgctgcaggccccccagcccaaggccctgagccagacagtgcccagcagcggcaccaatggagtgtccctgcctgctgactgcaccggggctgtgcctgctgccagcccagacacagctgcctggaggagccccagcgaggccgcagatgaggagaaggagccccagaagaatgaaagcagcaatgccagcgaggaggaggcctgtgagaagaaggaccctgccacccagcaggcctttgtgtttggccagaacctgcgggacagagtgaagctgatcaatgaatctgtggatgaagctgacatggagaatgccggccaccccagcgctgacacccccacagccaccaactacttcctgcagtacatcagcagcagcctggagaacagcaccaacagcgcagatgccagcagcaacaagtttgtgtttggccagaacatgtctgagcgggtgctgagcccccccaagctgaatgaggtgtccagtgatgccaaccgggagaatgctgctgctgagagcggcagcgagagcagcagccaggaggccaccccagagaaggagagcctggccgagagcgctgctgcctacaccaaggccacagccaggaagtgcctgctggagaaggtggaggtgatcaccggggaggaggccgagagcaatgtgctgcagatgcagtgcaagctgtttgtgtttgacaagaccagccagagctgggtggagcggggccggggcctgctgcggctgaatgacatggccagcacagatgatggcaccctgcagagccggctggtgatgaggacccagggcagcctgcggctcatcctgaacaccaagctgtgggcccagatgcagattgacaaggccagcgagaagagcatccgcatcacagccatggacacagaggaccagggcgtgaaggtgttcctgatcagcgccagcagcaaggacaccggccagctgtatgctgccctgcaccaccgcatcctggccctgcggagccgggtggagcaggagcaggaggccaagatgcctgcccctgagcctggagctgcccccagcaatgaagaagatgacagtgatgatgatgatgtgctggcccccagcggggccacagctgctggagctggagatgaaggagatggccagaccaccggcagcacctag

SEQ ID NO: 139650 - DNA, 1689 bp, Artificial Sequence
  derived and/or modified sequence
atggccgacctggccaacgaggagaagcccgccatcgccccccccgtcttcgtgttccagaaggataaagggcagaagagcccggccgaacagaagaacctgagtgatagcggcgaggaacctagaggagaagccgaggccccccaccatggaaccgggcaccctgaatcagccggcgaacacgccctggaaccacccgcgccagctggggcaagcgcttctactcctcccccgcccgctcccgaggcacagctcccaccttttcctagggagctggcagggaggtccgcaggcgggtcttctcccgagggcggagaagattcagacagggaggatggaaattattgccctccagtcaagagggaaaggacgtcctcactgactcagtttcctcccagccagagcgaggaaaggtccagtggctttagactgaagccacccaccctgatacacgggcaagctccttctgctggcctaccttctcaaaagccaaaggaacagcagagatccgtgcttaggccagcagtgcttcaggccccacagccgaaggcactatcccagaccgtcccatcctccgggacgaatggagtgtcactgccagctgactgtaccggtgctgttcctgcggcatcacctgacacggcagcgtggagatctcctagtgaggcagccgatgaggaaaaggagccacagaaaaatgaatcctccaacgcttctgaggaagaagcctgcgaaaaaaaggaccccgccacgcaacaggcatttgtctttggacaaaatcttagagaccgtgtgaagctgataaacgagtccgtcgatgaggcagacatggaaaacgccggccatccctcagccgacactcctaccgcgaccaactattttctgcagtacatatctagcagtctggaaaacagcactaattccgctgacgcctcctccaataagtttgtctttggccagaatatgagcgagcgagtcctttcccctccaaaactgaacgaagtttccagcgatgctaaccgtgaaaacgccgccgctgaatcgggctctgagtcgagctctcaagaagccacccctgagaaagaatcactggctgaaagtgccgccgcatatacaaaggctacagctcggaagtgcctgttggagaaagtggaggtcattacaggtgaggaggcggagagcaacgtactccaaatgcaatgtaagctgtttgtgttcgataagacgagtcagtcgtgggtggaacgcggacgcgggctgttgaggctcaatgacatggctagcaccgatgacggaaccctgcagagtaggctggtgatgagaactcagggttccctgcgactgatcttaaataccaaactgtgggcccaaatgcagatcgataaagcttccgagaaatctatccgcatcaccgcgatggatacggaggaccagggcgtaaaagtgttccttataagcgcaagctccaaagatactggtcagctttacgcagccctgcaccaccgcattcttgctctacgcagtcgtgtcgagcaggagcaagaggccaaaatgccagcgcccgaaccgggcgctgccccatctaatgaagaggatgatagtgatgacgatgacgtgttggcacctagtggagctacagccgcaggagctggagatgaaggggatgggcaaacaactggctccacgtag

SEQ ID NO: 139651 - DNA, 1689 bp, Artificial Sequence
  derived and/or modified sequence
atggctgacctggcgaatgaggaaaaacccgctatcgccccaccagtgtttgtctttcagaaggacaaaggccaaaagtccccagcagagcagaagaatctgagcgacagtggggaggaacctcgtggcgaagccgaggcacctcatcatggcactggccatcccgagtcggctggcgagcatgcgctggagccccctgcccctgcaggggcatcagcctccacaccccctccgccagcccctgaggcccagctcccccctttccccagagagctagccggtcggtcagcaggtggttcaagtcccgagggcggagaggattctgacagagaggacggaaactactgccccccagtaaaacgcgaaaggaccagtagtctgacccaatttcctccatctcagagcgaagagagaagcagcggattcagactgaagcccccaaccctgattcacggacaggccccttctgcaggattacccagccagaaacctaaagaacagcagaggtctgtgctgcgccctgctgtattgcaggcacctcaacctaaggctctgtctcaaactgtaccaagttccggcaccaatggcgtgtccctgccagcagactgcacaggagccgtgccagcagcctcacccgataccgctgcctggcgcagcccctccgaggcagccgacgaagaaaaagagcctcagaagaacgagtcttccaacgcttcagaggaggaagcttgcgagaaaaaggatcccgcaacccaacaggcctttgtgttcgggcagaacctgcgagatcgggtaaaactgatcaacgagagcgttgatgaagctgatatggagaatgctggacacccgtccgccgacacgccaactgccacaaattactttttgcagtatatctcatcgtcgctggagaactcaactaacagtgcggatgctagctctaacaagtttgtgtttggccagaacatgtcagaacgggtgctatcacctcctaagcttaacgaggtgtcatctgatgccaatcgcgagaatgccgctgccgaatctggctcagaatcatcctcccaagaagctacaccagaaaaagagtccttggcagaatccgcagcagcctacacgaaggccacagctagaaaatgcttgctggagaaggtagaggtcattactggagaggaggcagaatctaatgtgcttcagatgcagtgtaagctattcgtgtttgataagacgtcacagtcctgggttgaaagaggcaggggcctgctcaggctcaatgatatggcatcaacggacgatgggaccctgcagtcacgcctcgtgatgcggacccaaggatccctgcggttaatcctcaatacaaaactgtgggcacagatgcagattgacaaggcctcagagaagtcgatccgcatcacagcaatggacaccgaagaccagggagtgaaggtcttcctgatttcagcttccagtaaggataccgggcagctatatgccgcactgcaccacagaatcctagcgctgcggtctcgagtggagcaggaacaagaagctaaaatgcccgcacctgagcccggagcagcccctagtaacgaggaagatgactctgacgacgatgacgtgttggcacctagtggggctactgctgctggtgctggcgatgaaggcgacgggcagaccaccggtagcacatag

SEQ ID NO: 139652 - DNA, 3383 bp, Artificial Sequence
  derived and/or modified sequence
agatggctcgtgcgcaggtgcgtgctaggagcgcggctcgtcagggcaggctgctctgcagggcaggcgatccggggctcgcctccgcgcggcattcagcgcgcaggcgcgagctggccgcctcacacggagtcggcttgttaagtgcgcacgcgcgggagtttctggcagaaagcaggcgagcctgggccggcgcggggccttgtgggagggcttaaggaagtaaaatggcggacctggcgaacgaagaaaagcctgccattgctccgcccgtctttgtgtttcagaaggataaaggacaaaagtcccctgcagagcaaaaaaacttgtcggattcgggagaggagcctcggggggaggctgaggccccccaccatggcacgggtcaccccgagtcagctggcgagcatgccctagaacctcctgcccctgctggcgcctcagccagcactcctccgcctcccgctcctgaagcccagcttcctccttttccgcgagaactggcagggaggtcagctggcggctccagtcctgaaggcggagaagattctgacagagaagatggaaattactgccctcctgtcaagcgagaaagaacatcctctttaacccagttcccaccctcacagtcagaggaaaggagcagtggcttccggttgaagccaccaacgctgatccacggccaagcccccagcgcaggtctgccaagccagaagcccaaggagcagcagcggagcgtgcttcgcccggcagtgttacaagctccgcagccaaaggcgctgtcccagactgtccccagcagtggcaccaacggggtcagcctcccagcagactgcacgggggcagtgcccgcagcatcccctgacactgctgcatggagaagtccttccgaagctgccgatgaggagaaagagccccagaaaaatgagtccagcaatgcctctgaagaggaagcctgtgagaaaaaagaccccgccacacagcaagcctttgtatttgggcagaacttgagggacagagttaagctgataaatgagagcgtggacgaagccgacatggagaatgctggacaccccagcgcagacacgccaaccgcaacgaactatttcctccagtatatcagttccagtttagagaactcaaccaatagtgccgacgcctccagcaacaaatttgtatttggccagaacatgagcgagcgagttttgagccccccaaaattaaacgaggtcagttcagatgccaacagggaaaatgcagctgccgagtcagggtctgagtcctcgtcccaggaggccacccctgagaaagagtccctggctgagtcggcagccgcctacaccaaggcaacagcgcggaagtgtttgttggaaaaagtggaagtcatcaccggggaggaggcggagagcaatgtgttacagatgcagtgcaagctgtttgtctttgacaagacctcacagtcctgggtggagagaggccgggggctgctcagactcaatgacatggcgtccaccgatgacggcacactacagtcccgactagtgatgcggacccaggggagcctgcgactgatcctcaacaccaagctgtgggcccagatgcagatcgacaaggccagcgagaagagcattcgcatcacagccatggacaccgaggaccagggcgtgaaggtcttcctgatctcggccagctccaaggacacaggtcagttgtatgcagccctgcaccaccgcatcctggccctgcgcagccgcgtggagcaggagcaggaggccaagatgcccgcgcctgagcctggggcagccccatccaacgaggaggacgacagcgacgatgacgatgtcctggctccttcaggggccaccgcagctggtgctggtgacgaaggggacgggcagacgaccgggagcacatagcggccgggagcccggctgcacaccaggctgctgctttgtccgtctatccacccgcccacccgcccccaccccaccggcagcgtccaggtgcggggccgggaaccacacaccccactgggccggccacagtctggacccgcacgtcctgttcaaaagcagactcgggaactgcctgaatgtggtttgggacacgagacctcatcatattgatgagcgaacaaacaagaacatttcctccctcccctcctttgaattgaaatggcacattaagacttgtcacggcttctcactgggactggagacctcgttccttcaccccgcgtgtcgccagcctctgggtccagccagagcccctggcttctccgccacccacacccttcccaccctgctgtggggccctgcctttgtggggagcagccagccctctgcccctgcccagggctccccaactataggcctgggacccccgcccagcttggggggctgctcgtacgagtgtagacactgggcccattggacgtgctgttaactactatcttcatttcccacttcccctctctgattgggggtgtatattttacatctttttttctttttattttcgaaggctttgttttggtttcttaggttaagatgctctcgagcgttgagcaggcacagctctgtcgaggtccctgtcccccacctgtggttctggcctctgaggttgggggactacttgtttcccaccccaggttcctccaggccaagtcatggggtgatgaggagttggggccctgtctgtcctaggcctggagagtgcctgtctgggaaaaggtcactggacctggaagggtccccagggtcccctgactcccgtctccatctgtcacgtggttcaccatcatcaggcaccaggcgcaaactgcttcccgctgttggccatcccttccccagccacaggtgtccctgcccccaggacagtccagggccaggggcttctgtgagaggcagagggggaccctcaccaaatcttggtggaagagcccaggggctggtcccagaacaggcagtctcacaagcacgcagcacactggagtggacgcctgtgcccacccgagcctggagcatggccaagagccagcttgcaccacccacctgggaggccgaggaggaggtcccctgggcacagggcctctttgggacttcagaggaaatctcccagtcccactctcggagggttaagagaaggcctcctgcagctgtgccgtccacacctctaggtcgccagagccctggcccccagcccccagcaagcctgagcccgggaagaaccagaggccctcccgagagacccagtcacacgtctctgctttaagccttagccagctagtgacgagtacaacgagataacgcccatgtgttttggaacatttatgtaagattgtcatatgaaatgtatttgggaactacattaaacttttaact

SEQ ID NO: 139653 - DNA, 1689 bp, Artificial Sequence
  derived and/or modified sequence
atggccgacctggccaacgaggagaagcccgccatcgccccccccgtgttcgtgttccagaaggacaagggccagaagagccccgccgagcagaagaacctgagcgacagcggcgaggagcccagaggcgaggccgaggccccccaccacggcaccggccaccccgagagcgccggcgagcacgccctggagccccccgcccccgccggcgccagcgccagcaccccccccccccccgcccccgaggcccagctgccccccttccccagagagctggccggcagaagcgccggcggcagcagccccgagggcggcgaggacagcgacagagaggacggcaactactgcccccccgtgaagagagagagaaccagcagcctgacccagttcccccccagccagagcgaggagagaagcagcggcttcagactgaagccccccaccctgatccacggccaggcccccagcgccggcctgcccagccagaagcccaaggagcagcagagaagcgtgctgagacccgccgtgctgcaggccccccagcccaaggccctgagccagaccgtgcccagcagcggcaccaacggcgtgagcctgcccgccgactgcaccggcgccgtgcccgccgccagccccgacaccgccgcctggagaagccccagcgaggccgccgacgaggagaaggagccccagaagaacgagagcagcaacgccagcgaggaggaggcctgcgagaagaaggaccccgccacccagcaggccttcgtgttcggccagaacctgagagacagagtgaagctgatcaacgagagcgtggacgaggccgacatggagaacgccggccaccccagcgccgacacccccaccgccaccaactacttcctgcagtacatcagcagcagcctggagaacagcaccaacagcgccgacgccagcagcaacaagttcgtgttcggccagaacatgagcgagagagtgctgagcccccccaagctgaacgaggtgagcagcgacgccaacagagagaacgccgccgccgagagcggcagcgagagcagcagccaggaggccacccccgagaaggagagcctggccgagagcgccgccgcctacaccaaggccaccgccagaaagtgcctgctggagaaggtggaggtgatcaccggcgaggaggccgagagcaacgtgctgcagatgcagtgcaagctgttcgtgttcgacaagaccagccagagctgggtggagagaggcagaggcctgctgagactgaacgacatggccagcaccgacgacggcaccctgcagagcagactggtgatgagaacccagggcagcctgagactgatcctgaacaccaagctgtgggcccagatgcagatcgacaaggccagcgagaagagcatcagaatcaccgccatggacaccgaggaccagggcgtgaaggtgttcctgatcagcgccagcagcaaggacaccggccagctgtacgccgccctgcaccacagaatcctggccctgagaagcagagtggagcaggagcaggaggccaagatgcccgcccccgagcccggcgccgcccccagcaacgaggaggacgacagcgacgacgacgacgtgctggcccccagcggcgccaccgccgccggcgccggcgacgagggcgacggccagaccaccggcagcacctag

SEQ ID NO: 139654 - protein, 1257 aa, Artificial Sequence
  derived and/or modified sequence
MMCEVMPTINEDTPMSQRGSQSSGSDSDSHFEQLMVNMLDERDRLLDTLRETQESLSLAQQRLQDVIYDRDSLQRQLNSALPQDIESLTGGLAGSKGADPPEFAALTKELNACREQLLEKEEEISELKAERNNTRLLLEHLECLVSRHERSLRMTVVKRQAQSPSGVSSEVEVLKALKSLFEHHKALDEKVRERLRVSLERVSALEEELAAANQEIVALREQNVHIQRKMASSEGSTESEHLEGMEPGQKVHEKRLSNGSIDSTDETSQIVELQELLEKQNYEMAQMKERLAALSSRVGEVEQEAETARKDLIKTEEMNTKYQRDIREAMAQKEDMEERITTLEKRYLSAQRESTSIHDMNDKLENELANKEAILRQMEEKNRQLQERLELAEQKLQQTMRKAETLPEVEAELAQRIAALTKAEERHGNIEERMRHLEGQLEEKNQELQRARQREKMNEEHNKRLSDTVDRLLTESNERLQLHLKERMAALEEKNVLIQESETFRKNLEESLHDKERLAEEIEKLRSELDQLKMRTGSLIEPTIPRTHLDTSAELRYSVGSLVDSQSDYRTTKVIRRPRRGRMGVRRDEPKVKSLGDHEWNRTQQIGVLSSHPFESDTEMSDIDDDDRETIFSSMDLLSPSGHSDAQTLAMMLQEQLDAINKEIRLIQEEKESTELRAEEIENRVASVSLEGLNLARVHPGTSITASVTASSLASSSPPSGHSTPKLTPRSPAREMDRMGVMTLPSDLRKHRRKIAVVEEDGREDKATIKCETSPPPTPRALRMTHTLPSSYHNDARSSLSVSLEPESLGLGSANSSQDSLHKAPKKKGIKSSIGRLFGKKEKARLGQLRGFMETEAAAQESLGLGKLGTQAEKDRRLKKKHELLEEARRKGLPFAQWDGPTVVAWLELWLGMPAWYVAACRANVKSGAIMSALSDTEIQREIGISNPLHRLKLRLAIQEMVSLTSPSAPPTSRTPSGNVWVTHEEMENLAAPAKTKESEEGSWAQCPVFLQTLAYGDMNHEWIGNEWLPSLGLPQYRSYFMECLVDARMLDHLTKKDLRVHLKMVDSFHRTSLQYGIMCLKRLNYDRKELERRREASQHEIKDVLVWSNDRVIRWIQAIGLREYANNILESGVHGSLIALDENFDYSSLALLLQIPTQNTQARQILEREYNNLLALGTERRLDESDDKNFRRGSTWRRQFPPREVHGISMMPGSSETLPAGFRLTTTSGQSRKMTTDVASSRLQRLDNSTVRTYSC

SEQ ID NO: 139655 - DNA, 3774 bp, Artificial Sequence
  derived and/or modified sequence
atgatgtgcgaggtgatgcccaccatcaacgaggacacccccatgagccagagaggcagccagagcagcggcagcgacagcgacagccacttcgagcagctgatggtgaacatgctggacgagagagacagactgctggacaccctgagagagacccaggagagcctgagcctggcccagcagagactgcaggacgtgatctacgacagagacagcctgcagagacagctgaacagcgccctgccccaggacatcgagagcctgaccggcggcctggccggcagcaagggcgccgacccccccgagttcgccgccctgaccaaggagctgaacgcctgcagagagcagctgctggagaaggaggaggagatcagcgagctgaaggccgagagaaacaacaccagactgctgctggagcacctggagtgcctggtgagcagacacgagagaagcctgagaatgaccgtggtgaagagacaggcccagagccccagcggcgtgagcagcgaggtggaggtgctgaaggccctgaagagcctgttcgagcaccacaaggccctggacgagaaggtgagagagagactgagagtgagcctggagagagtgagcgccctggaggaggagctggccgccgccaaccaggagatcgtggccctgagagagcagaacgtgcacatccagagaaagatggccagcagcgagggcagcaccgagagcgagcacctggagggcatggagcccggccagaaggtgcacgagaagagactgagcaacggcagcatcgacagcaccgacgagaccagccagatcgtggagctgcaggagctgctggagaagcagaactacgagatggcccagatgaaggagagactggccgccctgagcagcagagtgggcgaggtggagcaggaggccgagaccgccagaaaggacctgatcaagaccgaggagatgaacaccaagtaccagagagacatcagagaggccatggcccagaaggaggacatggaggagagaatcaccaccctggagaagagatacctgagcgcccagagagagagcaccagcatccacgacatgaacgacaagctggagaacgagctggccaacaaggaggccatcctgagacagatggaggagaagaacagacagctgcaggagagactggagctggccgagcagaagctgcagcagaccatgagaaaggccgagaccctgcccgaggtggaggccgagctggcccagagaatcgccgccctgaccaaggccgaggagagacacggcaacatcgaggagagaatgagacacctggagggccagctggaggagaagaaccaggagctgcagagagccagacagagagagaagatgaacgaggagcacaacaagagactgagcgacaccgtggacagactgctgaccgagagcaacgagagactgcagctgcacctgaaggagagaatggccgccctggaggagaagaacgtgctgatccaggagagcgagaccttcagaaagaacctggaggagagcctgcacgacaaggagagactggccgaggagatcgagaagctgagaagcgagctggaccagctgaagatgagaaccggcagcctgatcgagcccaccatccccagaacccacctggacaccagcgccgagctgagatacagcgtgggcagcctggtggacagccagagcgactacagaaccaccaaggtgatcagaagacccagaagaggcagaatgggcgtgagaagagacgagcccaaggtgaagagcctgggcgaccacgagtggaacagaacccagcagatcggcgtgctgagcagccaccccttcgagagcgacaccgagatgagcgacatcgacgacgacgacagagagaccatcttcagcagcatggacctgctgagccccagcggccacagcgacgcccagaccctggccatgatgctgcaggagcagctggacgccatcaacaaggagatcagactgatccaggaggagaaggagagcaccgagctgagagccgaggagatcgagaacagagtggccagcgtgagcctggagggcctgaacctggccagagtgcaccccggcaccagcatcaccgccagcgtgaccgccagcagcctggccagcagcagcccccccagcggccacagcacccccaagctgacccccagaagccccgccagagagatggacagaatgggcgtgatgaccctgcccagcgacctgagaaagcacagaagaaagatcgccgtggtggaggaggacggcagagaggacaaggccaccatcaagtgcgagaccagccccccccccacccccagagccctgagaatgacccacaccctgcccagcagctaccacaacgacgccagaagcagcctgagcgtgagcctggagcccgagagcctgggcctgggcagcgccaacagcagccaggacagcctgcacaaggcccccaagaagaagggcatcaagagcagcatcggcagactgttcggcaagaaggagaaggccagactgggccagctgagaggcttcatggagaccgaggccgccgcccaggagagcctgggcctgggcaagctgggcacccaggccgagaaggacagaagactgaagaagaagcacgagctgctggaggaggccagaagaaagggcctgcccttcgcccagtgggacggccccaccgtggtggcctggctggagctgtggctgggcatgcccgcctggtacgtggccgcctgcagagccaacgtgaagagcggcgccatcatgagcgccctgagcgacaccgagatccagagagagatcggcatcagcaaccccctgcacagactgaagctgagactggccatccaggagatggtgagcctgaccagccccagcgccccccccaccagcagaacccccagcggcaacgtgtgggtgacccacgaggagatggagaacctggccgcccccgccaagaccaaggagagcgaggagggcagctgggcccagtgccccgtgttcctgcagaccctggcctacggcgacatgaaccacgagtggatcggcaacgagtggctgcccagcctgggcctgccccagtacagaagctacttcatggagtgcctggtggacgccagaatgctggaccacctgaccaagaaggacctgagagtgcacctgaagatggtggacagcttccacagaaccagcctgcagtacggcatcatgtgcctgaagagactgaactacgacagaaaggagctggagagaagaagagaggccagccagcacgagatcaaggacgtgctggtgtggagcaacgacagagtgatcagatggatccaggccatcggcctgagagagtacgccaacaacatcctggagagcggcgtgcacggcagcctgatcgccctggacgagaacttcgactacagcagcctggccctgctgctgcagatccccacccagaacacccaggccagacagatcctggagagagagtacaacaacctgctggccctgggcaccgagagaagactggacgagagcgacgacaagaacttcagaagaggcagcacctggagaagacagttcccccccagagaggtgcacggcatcagcatgatgcccggcagcagcgagaccctgcccgccggcttcagactgaccaccaccagcggccagagcagaaagatgaccaccgacgtggccagcagcagactgcagagactggacaacagcaccgtgagaacctacagctgctag

SEQ ID NO: 139656 - DNA, 3774 bp, Artificial Sequence
  derived and/or modified sequence
atgatgtgtgaggtgatgcctacaataaacgaggacaccccaatgagtcaaaggggatctcagtccagcggatcagactcagactcccacttcgagcagctcatggtcaacatgctggacgagcgagataggctcctggatacattgagagagactcaggagagcctgagcttggcccagcaaagactgcaagatgtcatctacgaccgggactctctgcaacgccagctgaattcagctctacctcaagatatcgaatcgcttacaggaggcttggcgggttctaagggcgccgatccacctgaatttgctgctctaacaaaggaactcaacgcttgcagggaacagctactcgaaaaggaagaagagatctctgagcttaaagccgaacggaacaatacaagactcctgctggagcatctggaatgcttggtcagtaggcacgagcgatccttgagaatgacggtggtgaagcgacaggcgcagagcccgtctggcgtttcgtccgaagtcgaagtgctgaaggcactgaaatccctgttcgaacaccataaggcattggacgaaaaggtgcgggaacgcctcagagttagcctggagagggtctctgcactcgaggaggagctggccgctgccaaccaggagatagtcgccctgagagaacagaacgtccatattcagaggaaaatggcttcatccgaaggttctaccgaaagcgagcatctggagggcatggagccagggcaaaaagtccacgaaaagcgcttgagcaacggctccatcgactcgacagatgaaaccagtcaaatcgtggagttacaagagctgctggagaaacagaattacgaaatggcccagatgaaggaacggctggctgctttaagctccagagtaggggaggtggagcaggaggcggagactgcccggaaagacctcataaaaacagaggaaatgaatactaagtatcagagagatatccgggaggccatggcccagaaggaagatatggaggagaggattaccacactagaaaaaaggtatttgtctgcgcagcgggaatctacaagtattcacgacatgaatgataaactggagaacgaactagcaaataaagaagccatactgcgccagatggaggaaaagaacagacagttgcaagaaaggctggagctagccgaacaaaagcttcagcagaccatgcggaaggcagagacgcttcccgaggttgaggccgagctcgcccagaggatagccgcgttaactaaagcagaagaacggcacggcaatattgaggaacggatgcggcacctggagggacagctcgaagaaaagaaccaagaattgcagcgagcacggcagcgggaaaagatgaatgaggagcacaataagcgactgtccgataccgtcgaccgtctacttacagaaagcaatgagagactgcagctgcatctgaaggaacgcatggcggccctggaggaaaaaaacgtgctaatccaggaaagcgagacatttcggaagaatctcgaagaaagtttgcacgacaaggaaagattggctgaggagatcgaaaaactgaggtctgaactggatcagctaaagatgcgaaccggctccctcattgaaccaaccataccacgcacacaccttgatacttccgccgaactccggtactccgtcggctctcttgttgacagtcagagtgattatcggacaacaaaagttatccgtaggccccgaaggggaagaatgggagtgcgtagggacgagcctaaggtgaagtctctgggggaccatgaatggaatcgtacacagcagattggcgttttatcctcccatccatttgagtccgacactgagatgtctgacattgacgacgacgaccgcgagactatcttttcctccatggacctgctcagcccatccgggcacagcgatgcacagactttagccatgatgctccaggagcagcttgatgccatcaacaaagagatccggttgattcaggaagagaaagaaagcaccgagctgagagccgaggaaatcgaaaacagagtggcaagtgtaagtctagaagggctgaatctggccagggtgcatccaggcacttccattacagctagcgtcacagcatcatcactggcaagctcctccccgccgagcggacatagcactccgaagctgaccccccggagccccgcacgggagatggacagaatgggcgtcatgacattgccgagcgatcttcgcaagcataggcgtaagattgcagtagtcgaggaagacgggagagaggacaaggccacaattaagtgcgaaacatcccctccccccacaccacgtgccctgaggatgacacacacactcccttcctcttaccacaacgatgcacgctcttccctgtccgtcagtctagaaccagagtccctaggacttgggtcagcaaattcctcccaggacagcctgcacaaggcccccaagaaaaaaggcatcaagtcctctatagggcgactctttggtaaaaaggaaaaggcacgattgggacagctgagaggatttatggagacggaagctgccgctcaggagagtctgggcctcggtaagctggggacccaggctgaaaaagatcgccgcctcaagaaaaaacacgaactccttgaggaggccagaaggaaaggtttaccgttcgcccagtgggacggacctacggttgttgcatggctggaactttggttgggtatgcccgcatggtacgtggcagcctgcagagcaaatgttaagagcggcgcaatcatgagcgctctgtcagacactgaaattcagcgggaaatcgggatctctaaccctcttcatcgacttaagctgcgtcttgcaattcaggaaatggtgagcctgacaagtccctctgcccccccaacaagtcggacccccagcggcaacgtgtgggtgactcatgaggagatggaaaatctcgctgcacctgcaaaaaccaaagagagtgaagagggatcatgggcccagtgcccggtcttcctgcagaccctggcctacggggatatgaaccacgaatggattggcaatgagtggctgccaagcctcgggctgccacagtaccggagttacttcatggagtgcctcgtcgatgcgcgaatgctggaccatttgacaaagaaggatttacgagtccatctaaagatggtggactcttttcacaggacctcccttcagtatgggattatgtgcttgaagcgtctgaactacgaccggaaggagctcgagagaaggcgcgaggcaagtcagcacgagattaaagacgtcctggtgtggagcaatgaccgagtaatccggtggatccaggctattggcctgcgcgaatacgcaaataacattctggagtcgggagtgcatggaagcctcatcgctctcgacgaaaacttcgattactctagtctggccctgctgctgcagataccaacccagaacactcaggcacgacaaattcttgagcgggagtacaacaacctgctggctctcgggacagagagaaggctggacgaaagcgacgataaaaatttccggaggggttcaacgtggcgaaggcaattcccaccgagggaggtgcatggaatctcaatgatgccagggtcatctgagaccctgcctgctgggttcagactgaccacaacctcaggacaatcccgtaagatgacaacagacgtggcgtccagccggttgcagaggctcgacaactccaccgtccggacttacagttgctag

SEQ ID NO: 139657 - DNA, 3774 bp, Artificial Sequence
  derived and/or modified sequence
atgatgtgtgaggtgatgcccaccatcaatgaagacacccccatgagccagaggggcagccagagcagcggcagtgacagcgacagccactttgagcagctgatggtgaacatgctggatgagcgggaccggctgctggacaccctgcgggagacccaggagagcctgagcctggcccagcagaggctgcaggatgtgatctatgaccgggacagcctgcagaggcagctgaacagcgccctgccccaggacatcgagagcctgactggaggcctggccggcagcaaaggagctgaccccccagagtttgctgccctgaccaaggagctgaatgcctgccgggagcagctgctggagaaggaggaggagatcagcgagctgaaggccgagaggaacaacacccggctgctgctggagcacctggagtgcctggtgtccagacatgagaggagcctgaggatgacagtggtgaagaggcaggcccagagccccagcggcgtgtcctctgaggtggaggtgctgaaggccctgaagagcctgtttgagcaccacaaggccctggatgagaaggtgcgggagcggctgcgggtgtccctggagcgggtgtctgccctggaggaggagctggccgccgccaaccaggagatcgtggccctgcgggagcagaatgtgcacatccagaggaagatggccagcagcgagggcagcacagaaagtgagcacctggagggcatggagcccggccagaaggtgcatgagaagaggctgagcaatggcagcattgacagcacagatgagaccagccagatcgtggagctgcaggagctgctggagaagcagaactatgagatggcccagatgaaggagcggctggccgccctgagcagccgggtgggggaggtggagcaggaggccgagacagccaggaaggacctgatcaagacagaggagatgaacaccaagtaccagagggacatccgggaggccatggcccagaaggaggacatggaggagcgcatcaccaccctggagaagcgctacctgagcgcccagcgggagagcaccagcatccatgacatgaatgacaagctggagaatgagctggccaacaaggaggccatcctgcggcagatggaggagaagaaccggcagctgcaggagcggctggagctggccgagcagaagctgcagcagaccatgaggaaggccgagaccctgcctgaggtggaggccgagctggcccagagaattgctgccctgaccaaggccgaggagagacatggcaacatcgaggagaggatgaggcacctggagggccagctggaggagaagaaccaggagctgcagagggcccggcagcgggagaagatgaatgaggagcacaacaagaggctgagtgacacagtggaccggctgctgacagagagcaatgaaaggctgcagctgcacctgaaggagaggatggccgccctggaggagaagaatgtgctgatccaggagagcgagaccttcaggaagaacctggaggagagcctgcatgacaaggagcggctggccgaggagattgagaagctgcggtctgagctggaccagctgaagatgaggacaggcagcctcatcgagcccaccatccccaggacccacctggacaccagcgctgagctgcgctacagcgtgggcagcctggtggacagccagagcgactaccgcaccaccaaggtgatccggcggccccggcggggccgcatgggcgtgagaagagatgagcccaaggtgaagagcctgggggaccacgagtggaacagaacccagcagatcggcgtgctgagcagccacccctttgaaagtgacacagagatgtctgacattgatgatgatgaccgggagaccatcttcagctccatggacctgctgagccccagcggccacagtgatgcccagaccctggccatgatgctgcaggagcagctggatgccatcaacaaggagatccgcctcatccaggaggagaaggagagcacagagctgcgggcagaggagattgagaacagagtggcctctgtgtccctggagggcctgaacctggcccgggtgcaccctggcaccagcatcacagcctctgtgacagccagcagcctggccagcagcagcccccccagcggccacagcacccccaagctgacccccaggagccctgcccgggagatggacaggatgggcgtgatgaccctgcccagcgacctgaggaagcacaggaggaagattgctgtggtggaggaggatggccgggaggacaaggccaccatcaagtgtgagaccagccccccacccaccccccgggccctgaggatgacccacaccctgcccagcagctaccacaatgatgcccggagcagcctgtctgtgtccctggagcctgagagcctgggcctgggcagcgccaacagcagccaggacagcctgcacaaggcccccaagaagaagggcatcaagagcagcatcggccgcctgtttgggaagaaggagaaggcccggctgggccagctgcggggcttcatggagacagaagctgctgcccaggagagcctgggcctgggcaagctgggcacccaggccgagaaggaccggcggctgaagaagaagcatgagctgctggaggaggcccggaggaagggcctgccctttgcccagtgggatggccccaccgtggtggcctggctggagctgtggctgggcatgcctgcctggtacgtggccgcctgccgggccaacgtgaagagcggggccatcatgtctgccctgagtgacacagagatccagcgggagatcggcatcagcaaccccctgcaccggctgaagctgcggctggccatccaggagatggtgtccctgaccagccccagcgccccacccaccagcaggaccccatctggaaatgtgtgggtgacccatgaggagatggagaacctggccgccccagccaagaccaaggagagcgaggagggctcctgggcccagtgccctgtgttcctgcagaccctggcctacggggacatgaaccacgagtggattggaaatgagtggctgcccagcctgggcctgccccagtaccgcagctacttcatggagtgcctggtggatgccaggatgctggaccacctgaccaagaaggacctgcgggtgcacctgaagatggtggacagcttccacaggaccagcctgcagtatggcatcatgtgcctgaagaggctgaactatgacaggaaggagctggagcggcggcgggaggccagccagcacgagatcaaggatgtgctggtgtggagcaatgacagagtcatccgctggatccaggccatcggcctgcgggagtatgccaacaacatcctggagagcggcgtgcacggcagcctgattgccctggatgaaaattttgactacagcagcctggccctgctgctgcagatccccacccagaacacccaggcccggcagatcctggagcgggagtacaacaacctgctggccctgggcacagaaagaaggctggatgaaagtgatgacaagaacttccggcggggcagcacctggaggcggcagttccccccccgggaggtgcacggcatctccatgatgcctggcagcagcgagaccctgcctgctggcttccggctgaccaccaccagcggccagagcaggaagatgaccacagatgtggccagcagccggctgcagaggctggacaacagcacagtgaggacctacagctgctag

SEQ ID NO: 139658 - DNA, 3774 bp, Artificial Sequence
  derived and/or modified sequence
atgatgtgcgaggtgatgcccaccatcaacgaggacacccccatgtcacagagagggtcccagtcgtctggctccgattccgactcccactttgagcagctgatggtgaatatgctggatgagcgtgaccgactgctggacactctgagggagacgcaggagagcttgagtctggcacagcagagactgcaggacgtaatctatgacagggacagtttgcaacgacaactgaattccgcgctcccccaagatatcgaaagtctcactggcggccttgctggttcgaaaggtgccgacccgcccgaatttgccgctctgacgaaagagcttaacgcgtgtcgcgagcagttgctggaaaaagaggaggaaatctcagaattgaaggccgagagaaataacacgcggctgttgctggaacacctggaatgcttagttagccgtcacgagcgctctcttcgaatgactgtggtgaagcggcaggcccagagcccatctggcgtctcctcagaagtagaggtgctgaaggcgttgaaatcactgtttgaacaccacaaggcccttgatgagaaagtacgggaacgactccgcgtatccctggagcgcgtctctgccctggaagaagagctggccgcagcaaaccaggagatagtcgctctgcgtgagcagaacgtgcatatccagcgaaaaatggcatccagcgagggttctactgaaagcgagcacctggaggggatggagccgggacagaaagtgcacgaaaaaaggctctccaatggttccattgactccacggacgaaacatctcagatcgtggaactgcaggagttgctggaaaaacagaattacgagatggcacagatgaaggaaaggttagctgcgttgtcaagccgtgtgggcgaggtggagcaagaggctgaaactgcgcgcaaagatttgatcaaaacagaggagatgaatacaaaatatcagagggatattcgtgaagccatggcccaaaaggaggacatggaggaacggataactaccctcgagaaaagatacctgtccgcacaacgcgagagcaccagcatccacgatatgaacgataaacttgagaacgaactggccaataaagaggcaattctcagacagatggaagagaagaatcggcagctgcaggaaaggttggaactagctgagcaaaaactgcagcagacgatgaggaaagccgaaaccctcccagaagtggaggctgagctagcccagagaatcgctgcactgaccaaggccgaagaacgccacggcaatatagaggagcgcatgaggcatttagaggggcagttggaagaaaagaaccaggagctgcaacgggcccggcagagagaaaagatgaatgaagaacacaataagcggctgagcgacacagttgacaggttacttacagagagtaatgagcggctccagcttcaccttaaggaacgtatggccgctctcgaggagaagaacgtgctcatccaggagagtgagacctttcgaaaaaacctagaagagtccttgcatgacaaagagaggctggcagaggagattgaaaagctgcggtcagagcttgatcagctcaagatgcggaccggatccctcattgaaccaactataccacggacgcatctcgatacctcggctgaacttcgctattccgtgggcagtctggtggattcacagtctgattacagaacgacaaaagtgatccgtcgtccgcgtcgcggaaggatgggagtacggcgcgacgagccgaaagtgaaaagcctgggtgaccatgagtggaaccgcacgcagcaaatcggtgtgctgtcctctcacccctttgagtccgatacggagatgtcagacattgatgatgatgatagggaaacgatcttttctagcatggatctgctttcgccatccggtcacagcgacgctcagaccctagccatgatgctccaggaacaactggatgcaatcaacaaagagatccgactgattcaggaggagaaggagtctactgaactgagggctgaggaaattgagaacagggtcgcaagcgtgagtttggaaggcctgaacttggcccgagttcaccccgggactagtataaccgccagtgtgactgccagtagtctggcatccagttctccgcctagtggtcatagtaccccaaagcttactccaagaagcccggcaagggaaatggaccgtatgggagtgatgacactgccgtctgacctgcggaaacatagacggaagattgcagttgtcgaggaggacggccgagaagacaaagccaccattaaatgcgagactagcccgccaccaacaccccgggcactgagaatgactcataccctcccgagcagctatcacaatgacgcccggtctagcctcagcgtgtctctggagcccgaatccctcggcctggggtctgccaacagtagccaagacagtctccacaaggcacccaaaaagaaagggatcaagtcatccatcggccgtcttttcggtaaaaaagagaaggctcgacttggccaacttcgcgggtttatggaaaccgaggctgcagcacaggagagcctgggtctgggaaagttaggaacacaagctgagaaagatagacgattaaagaagaagcatgagctattggaggaagctaggcgaaaggggctgccctttgcacagtgggatgggccaaccgtggtggcttggttggaactgtggcttggaatgcccgcttggtacgtggccgcctgtcgtgcgaatgtcaagagcggcgcaattatgtcggcactcagcgacactgaaattcagagggagattgggatttcgaatcccttgcaccgcttgaagctgagactggctatccaggagatggtttctttgacgtctccttcagccccacctacttcacgcaccccatcaggaaatgtctgggtaacacatgaagaaatggagaaccttgccgcgccagccaagactaaagagagtgaggagggctcttgggctcaatgtcccgtgttcttgcaaaccctggcgtatggagacatgaatcacgagtggatcggcaatgagtggctgcccagcctgggactgcctcagtaccgaagttattttatggagtgccttgtcgacgcccggatgttagaccatcttaccaaaaaagacctgagagtgcacctgaaaatggtggatagttttcataggacaagtttgcaatatggtatcatgtgtctgaagcggctgaactacgatcgcaaagaacttgagcgcaggcgcgaggccagccagcacgagatcaaggatgtgctcgtttggtccaatgatagagtaattcgctggattcaggccatcggcctgcgggaatacgctaacaacatcctcgaatcgggcgtccatggttccttgattgcgttagacgaaaacttcgactactcttcactggccctgctactgcagatcccgacccagaatacccaggcccggcagatactggaaagagagtataataaccttctcgctctgggtaccgaaaggcggctggacgagtctgacgacaagaatttcagaagaggatccacatggcggcgccaattccctccaagagaggtccatggaattagcatgatgccagggtcatcagagaccctgcccgccggcttccgcctgaccactactagcggccagagtcggaagatgaccacagacgtcgcctcgtctcgtttacaaaggttagacaattcaaccgtgcgtacatacagttgttag

SEQ ID NO: 139659 - DNA, 5363 bp, Artificial Sequence
  derived and/or modified sequence
gaggcaagtgaggagagaagatgctgtagcgtcctcaccggctgccagcagggaaatggtccaggagtgctgggtgtgagcctcccttctcctcaagccggagactgcggttgtcattgatcaattgaagaagcaaggacccgaaatcacagacattagcaatgatgtgtgaagtgatgcccacgattaatgaggacaccccaatgagccaaagggggtcccaaagcagtggctcggactcagactcccattttgagcagctgatggtgaatatgctagatgaaagggatcgtcttctagacacccttcgggagacccaggaaagcctctcacttgcccagcaaagacttcaggatgtcatctatgaccgagactcactccagagacagctcaattcagccctgccacaggatatcgaatccctaacaggagggctggctggttctaagggggctgatccaccggaatttgctgcactgacaaaagaattaaatgcctgcagggaacaacttctagaaaaggaagaagaaatctctgaacttaaagctgaaagaaacaacacaagactattactggagcatttggagtgccttgtgtcacgacatgaaagatcactaagaatgacggtggtaaaacggcaagcccagtctccctcaggagtatccagtgaagttgaagttctcaaggcactgaaatctttgtttgagcaccacaaggccttggatgaaaaggtaagggagcgactgagggtttctttagaaagagtctctgcactggaagaagaactagctgctgctaatcaggagattgttgccttgcgtgaacaaaatgttcatatacaaagaaaaatggcatcaagcgagggatccacagagtcagaacatcttgaagggatggaacctggacagaaagtccatgagaagcgtttgtccaatggttctatagactcaaccgatgaaactagtcaaatagttgaactacaagaattgcttgaaaagcaaaactatgaaatggcccagatgaaagaacgtttagcagccctttcttcccgagtgggagaggtggaacaggaagcagagacagcaagaaaggatctcattaaaacagaagaaatgaacaccaagtatcaaagggacattagggaggccatggcacaaaaggaagatatggaagaaagaattacaacccttgaaaagcgttacctcagtgctcagagagaatctacctccatacatgacatgaatgataaactagaaaatgagttagcaaataaagaagctatcctgcggcagatggaagagaaaaacagacagttacaagaacgtcttgagctagctgaacaaaagttgcagcagaccatgagaaaggctgaaaccttgcctgaagtagaggctgaactggctcagagaattgcagccctaaccaaggctgaagagagacatggaaatattgaagaacgtatgagacatttagagggtcaacttgaagagaagaatcaagaacttcaaagagctaggcaaagagagaaaatgaatgaggagcataacaagagattatcggatacggttgatagacttctgactgaatccaatgaacgcctacaactacacttaaaggaaagaatggctgctctagaagaaaagaatgttttaattcaagaatcagaaactttcagaaagaatcttgaagaatctttacatgataaggaaagattagcagaagaaattgaaaagctgagatctgaacttgaccaattgaaaatgagaactggctctttaattgaacccacaataccaagaactcatctagacacctcagctgagttgcggtactcagtgggatccctagtggacagccagtctgattacagaacaactaaagtaataagaagaccaaggagaggccgcatgggtgtgcgaagagatgagccaaaggtgaaatctcttggggatcacgagtggaatagaactcaacagattggagtactaagcagccacccttttgaaagtgacactgaaatgtctgatattgatgatgatgacagagaaacaatttttagctcaatggatcttctctctccaagtggtcattccgatgcccagacgctagccatgatgcttcaggaacaattggatgccatcaacaaagaaatcaggctaattcaggaagaaaaagaatctacagagttgcgtgctgaagaaattgaaaatagagtggctagtgtgagcctcgaaggcctgaatttggcaagggtccacccaggtacctccattactgcctctgttacagcttcatcgctggccagttcatctccccccagtggacactcaactccaaagctcacccctcgaagccctgccagggaaatggatcggatgggagtcatgacactgccaagtgatctgaggaaacatcggagaaagattgcagttgtggaagaagatggtcgagaggacaaagcaacaattaaatgtgaaacttctcctcctcctacccctagagccctcagaatgactcacactctcccttcttcctaccacaatgatgctcgaagtagtttatctgtctctcttgagccagaaagcctcgggcttggtagtgccaacagcagccaagactctcttcacaaagcccccaagaagaaaggaatcaagtcttcaataggacgtttgtttggtaaaaaagaaaaagctcgacttgggcagctccgaggctttatggagactgaagctgcagctcaggagtccctggggttaggcaaactcggaactcaagctgagaaggatcgaagactaaagaaaaagcatgaacttcttgaagaagctcggagaaagggattaccttttgcccagtgggatgggccaactgtggtcgcatggctagagctttggttgggaatgcctgcgtggtacgtggcagcctgccgagccaacgtgaagagtggtgccatcatgtctgctttatctgacactgagatccagagagaaattggaatcagcaatccactgcatcgcttaaaacttcgattagcaatccaggagatggtttccctaacaagtccttcagctcctccaacatctcgaactccttcaggcaacgtttgggtgactcatgaagaaatggaaaatcttgcagctccagcaaaaacgaaagaatctgaggaaggaagctgggcccagtgtccggtttttctacagaccctggcttatggagatatgaatcatgagtggattggaaatgaatggcttcccagcttggggttacctcagtacagaagttactttatggaatgcttggtagatgcaagaatgttagatcacctaacaaaaaaagatctccgtgtccatttaaaaatggtggatagtttccatcgaacaagtttacaatatggaattatgtgcttaaagaggttgaattatgacagaaaagaactagaaagaagacgggaagcaagccaacatgaaataaaagacgtgttggtgtggagcaatgaccgagttattcgctggatacaagcaattggacttcgagaatatgcaaataatatacttgagagcggtgtgcatggctcacttatagccctggatgaaaactttgactacagcagcttagctttattattacagattccaacacagaacacccaggcaaggcagattcttgaaagagaatacaataacctcttggccctgggaactgaaaggcgactggatgaaagtgatgacaagaacttcagacgtggatcaacctggagaaggcagtttcctcctcgtgaagtacatggaatcagcatgatgcctgggtcctcagaaacattaccagctggatttaggttaaccacaacctctgggcagtcaagaaaaatgacaacagatgttgcttcatcaagactgcagaggttagacaactccactgttcgcacatactcatgttgaccagccactcaaaggaggcagcactgacctgctatggcgtcttttcagtctactctacctaaagtgcactaccatctaagaagacgagcagtgaaaacctttgtgaaaactgaattctaaggaaataatgacgtcatgacttattaaaagctgaaaaatgtgatttttggggggagtcagatattacatttgattagtttactacaaattgtaataaaatgcttaagtcatttgaataataaacatcatctacatcataaactctgtacaacagatgcttttatgaaatgaagccagttgtttttcatgttttattgtaatatactaggcatttatgtattaccgtgcatttctttttaaatgtgtaagtcttatgtaaatggatataaatatgattttttaaaaaataaaatatatggttcatggagtctcgagtgcaaacatttgacaattccaagtactgtttgtattttaccattccaccatttttacagtttttggattgttaatagtcaaatcaatatgtttccttgaagcatgtttcatgcttcaacgtgtttctccttcaagtctgtcaatacttaaagctgaacaacctgcctctgatcatgtaaaaaagaatgatttaacctggaaccggagccaaaaatagagctttaaaggcaatcagggatgtcctatatctttagaaatagcactgtgatggcttgatctccttttcaatacaaaacaaagccaagctgtttacaagggtcaaaagcaattatttaaaaatttatattaaaaaaccataatcttctcttgttacctgtggaccaagaaaaaaaaaaagataaaaaaacttctttactaagaaccacatgttcattcaaatatcttgaaatgccagccagtactggacagtgaatgtcaaccaccgcagagtctgaggctcatttccactagagaaaacgaaacccaagatacctttcccttttgtcaatgtaacagggcattagccagactcatgtctaatgttataagcttttagccgagatggccttgttgcgacttccctgaagtcagttttatcagaggaaataaatgaaagacagaatgattaacatatatagtgtataaaagtatagaagagtaatctcttccctgtggctttatttggtggtgttactgttgtttattctttgtttatatgggagattcaaagtaaagcctatttaataataccatttatctaactgctgattttctgctgcttgatcttattaagcgcaagacctgtcattagtaatttcttttctgtattttaatttgctatgtttgcacgtacattacatttgttttgatgtctatttttatttaacagattcagtcaaaaggtaatgataacagaaaccctttccattgtcaataaaaaaaataataattcca

SEQ ID NO: 139660 - DNA, 3774 bp, Artificial Sequence
  derived and/or modified sequence
atgatgtgtgaggtaatgcctaccattaatgaggatactcctatgtcccagcggggatcccagtccagcgggagcgattctgacagtcattttgagcaactgatggttaatatgctcgacgaaagggatcggctgcttgatacgcttcgcgaaacccaggagagcctgagcctggctcagcagcggcttcaggatgtgatctacgacagggactctctgcagagacagctgaactctgcgttaccacaggacattgaatccctgaccggcggtctcgccggtagtaaaggcgctgatcctccagagttcgcggctttgacaaaggaactgaatgcttgccgtgaacagctgctcgagaaagaggaggagattagcgaactgaaagccgaacgtaataatacccgcctgctgctagagcacctcgagtgtctcgtatctaggcatgagcggtccctgaggatgactgttgtgaagaggcaggcacagagccctagtggcgtttcatctgaggttgaagtgctgaaagccctgaagtctctgtttgagcatcacaaagcattagacgaaaaggtgcgggagagactgcgcgtcagccttgaaagggtgtccgctctcgaagaagagctagctgcggcaaaccaagagatcgtagcactgcgcgaacagaacgtgcacattcagcgcaaaatggcttcaagcgaaggtagtaccgagtcggaacacctggaaggtatggaacccggtcagaaggtccatgagaaacggctaagtaacggatctatcgattcaactgatgagacatcccagattgttgaactacaggagctgctagaaaaacagaactacgaaatggcccagatgaaagagaggctagcagctttatcatcccgtgtcggcgaagtggagcaagaagccgagactgctcgtaaagacctgatcaagaccgaagaaatgaacaccaagtatcaaagggacattcgcgaagcgatggcccaaaaggaggatatggaggagcgaatcacaaccctcgaaaagcggtatcttagcgcacagcgggagagtacttcaatccacgacatgaacgacaaactggaaaatgaactggccaataaggaagccattctgcgccagatggaagaaaagaaccgtcagttacaggagcgcttagaacttgccgaacagaagcttcagcagacaatgcgcaaagcagagacgttaccagaagttgaggccgagctggctcagagaattgctgctctcactaaggccgaggagaggcacggtaacatcgaggaaagaatgcggcacctggagggccagctggaagagaaaaaccaggagctccagagggcacgccagagggagaagatgaacgaagaacataataaacgacttagtgacacggtagaccggctgctgaccgagagcaatgagcgactgcagctgcacctgaaggaaaggatggccgcactggaagaaaagaacgtattgattcaggagagtgaaacctttaggaagaacctagaggagagcctgcacgataaggagaggctggccgaggagattgaaaagctgaggagcgaactagatcagctcaagatgcggactggttccctgatcgagcccaccatcccgcgaacccatctcgacacaagtgctgaattgagatatagcgttgggtccttggtggattcccagagcgactaccgaaccaccaaagtgattcgtcggccacgacggggacgtatgggcgtaagaagagatgagcccaaagtaaaaagcctgggagaccacgagtggaatagaactcagcaaattggggtgctgtccagccaccctttcgagtccgataccgaaatgtccgacattgatgatgacgatcgcgaaacgatttttagttctatggatctgctgagtccatctggacactccgacgcccagactttggcaatgatgttgcaggaacagctcgacgcaattaataaggaaatcaggttgatccaggaagagaaagaaagtactgagctgcgggcagaagaaatcgagaatagggtggcatccgtgtcccttgaaggtttgaacttggcgagggttcacccaggaaccagcattaccgcttctgtaactgcgtctagcctcgcgagctctagtcctcctagtgggcatagtacacccaaactgactcctcgctcccctgcacgcgaaatggacagaatgggggttatgactctgccttccgatctgagaaagcaccggagaaaaatcgccgttgtggaagaggacggacgagaggataaagctaccataaaatgcgagacgtcccctcccccaacacccagagcgctaagaatgacgcatacacttccctcctcctatcacaacgacgcacgcagcagcctgtccgtcagtcttgagcctgaatccttgggcttgggcagcgctaattccagtcaggattctctgcacaaagccccaaagaaaaaggggatcaaatcttcgattggcaggctcttcggcaagaaagaaaaggcccgacttggccagctccgtggatttatggagaccgaggccgcagcccaggaatcccttgggttgggcaaactgggaactcaagctgaaaaagacaggcgcctgaagaagaaacacgaattgttggaagaggcccgacggaaaggcctcccattcgcgcagtgggacggccctactgtggtggcctggttggaactctggctcggtatgcccgcatggtacgtagcagcttgccgggcaaatgttaaaagtggcgctatcatgtctgcattatcggatacagaaattcagcgtgaaattggtatttctaatccactgcaccgattgaagttgagactggcaatacaagaaatggtctctctcacaagtccctccgccccaccaacatccaggacacctagcggaaacgtgtgggtgacgcacgaggaaatggaaaacctggctgctcctgccaaaaccaaggagtctgaggaaggtagctgggctcagtgccccgttttcctgcaaacgctggcctatggcgacatgaatcacgagtggatcggcaatgaatggctcccatcattagggctgccccaataccgaagttacttcatggagtgcctggtcgatgcacgaatgctggaccatctgaccaaaaaagatctcagggtgcacctgaaaatggtagacagtttccaccgcacatcactccagtacggcatcatgtgccttaagcgtctcaactatgatcggaaagaactcgagagaagaagagaggcatctcaacatgaaatcaaggatgtactcgtctggagcaatgacagagtgatcagatggattcaggccataggcctgagggaatacgctaataatattctggaatcaggagttcatgggtccctgatagcccttgatgaaaattttgactacagttctctggcgctgctgttgcagatccccacgcagaatacgcaggccagacaaatcctcgaaagggaatacaacaatttattggcccttggaacagaacgcagattggacgaaagtgacgacaagaacttccgcagaggttcaacttggcgcagacagttccctccaagggaagtacacgggatctctatgatgccagggtcgtcagagaccctgcctgccggatttcgacttaccacaaccagcggtcagtcacgaaaaatgaccacagatgtcgcctctagtcgcctgcagcgcttggacaactctactgttaggacctacagctgttag

SEQ ID NO: 139661 - protein, 1202 aa, Artificial Sequence
  derived and/or modified sequence
MMCEVMPTISEAEGPPGGGGGHGSGSPSQPDADSHFEQLMVSMLEERDRLLDTLRETQETLALTQGKLHEVGHERDSLQRQLNTALPQEFAALTKELNVCREQLLEREEEIAELKAERNNTRLLLEHLECLVSRHERSLRMTVVKRQAQSPAGVSSEVEVLKALKSLFEHHKALDEKVRERLRVALERCSLLEEELGATHKELMILKEQNNQKKTLTDGVLDINHEQENTPSTSGKRSSDGSLSHEEDLAKVIELQEIISKQSREQSQMKERLASLSSHVTELEEDLDTARKDLIKSEEMNTKLQRDVREAMAQKEDMEERITTLEKRYLAAQREATSVHDLNDKLENEIANKDSMHRQTEDKNRQLQERLELAEQKLQQTLRKAETLPEVEAELAQRVAALSKAEERHGNIEERLRQMEAQLEEKNQELQRARQREKMNEEHNKRLSDTVDKLLSESNERLQLHLKERMAALEDKNSLLREVESAKKQLEETQHDKDQLVLNIEALRAELDHMRLRGASLHHGRPHLGSVPDFRFPMADGHTDSYSTSAVLRRPQKGRLAALRDEPSKVQTLNEQDWERAQQASVLANVAQAFESDADVSDGEDDRDTLLSSVDLLSPSGQADAHTLAMMLQEQLDAINKEIRLIQEEKENTEQRAEEIESRVGSGSLDNLGRFRSMSSIPPYPASSLASSSPPGSGRSTPRRIPHSPAREVDRLGVMTLLPPSREEVRDDKTTIKCETSPPSSPRALRLDRLHKGALHTVSHEDIRDIRNSTGSQDGPVSNPSSSNSSQDSLHKAPKKKGIKSSIGRLFGKKEKGRPGQTGKEALGQAGVSETDNSSQDALGLSKLGGQAEKNRKLQKKHELLEEARRQGLPFAQWDGPTVVVWLELWVGMPAWYVAACRANVKSGAIMSALSDTEIQREIGISNPLHRLKLRLAIQEIMSLTSPSAPPTSRTTLAYGDMNHEWIGNEWLPSLGLPQYRSYFMECLVDARMLDHLTKKDLRGQLKMVDSFHRNSFQCGIMCLRRLNYDRKELERKREESQSEIKDVLVWSNDRVIRWILSIGLKEYANNLIESGVHGALLALDETFDFSALALLLQIPTQNTQARAVLEREFNNLLVMGTDRRFDEDDDKSFRRAPSWRKKFRPKDIRGLAAGSAETLPANFRVTSSMSSPSMQPKKMQMDGNVSGTQRLDSATVRTYSC

SEQ ID NO: 139662 - DNA, 3609 bp, Artificial Sequence
  derived and/or modified sequence
atgatgtgcgaagtgatgcctactatctccgaagcagagggtccacctggagggggaggcgggcatggatccggttctccctcacaacccgatgctgattcccactttgaacagctcatggtgtctatgctggaagaacgtgatcgacttctcgatacactccgggaaacacaggaaacgttggccctaacacagggcaagcttcatgaagtcgggcatgaaagggattcccttcagagacagctaaataccgcattaccgcaggaatttgctgcccttactaaggagctgaatgtttgccgggagcaactgctggaaagggaggaggaaattgcagaactgaaagcagaacgcaacaacacaaggctccttcttgagcatttggagtgcctcgtgagccgccatgagagatcactccgaatgacagtcgttaagcgccaggcccagtcccctgccggtgtaagttcagaggtggaagtgcttaaggcattgaaatccctgttcgagcaccacaaggctctggatgagaaagtgagggagcggctgcgcgtggctctagaaaggtgctctctgctggaggaagaattgggggccacacataaggagctgatgattttgaaagagcagaataatcagaaaaagacactcaccgacggtgtcctagacatcaatcacgagcaggaaaacactccatcaacgagtgggaagagatcgtctgacggatctctcagccacgaagaggacttggccaaggtcatcgaactgcaggagattatatctaaacagtcgagggagcagtcccaaatgaaagagcgccttgcttctttgtcaagtcacgtgacagagttagaggaagatctggatactgccagaaaagatctaatcaaatctgaagagatgaatactaagctccagagagacgtacgcgaagctatggcccaaaaggaagatatggaggagcgcatcacaacgctggagaaaaggtacctggccgctcagcgcgaagctacctctgtgcatgacttaaacgataaactagaaaacgaaattgcaaataaggactcaatgcacaggcaaaccgaggataaaaacaggcaacttcaagagcgcctggagctggccgaacaaaaattacagcagacccttcgcaaggccgagacactccctgaggtcgaagccgagttagctcaacgcgttgccgcgttgtccaaggccgaggaaaggcacggtaatatcgaggagcgtttacgccagatggaggcacagctcgaggaaaagaaccaagaactccagagagcgagacagagggagaagatgaacgaggagcacaacaagagactgtcagacaccgttgacaaactcctaagcgaatccaacgagcgactgcagctgcaccttaaggaaaggatggctgctctcgaagataagaactccctgttgcgcgaagtggagtcagctaagaaacagttggaggaaacccagcacgataaggaccaactggttctaaacatcgaagcccttcgggcagagttggatcatatgcgcttgagaggcgcgagcctccaccacgggaggcctcatctcggttcggtgccggactttcggtttcccatggcagatggtcacacagactcctatagcacgtctgcagtcctgagacgacctcagaaaggtagactcgccgccctgagggacgaacctagcaaggttcagacccttaacgagcaggattgggagagagcacagcaggcctcagtgctggccaacgtggctcaggcttttgagtctgacgccgacgttagtgatggagaagatgatagagataccctgttgagtagtgtggaccttctttcaccctcgggccaggccgacgctcacacattggctatgatgctgcaggaacaacttgatgccataaataaggagattcgcctgatccaagaggagaaagagaacactgagcagcgggcagaggagatcgaatctagggtaggcagcggttcgctagacaacctgggcaggttcaggagcatgagttccataccaccatacccggccagctccctcgcgtcctcctctcccccgggcagcggacgctctactcccaggcgcatcccacactcacctgcgcgcgaggttgaccggttaggtgtcatgacactacttcctccatctagggaggaggtccgcgatgacaaaacaacaattaaatgtgagactagccccccgagtagcccacgtgcactgcggctggacagactgcacaagggagcactgcatacagtgtctcatgaagacattcgagacatccggaattcaaccggctcgcaagacggccccgtcagtaatccatcctcctcaaatagctcacaggactcgctccacaaagcccctaagaaaaaaggcatcaagtcctccatcggtagactgttcggcaagaaagaaaagggacgaccaggccagaccgggaaggaggccttaggccaagcgggcgtgagcgagacagacaactcaagccaggacgcactgggcctctctaagctgggcggccaggccgaaaaaaatcggaagctacagaagaagcacgagctgctggaggaggcccgcaggcagggccttccgtttgctcagtgggatgggccaacggtcgtggtgtggctcgagctctgggtgggcatgcctgcctggtacgtcgccgcctgcagggcgaatgtcaagagcggagcaattatgtctgccctgtccgatacagaaattcagcgagagattgggatttcaaacccactgcacaggctcaagcttcgcttagccattcaagagattatgagcctcacttcgccttccgcgccccctacaagtcggacaaccctggcctatggggacatgaatcacgagtggatcggaaacgagtggctccctagccttggtttacctcagtacaggagctatttcatggagtgtctggtcgatgccaggatgttggaccacctgacgaagaaagacctgcgaggccagcttaagatggtggactctttccatcgaaacagcttccagtgcgggatcatgtgcctcagaaggctcaattacgataggaaagagctggagcgtaaacgggaggagtcgcagtccgagattaaagatgttctggtgtggtcaaacgaccgggtgattaggtggatcctcagtattgggctcaaagagtacgctaataatttaatcgaaagcggtgtgcacggcgcgctgctagcactcgacgagacattcgactttagcgccttggcgctgttattacagattcctacacaaaacacgcaggcaagggcagtgctcgagagagagttcaataatcttttggtcatgggcactgaccgaagattcgacgaggacgacgataagagcttccgtcgtgccccttcttggagaaagaagtttcgacccaaggacattagagggctggccgctggctctgcggaaacgttgcccgccaacttcagagtgacctccagcatgagctcccctagtatgcaacctaagaaaatgcagatggacggcaatgtcagtggcacccagcgtctggattcagcaacagtgagaacatactcttgctag

SEQ ID NO: 139663 - DNA, 3609 bp, Artificial Sequence
  derived and/or modified sequence
atgatgtgtgaggtgatgcccaccatcagcgaggccgagggccccccaggcggcggcggcggccacggcagcggcagccccagccagccagatgctgacagccactttgagcagctgatggtgtccatgctggaggagcgggaccggctgctggacaccctgcgggagacccaggagaccctggccctgacccagggcaagctgcacgaggtgggccacgagcgggacagcctgcagaggcagctgaacacagccctgccccaggagtttgctgccctgaccaaggagctgaatgtgtgccgggagcagctgctggagcgggaggaggagattgctgagctgaaggccgagaggaacaacacccggctgctgctggagcacctggagtgcctggtgtccagacatgagaggagcctgaggatgacagtggtgaagaggcaggcccagagccctgctggggtgagcagcgaggtggaggtgctgaaggccctgaagagcctgtttgagcaccacaaggccctggatgagaaggtgcgggagcggctgcgggtggccctggagcgctgcagcctgctggaggaggagctgggcgccacccacaaggagctgatgatcctgaaggagcagaacaaccagaagaagaccctgacagatggagtgctggacatcaaccacgagcaggagaacacccccagcaccagcggcaagaggagcagtgatggcagcctgagccatgaggaggacctggccaaggtgattgagctgcaggagatcatcagcaagcagagccgggagcagagccagatgaaggagcggctggccagcctgagcagccacgtgacagagctggaggaggacctggacacagccaggaaggacctgatcaagtctgaggagatgaacaccaagctgcagagagatgtgcgggaggccatggcccagaaggaggacatggaggagcgcatcaccaccctggagaagcgctacctggccgcccagcgggaggccacctctgtgcatgacctgaatgacaagctggagaatgagatcgccaacaaggacagcatgcaccggcagacagaggacaagaaccggcagctgcaggagcggctggagctggccgagcagaagctgcagcagaccctgaggaaggccgagaccctgcctgaggtggaggccgagctggcccagagggtggccgccctgagcaaggccgaggagagacatggcaacatcgaggagcggctgcggcagatggaggcccagctggaggagaagaaccaggagctgcagagggcccggcagcgggagaagatgaatgaggagcacaacaagaggctgagtgacacagtggacaagctgctgtctgagagcaatgaaaggctgcagctgcacctgaaggagaggatggccgccctggaggacaagaacagcctgctgcgggaggtggagagcgccaagaagcagctggaggagacccagcacgacaaggaccagctggtgctgaacatcgaggccctgcgggcagagctggaccacatgaggctgcggggggccagcctgcaccacggccggccccacctgggctctgtgcctgacttccgcttccccatggctgatggccacacagacagctacagcaccagcgctgtgctgcggcggccccagaagggccgcctggccgccctgagagatgagcccagcaaggtgcagaccctgaatgagcaggactgggagcgggcccagcaggcctctgtgctggccaacgtggcccaggcctttgaaagtgatgctgatgtgtctgatggagaagatgaccgggacaccctgctgagctctgtggacctgctgagccccagcggccaggctgatgcccacaccctggccatgatgctgcaggagcagctggatgccatcaacaaggagatccgcctcatccaggaggagaaggaaaatacagagcagagagctgaggagattgagagccgggtgggcagcggcagcctggacaacctgggccgcttccgctccatgagcagcatccccccctacccagccagcagcctggccagcagcagccccccaggcagcggccgcagcaccccccggcgcatcccccacagccctgcccgggaggtggaccggctgggcgtgatgaccctgctgccccccagccgggaggaggtgagagatgacaagaccaccatcaagtgtgagaccagcccccccagcagcccccgggccctgcggctggaccggctgcacaagggggccctgcacacagtgtcccatgaggacatccgggacatccggaacagcacaggcagccaggacggccctgtgagcaaccccagcagcagcaacagcagccaggacagcctgcacaaggcccccaagaagaagggcatcaagagcagcatcggccgcctgtttgggaagaaggagaagggccggcccggccagacaggcaaggaggccctgggccaggccggcgtgtctgaaacagacaacagcagccaggatgccctgggcctgagcaagctgggcggccaggccgagaagaacaggaagctgcagaagaagcatgagctgctggaggaggcccggcggcagggcctgccctttgcccagtgggatggccccaccgtggtggtgtggctggagctgtgggtgggcatgcctgcctggtacgtggccgcctgccgggccaacgtgaagagcggggccatcatgtctgccctgagtgacacagagatccagcgggagatcggcatcagcaaccccctgcaccggctgaagctgcggctggccatccaggagatcatgagcctgaccagccccagcgccccacccaccagcaggaccaccctggcctatggagacatgaaccacgagtggattggaaatgagtggctgcccagcctgggcctgccccagtaccgcagctacttcatggagtgcctggtggatgccaggatgctggaccacctgaccaagaaggacctgcggggccagctgaagatggtggacagcttccacaggaacagcttccagtgtggcatcatgtgcctgcggcggctgaactatgacaggaaggagctggagaggaagcgggaggagagccagagcgagatcaaggatgtgctggtgtggagcaatgacagagtcatccgctggatcctgagcatcggcctgaaggagtatgccaacaacctgattgaaagtggagtgcacggggccctgctggccctggatgagacctttgacttcagcgccctggccctgctgctgcagatccccacccagaacacccaggcccgggctgtgctggagcgggagttcaacaacctgctggtgatgggcacagacagaagatttgatgaagatgatgacaagagcttcagaagagcccccagctggaggaagaagttccggcccaaggacatccggggcctggccgccggcagcgctgagaccctgcctgccaacttccgggtgaccagctccatgagcagccccagcatgcagcccaagaagatgcagatggatggaaatgtgtctggcacccagaggctggacagcgccaccgtgaggacctacagctgctag

SEQ ID NO: 139664 - DNA, 3609 bp, Artificial Sequence
  derived and/or modified sequence
atgatgtgcgaggtgatgcccaccatcagcgaggccgagggcccccccgggggcgggggcggccacgggtccggctctccgtcccagccggatgcagatagccactttgagcagttgatggtgtctatgctggaggagagggataggctgcttgacacacttagagagactcaagagaccctggccctgacacaggggaagctgcatgaggtcggccatgagagggacagcctgcagcggcaactaaatacagccctgccacaggagttcgctgcactgaccaaggagctgaatgtgtgcagagagcagctgctagagagggaggaggagatcgccgagttgaaggccgaacggaataatacaagactcctccttgaacatctggaatgcctggtgtctcggcatgagcgcagtcttaggatgacagtcgtgaaaaggcaagcacagagtccagcgggtgtgagttctgaggtcgaagttctgaaagccctaaagagtctcttcgagcaccacaaggccctggatgaaaaggtaagggaacggcttagagtggccttggaacgatgcagcctcctcgaggaggagctcggagctacccataaagagttgatgattctcaaggagcagaacaaccaaaagaaaacccttaccgatggcgtcctggacattaatcatgagcaggagaatactccttcaacttcagggaaaagatcgagtgacggctctttgtcacatgaggaagatctggctaaagtcatcgaattacaagaaatcatcagtaagcagtctcgtgagcagagtcaaatgaaggagcgcctggcttctctttcttcccacgttacggagctggaggaggatcttgataccgccagaaaagacctgatcaagtccgaggaaatgaacacaaaattgcaacgagacgtgcgggaggcgatggcccagaaagaggatatggaggaacgcatcacaactctggagaaaagatatttggctgcacagcgtgaggccactagcgtgcacgacttgaatgataaacttgaaaacgaaatagcgaacaaagactccatgcatagacagaccgaagacaagaatagacaactccaggagcgtttagaactcgcagaacagaagctccaacagacgttgcggaaggcagaaacccttcctgaggtggaggccgagcttgcacagagagttgctgcactctcaaaggcagaagagaggcacggcaacatcgaggagcggcttagacagatggaggcccagctggaagaaaagaaccaggagttacagcgggccaggcagcgagagaagatgaatgaggagcataacaagcgtctatcagataccgttgacaagctgctctccgaatccaacgagcggctacagcttcacttaaaagaaagaatggccgctctcgaagacaagaattcgctgctgcgagaggttgagtcggcaaaaaagcagttagaggaaactcagcacgacaaagaccagctggtacttaacatagaggcactgcgggccgagctggaccacatgcgcctgcgcggggctagcctccaccacggtcgcccacacttaggctctgtaccggactttagattccctatggcagacggtcatacggacagttactccacatcagcagtgcttaggagacctcagaagggcagattggcagctttgcgcgatgaaccgtcaaaggtacagacactgaatgagcaggattgggagcgagctcagcaggctagtgtgctggccaatgtggcccaagcctttgaatctgacgctgatgttagtgatggggaggacgatcgtgacaccctcctgagctccgttgatctcctcagtccttccggacaggccgatgctcatacattggcaatgatgctacaggaacaactggatgctataaataaggagatccgcctcatacaagaagagaaagaaaatacggaacagcgggctgaggaaattgaatctcgggtgggatccggaagtctggacaatctgggaaggttccgatcgatgtcttctatacctccctacccagcttccagcttggccagcagctctccccccggatctggaagaagtacccccagacggataccccacagtccagcccgcgaagtagaccggctgggggtgatgacactgctccctcctagcagagaagaggtcagggacgataaaactaccatcaagtgtgagacctcgcccccaagtagcccccgcgccctccgattggacaggctgcacaaaggtgcgctgcacacagtctcacatgaagacatcagggacatccggaactcgacaggcagtcaggacggaccagtttctaaccctagttctagcaactcgtcccaggactctcttcataaggcccctaagaagaagggcatcaagtcttccattggtaggctgttcggtaagaaagagaaaggcaggcctgggcagaccgggaaggaagcactgggccaggccggcgtctccgagaccgacaacagctctcaggatgcactgggcctctcgaaactggggggtcaggctgagaaaaacagaaaattgcagaaaaagcatgagctcctggaagaagctagaagacagggcttgccgtttgcccagtgggacgggcccactgtggttgtctggctcgagctgtgggtgggtatgcccgcctggtatgtggccgcctgtagagccaacgtaaagtcaggagctatcatgtccgcattatccgatacagaaattcagagggagatcggtattagcaatccgctccacaggcttaaacttaggctagcaatacaagaaatcatgtccctgacgtccccgtccgccccgcctacgagccgcaccactttggcttacggggacatgaaccatgaatggatcggtaacgaatggctgccgagccttggtttgccacagtaccgatcatacttcatggagtgtttagtggatgcccgaatgctggatcacctgactaagaaggatctgcgcggacagcttaaaatggttgacagtttccaccgcaactcctttcagtgcggcattatgtgtctgaggcgactgaattacgaccgcaaagaactcgagcgaaagcgagaagagtcgcaaagtgaaatcaaagacgtgctggtgtggagtaacgaccgggtcatacgctggatcctctctatcggcctgaaggagtacgccaacaacctgattgagtctggggtgcacggtgccttgttagctctagatgagacctttgactttagtgcgctagcattgctactccaaatcccaactcagaacactcaggcccgagcagttctcgaaagggagttcaataacctgctggtaatgggcacagatcggagattcgacgaagatgatgacaagtcatttaggcgggctccctcctggcggaaaaaattcagacccaaggacatccgaggtctggctgctgggagcgctgaaacacttcccgctaacttccgggttaccagctcgatgtctagtccgtctatgcagcccaaaaagatgcagatggatggaaatgttagtggcacacagaggctggattcggccacagtgaggacatattcttgctag

SEQ ID NO: 139665 - DNA, 3609 bp, Artificial Sequence
  derived and/or modified sequence
atgatgtgtgaggtgatgcccaccattagcgaagctgaaggaccccctggaggtggaggcggacacggttccggcagtccatcccagccagatgcagattcccactttgagcagttaatggttagcatgctggaagaacgggatcgcctgcttgacacacttcgggagacccaggagacccttgcactaacccaagggaaactgcacgaggtgggccacgaacgggacagcttgcaacgccaacttaacaccgcattaccccaggagttcgccgcactcacaaaagaattgaacgtatgtcgcgagcaactgctcgaaagggaggaggagattgcggaactcaaggcagaaagaaataacactcgtttactactggagcacctggagtgcctcgtgtcccggcacgagcgatcactgcgaatgacagttgtcaagaggcaggcccagtcgcccgcaggagtctcctcggaggtggaagttctcaaggctctgaaaagcctttttgagcatcataaggcgctggacgaaaaggtaagagagagacttcgggtggcgctggaacggtgctccttgctggaggaggaactgggtgcaacacataaggagttgatgattttaaaggagcagaataatcagaaaaagaccctcaccgacggagtgctcgatataaatcacgaacaggagaatacaccctccaccagtggcaagaggagctcagacggatcactctcccatgaggaggatttagcgaaggtaattgagcttcaggagattattagcaagcagagtcgggagcaatcccagatgaaagagcgccttgcctccctctcaagccacgtcaccgaactggaagaagacctggacacagctagaaaagaccttatcaagtccgaagaaatgaataccaaactgcagagggatgtgcgggaagctatggctcagaaggaagacatggaggagcgtattaccacactagaaaagaggtacctagccgctcagcgcgaggctactagtgttcacgacctgaacgacaagctggaaaacgagatcgccaacaaggactcaatgcacagacagacagaggacaagaatagacagcttcaggaacgtctggaacttgcagagcagaaactgcaacagacattgagaaaggccgaaactctgccagaggtcgaggcagagttggcccagcgagtcgccgcactgtccaaggccgaagaacggcacggaaatatagaggaaagactcagacaaatggaggcacagctggaggagaaaaatcaagagcttcagcgcgctcgccagcgtgagaagatgaatgaggagcataataagcggctgtctgatacggtggacaagctgctttctgagtctaacgagcggttgcagctccacctaaaggaacggatggcagctttggaagataaaaactccctactcagggaggtggaatccgccaagaagcagctcgaagagactcagcatgataaagatcagctcgtgctgaacatcgaggcgctgagggccgagctggaccacatgcggctacggggtgctagtctgcaccatgggcgaccgcatctgggatctgtacccgattttcgtttccccatggcggatggacacacagactcatatagcacgagcgcagtactccgcagaccacagaagggcagactggcagccctcagggacgagccttcaaaagtacaaaccctgaacgagcaggattgggaacgagcacaacaggcaagcgtgcttgctaatgtggcccaggcgttcgagtctgatgctgatgttagtgatggcgaggatgaccgggataccttgctgtcaagtgtggacctactctccccttcaggccaagctgatgcgcataccctagcaatgatgttgcaagagcagcttgacgcgatcaataaggaaattcgcttgatacaggaagagaaggagaacaccgagcagcgagcagaagaaatcgagtccagggttgggtccggctccctggacaacctcggacggtttagatccatgagctctatacctccatacccagccagctcgctcgcatcatcctcgccccctgggtcaggaagatccacgcccaggcgtattccccactctcctgccagagaggtcgatcggctgggggtgatgaccctgcttcccccatcacgagaagaggtccgggatgacaaaactacaatcaagtgtgaaacctctccgcctagtagccccagagctctgcggctagaccgtctccataagggggcactccatacggtctcccatgaggatatccgtgatattcgcaacagtactggaagccaggacggccctgtgagcaatccaagctcctctaactcaagtcaggattccctgcataaggcaccaaagaagaaaggtatcaaatcaagtatcggaagactgttcgggaagaaggagaagggtcgtcctggacagacagggaaagaggccctcggacaggccggtgtgagcgaaacagacaacagttctcaggacgcattgggcctgtctaaactcgggggacaggctgagaagaacaggaaattacaaaaaaagcatgagttactggaagaggcgcgtaggcaaggactaccatttgcccagtgggatgggccaaccgtcgtcgtgtggctggaactgtgggtaggaatgccggcttggtatgtggcggcttgcagagccaacgtgaagtcgggcgctattatgagtgctcttagcgatacagaaatacagcgggagattgggatctcgaatcccttgcatcgtctaaaactcaggctggcaatccaagagattatgagcctcaccagcccttcagcccctcctacctctaggaccacattggcctacggcgacatgaatcacgaatggataggcaacgagtggctgccatctttgggactcccgcagtatagatcttacttcatggagtgcctcgtcgacgcccgaatgctcgatcatctgacaaaaaaggatctccgtggccagcttaaaatggtcgacagctttcatagaaacagcttccaatgcggcataatgtgtctgcgtaggttaaattacgaccgcaaggagctggagagaaagcgcgaagagtctcaatcagagattaaggatgtcctggtgtggtcaaatgacagggttattcgctggattctctcgattggactgaaagagtacgcaaataacttgattgagagcggggtgcatggagccctgctggccctggatgagactttcgacttctctgctctcgctctccttctgcagatcccgactcaaaacactcaagccagagcagtcctggagcgggagtttaataaccttttggtgatggggaccgaccggaggtttgatgaggatgacgataagagtttccgtagggcaccgagctggaggaagaaattccgtccgaaggatatccgcggattagccgctgggtcagctgaaacactgcccgcaaatttccgcgtaacaagctccatgagcagtccatccatgcaaccaaagaaaatgcagatggatgggaacgttagcgggacccagagactggatagtgcgaccgttagaacttacagctgttag

SEQ ID NO: 139666 - DNA, 5234 bp, Artificial Sequence
  derived and/or modified sequence
gccgcgcagccgggcccgctcctcctccgctccgccagtgtccggccgcgggccggccttagtgactggggcggcgggccccggggccgcggcgtggggcgggcaggcggacgccggccgcgggctgctttcgtcggctcccaagctctcccggagcgagcagccgcccgcgagccgccgcggagcctcctcgcccgctcccgccggcgagcaagatgatgtgcgaggtgatgccgaccatcagcgaagcagaaggcccccctggaggaggtggaggccatggttccggctccccttcacagccagatgcagattcacattttgaacagttgatggtctccatgctagaagaaagggaccgccttcttgatacactgagagagactcaagaaacgctggccttaacccaggggaagttacacgaggttggtcatgaaagagattccttgcagagacagctcaacacggcacttccacaggagttcgcagcacttactaaagaactcaatgtatgcagggaacagctccttgaaagggaagaagaaattgctgaactgaaagcagaaaggaataacaccaggctgctgttagagcatttggaatgccttgtctccaggcatgagcggtctcttaggatgaccgtggtgaagagacaagcgcagtctccagcaggcgtgtccagcgaagtggaagtgctgaaagcactgaagtccttatttgaacaccacaaagctctggatgaaaaggtgagagagcgattacgagtagcacttgaaagatgtagtttgttagaagaggaattaggtgccacacacaaagagctaatgattcttaaagaacagaataatcagaaaaaaactctaacagatggagtgctggacataaaccatgaacaagaaaatacaccaagcacgagtggaaagagatcttctgatggttctttaagccacgaggaagaccttgctaaagtaattgagctccaagaaatcataagtaagcagtcaagggaacagagccaaatgaaagaacgcctggcttccctttccagtcatgtgacagaactggaagaggatctggacacggctagaaaagatctcatcaaatctgaagaaatgaacacaaaattgcaacgagatgtccgtgaagccatggcccaaaaggaagatatggaagagagaatcactactcttgaaaaacgctacctcgctgcacagcgtgaagccacatctgtgcatgacctcaatgataaacttgaaaatgaaattgcaaataaagattctatgcatcgacagactgaagataaaaaccgccagttacaggagcgcttggaattggcagagcaaaagctgcaacagacactgaggaaggcagagacgctcccggaggtggaggcggagctggcccagagggtggcagcgctttccaaggctgaagagagacacggcaacattgaagaaaggttacgacagatggaagcacagttggaggagaagaatcaagaactgcagcgggcaaggcaaagagaaaaaatgaacgaagaacataataaacgtttatcagacactgttgacaagctgctttcagaatctaatgagaggcttcaacttcatcttaaagagagaatggctgctttggaagataagaactctcttttaagagaagttgaaagtgcaaaaaagcagttagaagaaacacaacacgataaggatcagcttgtcctaaacattgaagcactgagggctgaactagaccacatgagactaagaggtgcttcacttcatcatggccgaccccacttgggcagtgtcccagatttcaggttccccatggcagacggccacacagactcctacagcaccagtgcagtgctgcggcgcccacagaaaggccggctggcagccctgcgagatgagccttccaaggtacaaactcttaatgagcaggattgggaacgtgcccagcaagctagtgtcttggcaaatgtagcacaagcattcgagagtgatgctgacgtgtctgatggtgaagatgacagggacactctcctcagctcagttgacctgctatcgcccagcgggcaggccgacgcgcacacactagccatgatgcttcaggagcagctggacgccatcaacaaagagatcaggttgattcaggaagaaaaagaaaatacagagcagcgggcagaggagattgaaagtcgagttggcagtggaagtctagacaatcttggtcgttttagatcaatgagctccattcccccctaccctgcttcctcgcttgctagctcctcccctccgggcagtgggcgctccaccccacgaaggatccctcacagcccagctcgggaagtggacagactgggcgtcatgacccttttgccaccttccagagaagaggtacgagatgacaagacaaccataaagtgtgaaacctccccgccttcctccccgagagcccttcggttagaccggctgcacaaaggggcgctgcacaccgtcagccacgaggacatcagggacataaggaactccacaggctcccaggatggtcccgtgagcaaccccagcagtagcaacagtagccaggactcgctccacaaagccccaaagaagaaaggcattaagtcctccattggccgcttgtttggcaagaaagaaaagggccgacctggacaaactggcaaagaagcattaggacaagctggtgtttccgagacggataactcatctcaggatgccttgggacttagcaaattggggggacaggctgaaaaaaatcgtaaacttcaaaaaaagcatgaattgctggaggaagcccggagacaaggtttaccttttgcccaatgggacgggccaacggttgtggtctggctagagctctgggttgggatgccagcctggtatgtggctgcctgccgagcaaacgtgaaaagcggggccatcatgtcggccctgtccgacacagagatccagcgtgagattggcatcagcaaccccctgcacaggctgaagctgaggctggccatccaggagatcatgtcgctgaccagcccgtctgccccgcccacatctagaacgacactcgcctatggggacatgaaccacgagtggatcggcaacgagtggctccccagcctgggcctcccccagtaccgcagctacttcatggagtgccttgtagacgccaggatgctggaccacttgaccaagaaagaccttcgagggcagctgaaaatggtcgacagttttcacagaaacagtttccagtgtggaattatgtgcctgagaaggttaaattatgaccggaaagaactggaaagaaaaagagaagaaagtcagagtgaaataaaagacgtgcttgtttggagcaatgatcgagtgattcgctggatcctgtcaattggccttaaagaatatgcaaacaatcttatagagagtggtgttcacggagcacttctggccttagatgaaaccttcgacttcagtgcactggcactgctgttacagatcccgacgcagaacacacaggctcgtgctgtcttggaaagagaatttaacaaccttttggtcatggggactgatagaaggtttgatgaagatgatgataaaagctttaggagagcaccttcatggagaaaaaagtttagaccaaaggacattcgtggcttagctgctgggtcagcagagactctccctgcaaacttccgggtgacttcttctatgtcttccccctctatgcagccaaagaagatgcagatggacggcaatgtatcaggaacacagaggttggattctgctacagtcaggacttactcctgctaaagtctcctgttgtttacccacactacttctacagatgattatgcagcatttgaatccaacaaagactacattttggaatccagtggaatctttaatcttgttaatacttgttatatggaccctaagatattttattacagagtttttaattagtgaaaaattcatgaataccatagagaaaatattttagaatttaatgtttcttatatttatgtaaacttatgactcttcatttatatagttacttactttttcatgtatatccaggctataaatatcctttcaaatcatgttcttatacctaattttagtctttcaaatgaatgtactgtaatgcttgtatgtataaatcctatgaatagagggcttttgtaaattatgcatttattgtaattatcattaattttttaatgataaaccatgacaaaggattttacgtttataaaattatgacagaagccatgtgcattatcctttacggacgcagcctagctctacagcaatcatcctgaaataagcatacctaatttcaagcaattgttgtattttcatgactgaccttaactgtactttttctagcaagagatgctttattctgcagcatgaacagatttaaaatggctggtgttaaatatcagctcctaataagatgtggactgaaaacactatcacaacactatgagaagcccctagcactggttaacgctttcctagcctagtctctggatttggggagcttgtcttcagtggctgagactgtgagctgggagcagttctctcagctggagagactcgggatggggtaacctggggaccagtctagcccctgcaccctcttccctgcctctgctccttgggagcgggtggagagacacccatgtggctccccttagggccagcaccaagcaccacgctctcatcctgcaagtcggcgcacacagtggatgaaggcaggagacccagaaagcagtgcagtgcagctctaataaaggccttatttttcttatgtaaatcatctttttacatttgtttgtaaacatgtttaaagaacgaacctagtgggacatttttagactttgatgctctagccattttggattgtgtaagttgcagatgtggcttttactttttaaatggcatattaacaagccagcaaagtgtgtcagaccatggcgtggtatttattgtgcagcagatccagagacagaggcagcctgtcttttcagttggtttctgcttttaatttacttgtacaattcattgttactgttctgtttttctattaatcttttgtcaacttcctgattatgtaacaaagtatgtacagtctacttttgaactatttttatcacagtattatttattgctttctttcaataaagtactgaagcattttccactgccaatgaa

SEQ ID NO: 139667 - DNA, 3609 bp, Artificial Sequence
  derived and/or modified sequence
atgatgtgcgaggtgatgcccaccatcagcgaggccgagggcccccccggcggcggcggcggccacggcagcggcagccccagccagcccgacgccgacagccacttcgagcagctgatggtgagcatgctggaggagagagacagactgctggacaccctgagagagacccaggagaccctggccctgacccagggcaagctgcacgaggtgggccacgagagagacagcctgcagagacagctgaacaccgccctgccccaggagttcgccgccctgaccaaggagctgaacgtgtgcagagagcagctgctggagagagaggaggagatcgccgagctgaaggccgagagaaacaacaccagactgctgctggagcacctggagtgcctggtgagcagacacgagagaagcctgagaatgaccgtggtgaagagacaggcccagagccccgccggcgtgagcagcgaggtggaggtgctgaaggccctgaagagcctgttcgagcaccacaaggccctggacgagaaggtgagagagagactgagagtggccctggagagatgcagcctgctggaggaggagctgggcgccacccacaaggagctgatgatcctgaaggagcagaacaaccagaagaagaccctgaccgacggcgtgctggacatcaaccacgagcaggagaacacccccagcaccagcggcaagagaagcagcgacggcagcctgagccacgaggaggacctggccaaggtgatcgagctgcaggagatcatcagcaagcagagcagagagcagagccagatgaaggagagactggccagcctgagcagccacgtgaccgagctggaggaggacctggacaccgccagaaaggacctgatcaagagcgaggagatgaacaccaagctgcagagagacgtgagagaggccatggcccagaaggaggacatggaggagagaatcaccaccctggagaagagatacctggccgcccagagagaggccaccagcgtgcacgacctgaacgacaagctggagaacgagatcgccaacaaggacagcatgcacagacagaccgaggacaagaacagacagctgcaggagagactggagctggccgagcagaagctgcagcagaccctgagaaaggccgagaccctgcccgaggtggaggccgagctggcccagagagtggccgccctgagcaaggccgaggagagacacggcaacatcgaggagagactgagacagatggaggcccagctggaggagaagaaccaggagctgcagagagccagacagagagagaagatgaacgaggagcacaacaagagactgagcgacaccgtggacaagctgctgagcgagagcaacgagagactgcagctgcacctgaaggagagaatggccgccctggaggacaagaacagcctgctgagagaggtggagagcgccaagaagcagctggaggagacccagcacgacaaggaccagctggtgctgaacatcgaggccctgagagccgagctggaccacatgagactgagaggcgccagcctgcaccacggcagaccccacctgggcagcgtgcccgacttcagattccccatggccgacggccacaccgacagctacagcaccagcgccgtgctgagaagaccccagaagggcagactggccgccctgagagacgagcccagcaaggtgcagaccctgaacgagcaggactgggagagagcccagcaggccagcgtgctggccaacgtggcccaggccttcgagagcgacgccgacgtgagcgacggcgaggacgacagagacaccctgctgagcagcgtggacctgctgagccccagcggccaggccgacgcccacaccctggccatgatgctgcaggagcagctggacgccatcaacaaggagatcagactgatccaggaggagaaggagaacaccgagcagagagccgaggagatcgagagcagagtgggcagcggcagcctggacaacctgggcagattcagaagcatgagcagcatccccccctaccccgccagcagcctggccagcagcagcccccccggcagcggcagaagcacccccagaagaatcccccacagccccgccagagaggtggacagactgggcgtgatgaccctgctgccccccagcagagaggaggtgagagacgacaagaccaccatcaagtgcgagaccagcccccccagcagccccagagccctgagactggacagactgcacaagggcgccctgcacaccgtgagccacgaggacatcagagacatcagaaacagcaccggcagccaggacggccccgtgagcaaccccagcagcagcaacagcagccaggacagcctgcacaaggcccccaagaagaagggcatcaagagcagcatcggcagactgttcggcaagaaggagaagggcagacccggccagaccggcaaggaggccctgggccaggccggcgtgagcgagaccgacaacagcagccaggacgccctgggcctgagcaagctgggcggccaggccgagaagaacagaaagctgcagaagaagcacgagctgctggaggaggccagaagacagggcctgcccttcgcccagtgggacggccccaccgtggtggtgtggctggagctgtgggtgggcatgcccgcctggtacgtggccgcctgcagagccaacgtgaagagcggcgccatcatgagcgccctgagcgacaccgagatccagagagagatcggcatcagcaaccccctgcacagactgaagctgagactggccatccaggagatcatgagcctgaccagccccagcgccccccccaccagcagaaccaccctggcctacggcgacatgaaccacgagtggatcggcaacgagtggctgcccagcctgggcctgccccagtacagaagctacttcatggagtgcctggtggacgccagaatgctggaccacctgaccaagaaggacctgagaggccagctgaagatggtggacagcttccacagaaacagcttccagtgcggcatcatgtgcctgagaagactgaactacgacagaaaggagctggagagaaagagagaggagagccagagcgagatcaaggacgtgctggtgtggagcaacgacagagtgatcagatggatcctgagcatcggcctgaaggagtacgccaacaacctgatcgagagcggcgtgcacggcgccctgctggccctggacgagaccttcgacttcagcgccctggccctgctgctgcagatccccacccagaacacccaggccagagccgtgctggagagagagttcaacaacctgctggtgatgggcaccgacagaagattcgacgaggacgacgacaagagcttcagaagagcccccagctggagaaagaagttcagacccaaggacatcagaggcctggccgccggcagcgccgagaccctgcccgccaacttcagagtgaccagcagcatgagcagccccagcatgcagcccaagaagatgcagatggacggcaacgtgagcggcacccagagactggacagcgccaccgtgagaacctacagctgctag

SEQ ID NO: 139668 - protein, 1192 aa, Artificial Sequence
  derived and/or modified sequence
MPAPEQASLVEEGQPQTRQEAASTGPGMEPETTATTILASVKEQELQFQRLTRELEVERQIVASQLERCRLGAESPSIASTSSTEKSFPWRSTDVPNTGVSKPRVSDAVQPNNYLIRTEPEQGTLYSPEQTSLHESEGSLGNSRSSTQMNSYSDSGYQEAGSFHNSQNVSKADNRQQHSFIGSTNNHVVRNSRAEGQTLVQPSVANRAMRRVSSVPSRAQSPSYVISTGVSPSRGSLRTSLGSGFGSPSVTDPRPLNPSAYSSTTLPAARAASPYSQRPASPTAIRRIGSVTSRQTSNPNGPTPQYQTTARVGSPLTLTDAQTRVASPSQGQVGSSSPKRSGMTAVPQHLGPSLQRTVHDMEQFGQQQYDIYERMVPPRPDSLTGLRSSYASQHSQLGQDLRSAVSPDLHITPIYEGRTYYSPVYRSPNHGTVELQGSQTALYRTGSVGIGNLQRTSSQRSTLTYQRNNYALNTTATYAEPYRPIQYRVQECNYNRLQHAVPADDGTTRSPSIDSIQKDPREFAWRDPELPEVIHMLQHQFPSVQANAAAYLQHLCFGDNKVKMEVCRLGGIKHLVDLLDHRVLEVQKNACGALRNLVFGKSTDENKIAMKNVGGIPALLRLLRKSIDAEVRELVTGVLWNLSSCDAVKMTIIRDALSTLTNTVIVPHSGWNNSSFDDDHKIKFQTSLVLRNTTGCLRNLSSAGEEARKQMRSCEGLVDSLLYVIHTCVNTSDYDSKTVENCVCTLRNLSYRLELEVPQARLLGLNELDDLLGKESPSKDSEPSCWGKKKKKKKRTPQEDQWDGVGPIPGLSKSPKGVEMLWHPSVVKPYLTLLAESSNPATLEGSAGSLQNLSAGNWKFAAYIRAAVRKEKGLPILVELLRMDNDRVVSSVATALRNMALDVRNKELIGKYAMRDLVNRLPGGNGPSVLSDETMAAICCALHEVTSKNMENAKALADSGGIEKLVNITKGRGDRSSLKVVKAAAQVLNTLWQYRDLRSIYKKDGWNQNHFITPVSTLERDRFKSHPSLSTTNQQMSPIIQSVGSTSSSPALLGIRDPRSEYDRTQPPMQYYNSQGDATHKGLYPGSSKPSPIYISSYSSPAREQNRRLQHQQLYYSQDDSNRKNFDAYRLYLQSPHSYEDPYFDDRVHFPASTDYSTQYGLKSTTNYVDFYSTKRPSYRAEQYPGSPDSWV

SEQ ID NO: 139669 - DNA, 3579 bp, Artificial Sequence
  derived and/or modified sequence
atgcccgcccctgaacaggctagtttagtggaggagggccagccccagactcggcaggaagccgcctccacaggcccaggcatggagcctgaaactacagccacgaccattctggcatccgtcaaagaacaggagctacaattccagagattaacaagggagctggaagtggaaagacagatcgtggcgtcacaactggagcgctgtaggctgggagctgaatccccgtctatcgcttccacatccagcacagaaaaatcctttccttggcgatccacggatgtgccaaacaccggagtgtccaagcctcgcgtgtccgatgcagtgcaacctaacaattacctaatccgcaccgagcctgagcaggggacactttactcacctgagcaaaccagcttgcacgaatctgagggttcgcttgggaatagccgctcatctacccagatgaatagctacagcgactcaggatatcaggaggccggcagtttccataacagccagaatgtctcaaaagcagataatcggcagcaacatagttttatcggctctaccaacaaccatgtcgtgcgcaacagcagagccgagggccagaccttagttcagcccagtgtggctaatcgtgcgatgaggagggtctcctcagtgccttcaagagcccaatcacctagctatgtgatctctaccggagtttcaccttcaaggggcagtttgaggacatctctcggcagtggcttcggttctcccagtgtgactgaccctaggcccctgaacccgtcggcctactcctctacaacgctgccagcagcgcgcgcagcttccccctacagccagaggccagctagcccaacagccatcagacgcatcggttctgtgaccagccgacaaacctcaaatcccaatggccccacaccccagtaccagaccacagctcgggtcgggagccccctgaccttaactgacgcccagacgcgggtggcatctccttcccagggccaagtggggagcagtagcccaaaacgctcagggatgaccgctgtgccacagcacttgggaccatcgctacagcgcacagtacacgatatggaacagtttgggcaacagcagtacgacatttatgagcggatggtccccccccgccccgactccttgaccggcctcagatcaagctatgcatcccagcattcccagctgggccaggaccttcgctccgccgtcagtcctgacctgcacataaccccaatatatgaagggcggacttattattctccagtgtataggtcgcctaatcacggaaccgttgaacttcagggcagccagacagcactctatcgaaccggctcagtcggcatcggaaatcttcagaggacttcctcgcagcggtccacactcacgtatcagagaaacaattacgccctaaatacaaccgccacatatgcagagccatatcgtcctatacagtatcgcgtccaggaatgcaactacaatcgcctgcagcatgcggtccccgcagacgacggcactacaagatcacccagtattgacagcatacagaaggaccctagggaatttgcctggcgcgaccctgaactccctgaagtgattcacatgttacaacaccagttcccgagtgtccaggccaatgccgctgcctatctccagcacttatgcttcggggataacaaggtgaagatggaggtgtgtaggctagggggcatcaagcatttggtggacctccttgaccacagggtgctggaagtacagaagaatgcatgcggagcccttagaaacctggtgtttgggaaaagcacagatgagaataagatagctatgaagaacgttggcgggattccagctctgctgcgccttttgaggaagagcatcgatgctgaggtgcgggaactcgtgactggcgtgctgtggaacctgtcttcatgtgatgcagttaagatgactataatccgtgacgctctgtctacactgacaaacaccgtgatagtgcctcacagtggttggaacaattcttctttcgatgacgatcataaaatcaagtttcagaccagtcttgtgttgaggaacactaccgggtgcctgcgaaatctctctagcgctggggaagaggcgcggaaacagatgagatcctgtgagggcctcgtagactccttgctgtatgtaattcatacctgtgtaaacaccagcgactatgacagtaagacggttgagaactgcgtgtgcaccttgcgcaacctgtcctataggctggaactggaagtgccacaggcccgcctgctcggattgaatgagctggatgacctcctgggcaaagaaagcccatctaaagactccgaaccaagctgttggggcaaaaaaaagaaaaagaagaagcgcaccccccaggaagatcagtgggatggggtgggccccatacctggcctgtcgaagtcccccaaaggcgtggaaatgctgtggcacccctctgtagtgaagccctatctcaccctgctcgctgaaagctctaatccggcaacactggagggatccgctggctcactgcagaatctgtctgcaggcaactggaaattcgctgcttacatcagagccgccgtgcgcaaagaaaaaggactgcctattctggtcgagctcctgaggatggacaatgacagagtggtgagtagcgtggcaactgcactgcgcaacatggccttggacgtgagaaacaaggagctgatcggaaagtacgccatgagggacttggtgaaccgcctgccaggcggtaatggaccctcagtgctgtctgatgagaccatggctgcaatctgttgcgctcttcacgaggtcaccagcaaaaacatggaaaacgctaaggcgcttgccgattctggtggcatcgaaaagctcgtgaatatcactaaaggacgtggggataggagcagtttaaaagtggtcaaggcggctgcccaagtcctcaatactctctggcagtatcgggacctcagaagcatctataaaaaggacggctggaaccagaaccatttcatcactccggtgtccaccttagaacgagataggttcaaaagtcatccttctttgagcacgactaaccagcagatgtcgccgatcattcaatccgtgggcagcacctccagcagcccagccctcctgggtatccgcgacccgcggagcgaatacgacaggacgcaacctcctatgcagtactacaattcccagggagacgctactcacaagggtctctatcccggctcctccaagcccagcccgatctacatctcttcctatagctctcccgccagagagcaaaatcgacggttgcagcaccaacagctgtattatagccaggatgacagtaaccgcaaaaacttcgatgcatatcggttgtacctgcagtcacctcacagttatgaggacccttattttgatgaccgggtccacttccccgcctccacggactattctacccagtatggtcttaaatctacaactaattacgtggatttttacagtaccaagcgtccgagctacagagctgagcagtacccaggcagcccggattcgtgggtgtag

SEQ ID NO: 139670 - DNA, 3579 bp, Artificial Sequence
  derived and/or modified sequence
atgcctgcccctgagcaggccagcctggtggaggagggccagccccagacccggcaggaggccgccagcacaggccctggcatggagcctgagaccacagccaccaccatcctggcctctgtgaaggagcaggagctgcagttccagaggctgacccgggagctggaggtggagcggcagatcgtggccagccagctggagcgctgccgcctgggcgctgagagccccagcatcgccagcaccagcagcacagagaagagcttcccctggaggagcacagatgtgcccaacacaggagtgtccaagccccgggtgtctgatgctgtgcagcccaacaactacctgatcagaacagagcctgagcagggcaccctgtacagccctgagcagaccagcctgcacgagagcgagggcagcctgggcaacagccgcagcagcacccagatgaacagctacagcgacagcggctaccaggaggccggcagcttccacaacagccagaatgtgtccaaggctgacaaccggcagcagcacagcttcatcggcagcaccaacaaccacgtggtgaggaacagcagagctgagggccagaccctggtgcagcccagcgtggccaacagagccatgagaagagtgtcctctgtgcccagccgggcccagagccccagctatgtgatcagcactggagtgagccccagccggggcagcctgcggaccagcctgggcagcggcttcggcagccccagcgtgacagacccccggcccctgaaccccagcgcctacagcagcaccaccctgcctgctgcccgggccgccagcccctacagccagaggcctgccagccccacagccatccgccgcatcggctctgtgaccagccggcagaccagcaaccccaacggccccaccccccagtaccagaccacagcccgggtgggcagccccctgaccctgacagatgcccagaccagggtggccagccccagccagggccaggtgggcagcagcagccccaagaggagcggcatgacagctgtgccccagcacctgggccccagcctgcagaggacagtgcatgacatggagcagtttggccagcagcagtatgacatctatgaaagaatggtgccccccaggccagacagcctgaccggcctgcggagcagctatgccagccagcacagccagctgggccaggacctgcggtctgctgtgtccccagacctgcacatcacccccatctatgagggccgcacctactacagccctgtgtaccgcagccccaaccacggcaccgtggagctgcagggcagccagacagccctgtacagaactggatctgtgggcatcggcaacctgcagaggaccagcagccagaggagcaccctgacctaccagaggaacaactatgccctgaacaccacagccacctatgcagagccctaccggcccatccagtacagagtgcaggagtgcaactacaaccggctgcagcacgctgtgcctgcagatgatggcaccaccaggagccccagcattgacagcatccagaaggacccccgggagtttgcctggagggaccctgagctgcctgaggtgatccacatgctgcagcaccagttccccagcgtgcaggccaatgctgctgcctacctgcagcacctgtgctttggagacaacaaggtgaagatggaggtgtgccgcctgggcggcatcaagcacctggtggacctgctggaccaccgggtgctggaggtgcagaagaatgcctgtggggccctgaggaacctggtgtttgggaagagcacagatgagaacaagatcgccatgaagaatgtgggcggcatcccagccctgctgcggctgctgaggaagagcattgatgctgaggtgcgggagctggtgactggagtgctgtggaacctgagcagctgtgatgctgtgaagatgaccatcatcagagatgccctgagcaccctgaccaacacagtgattgtgccccacagcggctggaacaacagcagctttgatgatgaccacaagatcaagttccagaccagcctggtgctgaggaacaccaccggctgcctgaggaacctgagcagcgctggggaggaggccaggaagcagatgaggagctgtgagggcctggtggacagcctgctgtatgtgatccacacctgtgtgaacaccagtgactatgacagcaagacagtggagaactgtgtgtgcaccctgaggaacctgagctaccgcctggagctggaggtgccccaggcccggctgctgggcctgaatgagctggatgacctgctgggcaaggagagccccagcaaggacagcgagcccagctgctggggcaagaagaagaagaagaagaagaggaccccccaggaggaccagtgggatggagtgggccccatccctggcctgagcaagagccccaagggcgtggagatgctgtggcaccccagcgtggtgaagccctacctgaccctgctggccgagagcagcaacccagccaccctggagggcagcgctggcagcctgcagaacctgtctgctggcaactggaagtttgctgcctacatccgggctgctgtgaggaaggagaagggcctgcccatcctggtggagctgctgaggatggacaatgacagagtggtgtcctctgtggccacagccctgaggaacatggccctggatgtgaggaacaaggagctgattggcaagtatgccatgagggacctggtgaaccggctgcccggcggcaatggccccagcgtgctgagtgatgagaccatggccgccatctgctgtgccctgcacgaggtgaccagcaagaacatggagaatgccaaggccctggccgacagcggcggcatcgagaagctggtgaacatcaccaagggccgcggggacaggagcagcctgaaggtggtgaaggccgccgcccaggtgctgaacaccctgtggcagtacagagacctgcggagcatctacaagaaggatggctggaaccagaaccacttcatcacccctgtgtccaccctggagcgggaccgcttcaagagccaccccagcctgagcaccaccaaccagcagatgagccccatcatccagagcgtgggcagcaccagcagcagccctgccctgctgggcatccgggaccccaggagtgaatatgacaggacccagccccccatgcagtactacaacagccagggagatgccacccacaagggcctgtacccaggcagcagcaagcccagccccatctacatcagcagctacagcagccctgcccgggagcagaacagaaggctgcagcaccagcagctgtactacagccaggatgacagcaacaggaagaactttgatgcctaccgcctgtacctgcagagcccccacagctatgaggacccctactttgatgacagagtgcacttccctgccagcacagactacagcacccagtatggcctgaagagcaccaccaactacgtggacttctacagcaccaagaggcccagctacagagctgagcagtacccaggcagcccagacagctgggtgtag

SEQ ID NO: 139671 - DNA, 3579 bp, Artificial Sequence
  derived and/or modified sequence
atgcccgcccccgagcaggccagcctggtggaggagggccagccccagacgaggcaggaggctgcatccaccgggcccgggatggagcccgaaactaccgctaccactatactggctagtgttaaggagcaggagctgcaattccagcggttaacccgtgagctggaagttgagaggcaaatcgttgctagccagctggaacgctgcaggttgggggcggagtccccaagtatagcctcaacgtcatccacggagaaatcatttccttggcgttccactgatgtccccaatactggggtttcaaaaccccgggtcagtgatgcggttcagcctaacaattatctaatccgaaccgaacctgagcaggggaccctctattctccagagcagacttcccttcacgaaagtgaaggatcgctgggcaatagtaggtcaagcactcagatgaacagctatagtgattccggctaccaagaagccgggtcgtttcataactcacagaacgtgtccaaggctgacaatagacagcagcatagctttataggatctactaataatcatgtcgtgagaaatagcagggcagaggggcagaccctggttcagcccagcgtcgcaaatagagccatgcgcagggtctcaagcgtgccctccagagctcagagcccctcttacgttatcagcactggagtaagtccctctaggggctccttaaggacttcccttgggtcaggcttcggcagtccctcagtcacagaccctaggcccctgaatccaagcgcctacagcagcaccactttacccgccgcccgagctgcctcaccatatagccagcgaccagcgtcccctactgcaatcaggcgaattggcagcgtgacctctcgccagactagcaatcccaatggccctacccctcagtaccagacaaccgctcgggtcggtagcccactgactctaacagatgctcaaactagggtggccagcccatcccaggggcaggtgggatcttcctcgcctaaacgcagcggaatgaccgctgtcccacaacacttggggccttctctccagagaaccgtccatgatatggagcagtttggccaacagcagtatgatatctatgagcgtatggttccaccacgtcctgattcacttactggcctgcgtagctcatacgcatctcaacacagccagctgggccaagatctgcggtcagcggttagtcccgacctgcatatcactccaatctatgaagggcgcacttattatagtcctgtctatcggagccctaaccacgggactgtggagctgcagggtagccagactgcactgtaccgtaccggctctgtcggaatcggtaacctacaacgcacctcatcccagaggagcacattgacttatcagcgaaataactacgccttgaataccacagcaacttatgcggagccgtatagaccgattcagtaccgcgttcaggagtgcaactacaacagacttcaacacgcagtcccagcagacgacggtaccacaaggtcacctagtatagactccatccaaaaagaccctagggagttcgcctggcgtgatcccgaattacccgaggtgatccatatgctgcagcatcagtttcccagcgtgcaggcgaacgccgctgcttacctccagcatctctgcttcggcgacaacaaggtgaagatggaagtgtgtcggctgggcggaatcaaacacttggtggacctgctggaccatagagtgctggaggtgcagaaaaatgcctgcggggctctgaggaatctcgtgttcggaaagtctactgatgagaataagatcgctatgaaaaatgtgggtggtattcccgccctgttgagactgctgaggaaatctatcgatgccgaggttagggaactcgtcaccggggtgctgtggaacttgtccagttgtgacgctgtgaagatgacgatcatccgtgacgcattgtccacgctcactaacactgttattgttccgcactccgggtggaataacagcagtttcgatgatgatcacaagatcaagtttcaaacatccctggtgctgcgcaataccacaggctgcctgcggaacctgtcatctgctggcgaagaggcccgcaagcagatgcggtcgtgcgaaggactcgttgatagtctgctctacgttattcacacgtgcgtaaatacatccgattacgatagcaagaccgtggagaattgtgtgtgcactctgagaaacctcagctatcgcctggaactcgaggtgccccaggctcggctgcttgggttgaatgagctggacgatctacttgggaaggagtccccctctaaggatagtgaacccagctgctggggcaagaagaaaaagaaaaagaaacgcaccccgcaggaggatcagtgggacggcgtggggccaatcccaggactgagcaaaagcccaaaaggagtagaaatgctgtggcacccgagcgtggtaaagccttacttgacactgctcgctgaaagcagtaaccctgctactctggaaggcagcgccgggtccctgcagaatctctcagccggcaactggaaattcgcagcctacatcagagccgcagttcgcaaagagaaggggctgcccattttagtcgaactgctgcggatggataatgaccgggtggtatccagtgttgcgactgctctcagaaacatggctctggacgttcgaaacaaagagcttattggaaaatacgctatgcgagatctggtcaacagactgccaggtggcaatggcccatcagtactgagcgacgaaacaatggccgccatctgttgtgctctgcacgaagtgacctcaaaaaatatggagaatgccaaagcattagctgacagcggcgggatcgaaaagttggttaatataacaaaggggaggggagatcgctcttcactcaaagttgtgaaagccgccgcccaggtcctgaacaccctatggcagtatagggaccttcgctccatctataagaaagacgggtggaaccaaaaccatttcatcacaccagtgtctactctcgaacgggaccggttcaaaagccatccctccctgagtactactaaccagcagatgagtcctatcattcaatccgtagggtcaacttcatcctctccggccttgttgggcataagagacccaaggagcgaatatgaccggacacagccaccaatgcagtattacaatagtcaaggtgacgccactcacaagggcctgtacccaggctctagcaaacctagtcccatctacatcagcagctactcttcaccagctagggaacagaaccgtcggctccagcatcaacagctatactacagccaggatgacagtaataggaaaaatttcgacgcgtacaggctgtatctgcaatcaccccattcttacgaagatccatatttcgatgatcgagtacacttccccgcgtcgacagactactcaacccagtacgggctgaaatcgacaaccaactatgtggatttttactcaacgaagaggccaagctaccgggcagaacaatacccaggcagcccagacagctgggtgtag

SEQ ID NO: 139672 - DNA, 823 bp, Artificial Sequence
  derived and/or modified sequence
acagcattcagaaggaccccaggcgaggagtttgcctggcgtgatcctgagttgcctgaggtcattcacatgcttcagcaccagttcccatctgttcaggcaaatgcagcggcctacctgcagcacctgtgctttggtgacaacaaagtgaagatggaggtgtgtaggttagggggaatcaagcatctggttgaccttctggaccacagagttggaagttcagaagaatgcttgtggtgcccttcgaaacctcgtttttggcaagtctacagatgaaaataaaatagcaatgaagaatgttggtgggatacctgccttgttgcgactgttgagaaaatctattgatgcagaagtaagggagcttgttacaggagttctttggaatttatcctcatgtgatgctgtaaaaatgacaatcattcgagatgctctctcaaccttaacaaacactgtgattgttccacattctggatggaataactcttcttttgatgatgatcataaaattaaatttcagacttcactagttctgcgtaacacgacaggttgcctaaggaacctcagctccgcgggggaagaagctcggaagcaaatgcggtcctgcgaggggctggtagactcactgttgtatgtgatccacacgtgtgtgaacacatccgattacgacagcaagacggtggagaactgcgtgtgcaccctgaggaacctgtcctatcggctggagctggaggtgccccaggcccggttactgggactgaacgaattggatgacttactaggaaaagagtctcccagcaaagactctgagccaagttgctggggg

SEQ ID NO: 139673 - DNA, 4443 bp, Artificial Sequence
  derived and/or modified sequence
gcgccgccgcggcacttttttaattttttcgggtgccgcagcggcgacccctcggcgccgatgtccctgatccctggagcgacgacggccgctgcctaagctggaaagaggaatgccagctcctgagcaggcctcattggtggaggaggggcaaccacagacccgccaggaagctgcctccactggcccaggcatggaacccgagaccacagccaccactattctagcatccgtgaaggagcaggagcttcagtttcagcgactcacccgagaactggaagtggaaaggcagattgttgccagtcagctagaaagatgtaggcttggagcagaatcaccaagcatcgccagcaccagctcaactgagaagtcatttccttggagatcaacagacgtgccaaatactggtgtaagcaaacctagagtttctgacgctgtccagcccaacaactatctcatcaggacagagccagaacaaggaaccctctattcaccagaacagacatctctccatgaaagtgagggatcattgggtaactcaagaagttcaacacaaatgaattcttattccgacagtggataccaggaagcagggagtttccacaacagccagaacgtgagcaaggcagacaacagacagcagcattcattcataggatcaactaacaaccatgtggtgaggaattcaagagctgaaggacaaacactggttcagccatcagtagccaatcgggccatgagaagagttagttcagttccatctagagcacagtctccttcttatgttatcagcacaggcgtgtctccttcaagggggtctctgagaacttctctgggtagtggatttggctctccgtcagtgaccgacccccgacctctgaaccccagtgcatattcctccaccacattacctgctgcacgggcagcctctccgtactcacagagacccgcctccccaacagctatacggcggattgggtcagtcacctcccggcagacctccaatcccaacggaccaacccctcaataccaaaccaccgccagagtggggtccccactgaccctgacggatgcacagactcgagtagcttccccatcccaaggccaggtggggtcgtcgtcccccaaacgctcagggatgaccgccgtaccacagcatctgggaccttcactgcaaaggactgttcatgacatggagcaattcggacagcagcagtatgacatttatgagaggatggttccacccaggccagacagcctgacaggcttacggagttcctatgctagtcagcatagtcagcttgggcaagaccttcgttctgccgtgtctcccgacttgcacattactcctatatatgaggggaggacctattacagcccagtgtaccgcagcccaaaccatggaactgtggagctccaaggatcgcagacggcgttgtatcgcacaggttcagtaggtattggaaatctacaaaggacatccagccaacgaagtacccttacataccaaagaaataattatgctctgaacacaacagctacctacgcggagccctacaggcctatacaataccgagtgcaagagtgcaattataacaggcttcagcatgcagtgccggctgatgatggcaccacaagatccccatcaatagacagcattcagaaggaccccagggagtttgcctggcgtgatcctgagttgcctgaggtcattcacatgcttcagcaccagttcccatctgttcaggcaaatgcagcggcctacctgcagcacctgtgctttggtgacaacaaagtgaagatggaggtgtgtaggttagggggaatcaagcatctggttgaccttctggaccacagagttttggaagttcagaagaatgcttgtggtgcccttcgaaacctcgtttttggcaagtctacagatgaaaataaaatagcaatgaagaatgttggtgggatacctgccttgttgcgactgttgagaaaatctattgatgcagaagtaagggagcttgttacaggagttctttggaatttatcctcatgtgatgctgtaaaaatgacaatcattcgagatgctctctcaaccttaacaaacactgtgattgttccacattctggatggaataactcttcttttgatgatgatcataaaattaaatttcagacttcactagttctgcgtaacacgacaggttgcctaaggaacctcagctccgcgggggaagaagctcggaagcaaatgcggtcctgcgaggggctggtagactcactgttgtatgtgatccacacgtgtgtgaacacatccgattacgacagcaagacggtggagaactgcgtgtgcaccctgaggaacctgtcctatcggctggagctggaggtgccccaggcccggttactgggactgaacgaattggatgacttactaggaaaagagtctcccagcaaagactctgagccaagttgctgggggaagaagaagaaaaagaaaaagaggactccgcaagaagatcaatgggatggagttggtcctatcccaggactgtcgaagtcccccaaaggggttgagatgctgtggcacccatcggtggtaaaaccatatctgactcttctagcagaaagttccaacccagccaccttggaaggctctgcagggtctctccagaacctctctgctggcaactggaagtttgcagcatatatccgggcggccgtccgaaaagaaaaggggctccccatccttgtggagcttctgagaatggataacgatagagttgtttcttccgtggcaacagccttgaggaatatggcactagatgttcgcaacaaggagctcataggcaaatacgccatgcgagacctggtcaaccggctccccggcggcaatggccccagtgtcttgtctgatgagaccatggcagccatctgctgtgctctgcacgaggtcaccagcaaaaacatggagaacgcaaaagccctggccgactcaggaggcatagagaagctggtgaacataaccaaaggcaggggcgacagatcatctctgaaagtggtgaaggcagcagcccaggtcttgaatacattatggcaatatcgggacctccggagcatttataaaaaggatgggtggaatcagaaccattttattacacctgtgtcgacattggagcgagaccgattcaaatcacatccttccttgtctaccaccaaccaacagatgtcacccatcattcagtcagtcggcagcacctcttcctcaccagcactgttaggaatcagagaccctcgctctgaatacgataggacccagccacctatgcagtattacaatagccaaggggatgccacacataaaggcctgtaccctggctccagcaaaccttcaccaatttacatcagttcctattcctcaccagcaagagaacaaaatagacggctacagcatcaacagctgtattatagtcaagatgactccaacagaaagaactttgatgcatacagattgtatttgcagtctcctcatagctatgaagatccttattttgatgaccgagttcactttccagcttctactgattactcaacacagtatggactgaaatcgaccacaaattatgtagacttttattccactaaacgaccttcttatagagcagaacagtacccagggtccccagactcatgggtgtagcatcaagatgcccaacagaggaactctttctttctaaccttgttcagattgaggtgaaaagtccatcttgctgatttgatgattgaaatgtgaaagtgaagtggaaggaatgaatgaagtgtgttttttttttcttttttgaggaattatcagggaagtgaggaaatgtttgggagaggactttctaagctctatttaggtgttagatctaattacttatagattctgtagtctggtgaaggtgtgggtgacgtgatgagaggtttgagaaatgggtgaaatgaaatgggggatatgtaggtcaaatcaaattaaagatgatttttttaatgtgaataaagttatgttctgatagtttgtacagaaaaaataaaatggatgcccatgttttattgctattactaaatgtcaagattgtatgctattatgtcttgtaaatttcttttgttggtgtaaatatggaaatgccacattggttaagtgccatcatttgtaatgcaatgtgtcacttgaaaagagatttgaagaaactgacaacttcaaaaacaaatgagaagcccaaggaactgtgagcaattaaaagcaaaccgcgacaccctttgtctccaccacacatagtgtactttggaagcacaacgtccaggctggtaccgcagcgccatgcccattcctcgcctcattcataggacacttcactgccattttctattcacataaaagaaaaataaatgtggaaatttcatccttggaaa

SEQ ID NO: 139674 - DNA, 3579 bp, Artificial Sequence
  derived and/or modified sequence
atgcctgcacctgagcaggcctctctggtggaggagggccagcctcagacccggcaggaggccgcatctaccggacccggtatggaacccgagacgacagctactaccatcttggcctccgtcaaggagcaggagctgcaatttcagagactgactcgtgaactggaggttgaacgccaaatagtcgcatcccagctggaaaggtgccggcttggcgctgaatcaccctcaattgccagcactagttcaaccgagaagagctttccgtggagatctaccgacgtacctaacaccggggtgagtaagcctagagtttcggatgctgtgcagccaaacaactacttgatccggaccgaaccagaacagggaacgctgtacagcccagaacagacctctctgcacgagtccgaaggcagtctagggaattctagatcgtctacccagatgaactcctatagcgacagcggataccaagaggctggtagcttccacaactctcaaaacgtgagtaaggcggacaataggcaacagcattccttcatcggatctactaacaatcatgttgtccggaacagtagagcagaaggccaaaccctggtccagcctagcgtggcgaaccgagccatgaggagggtgtcaagcgtaccaagtagagcccagagcccctcctacgttataagcacaggggtgtccccaagcagaggcagcctgcgcacatcgttaggttccgggttcggcagccctagtgtgactgatcctcgtcccctgaacccatctgcttattcctccacaacccttcctgcagctcgggcagcttcaccttacagccagaggcctgcgtctcctaccgccatcagacgtatcggatcggttacctcgcggcagacatctaatcctaatggtcctaccccacaatatcagactaccgcacgcgtcggaagtcctctgaccctaaccgacgcacagacgcgggtggcctcacctagccagggccaggtggggtcctcttcccccaaaaggagcggtatgacggcggtaccccagcacctagggccatccctgcaaaggacagtgcacgatatggagcagttcggacagcaacagtacgacatctacgaacggatggtgcccccacgccctgacagtctgactggattgcggtcctcatacgcaagtcagcatagccaactaggacaagacctgcggagtgctgtcagccccgatctccacattaccccaatctacgaaggccgtacttattattcccctgtgtataggtcgccaaaccacgggaccgtggagctgcaggggtcgcaaaccgcattgtatcggacgggctcagtcgggattggcaacctccagagaacgtcttcacagcgtagtacgctaacatatcagcgtaataactacgccctgaatacaactgcaacttacgccgaaccgtatcggccaatacaatacagagtgcaggagtgtaattacaatcgcctccagcatgccgtgcccgctgatgatggcacaacaagatctcccagtattgatagcattcaaaaggatcccagagaattcgcatggcgcgaccccgagttaccagaagttatccatatgttgcagcaccagttcccttccgtccaagcaaacgccgcagcttacttgcagcatctgtgtttcggtgataacaaagtcaagatggaggtgtgtcgcctcggcggtataaaacacctagtggacctactggatcatagagtgctggaagtccagaaaaacgcttgtggcgcattaagaaaccttgtgttcggcaaatccaccgatgaaaataagattgctatgaaaaatgtgggaggaatccccgctctcctgaggctgttgaggaaaagtattgacgcagaagtgcgcgagcttgtgaccggcgtgctctggaatttaagctcttgcgacgccgtcaaaatgactatcatcagagatgctctgagtacgctcactaacactgtcattgtgcctcacagcgggtggaataactcctcctttgatgatgaccataagatcaagtttcagacctcactggtgctcagaaataccacagggtgtctccgcaacttgtcgtcagccggagaggaagcacggaagcagatgagatcctgcgagggacttgtcgattcactcctgtatgtgattcatacatgcgtgaataccagcgactacgattcaaagaccgttgaaaactgcgtgtgcaccctgcggaaccttagctataggctggagttggaggtgccacaagcgagattactgggcctcaatgaactagacgatttgctgggaaaagagtctccatcgaaggattctgagcccagttgctgggggaaaaagaagaagaaaaagaaaagaacacctcaggaggaccaatgggacggagtaggaccaatcccgggtctctccaaatcccccaaaggagtcgaaatgctttggcacccatctgtggtcaaaccctacctaactctgctagcagagagtagcaatccggctaccctggaggggagtgcaggcagcctacagaacctatcagccggaaactggaagtttgccgcatatatcagagccgcagtaagaaaagaaaaaggattgcctatccttgttgagcttctgagaatggataacgatcgggtagtaagtagtgtggcaaccgcactcaggaacatggctctggacgtgaggaataaggagctcatcggaaagtacgcaatgcgggaccttgtgaatcgtctcccagggggaaatggtccctccgtactgagcgatgagacgatggccgctatatgttgtgctcttcatgaggtgacctccaaaaatatggagaacgcaaaggcactcgccgactccggcggtatcgagaagttggtgaacattaccaaaggtcgcggtgatcgctccagcctgaaggtcgtcaaggcagctgcgcaggtgctgaatactctgtggcagtatcgggatctgcgctcaatttacaaaaaagacgggtggaatcagaatcacttcattacacctgtcagcaccctggagcgcgatcggtttaagtctcacccgagtttgtctactacgaatcaacagatgtcacctatcatccagtctgttggctcgacaagctcttcacccgcacttctgggcatcagggacccgagatctgagtatgataggacccagccacctatgcagtactataactcccagggcgacgccacccataagggcctgtacccgggatcttctaagccttcccctatctatatctcaagttacagtagcccggctcgcgagcagaatagacgtctccagcaccagcaactatactactcacaggacgactccaatcgcaagaattttgatgcttaccggttatacctccagtccccccactcttatgaagatccttacttcgacgacagggtccatttccccgcaagtaccgactacagcacacagtacggtctgaagagcactacgaattatgttgatttttactccacaaagaggccatcataccgcgctgaacagtacccaggatcccctgactcttgggtctag

SEQ ID NO: 139675 - DNA, 3579 bp, Artificial Sequence
  derived and/or modified sequence
atgcccgcccccgagcaggccagcctggtggaggagggccagccccagaccagacaggaggccgccagcaccggccccggcatggagcccgagaccaccgccaccaccatcctggccagcgtgaaggagcaggagctgcagttccagagactgaccagagagctggaggtggagagacagatcgtggccagccagctggagagatgcagactgggcgccgagagccccagcatcgccagcaccagcagcaccgagaagagcttcccctggagaagcaccgacgtgcccaacaccggcgtgagcaagcccagagtgagcgacgccgtgcagcccaacaactacctgatcagaaccgagcccgagcagggcaccctgtacagccccgagcagaccagcctgcacgagagcgagggcagcctgggcaacagcagaagcagcacccagatgaacagctacagcgacagcggctaccaggaggccggcagcttccacaacagccagaacgtgagcaaggccgacaacagacagcagcacagcttcatcggcagcaccaacaaccacgtggtgagaaacagcagagccgagggccagaccctggtgcagcccagcgtggccaacagagccatgagaagagtgagcagcgtgcccagcagagcccagagccccagctacgtgatcagcaccggcgtgagccccagcagaggcagcctgagaaccagcctgggcagcggcttcggcagccccagcgtgaccgaccccagacccctgaaccccagcgcctacagcagcaccaccctgcccgccgccagagccgccagcccctacagccagagacccgccagccccaccgccatcagaagaatcggcagcgtgaccagcagacagaccagcaaccccaacggccccaccccccagtaccagaccaccgccagagtgggcagccccctgaccctgaccgacgcccagaccagagtggccagccccagccagggccaggtgggcagcagcagccccaagagaagcggcatgaccgccgtgccccagcacctgggccccagcctgcagagaaccgtgcacgacatggagcagttcggccagcagcagtacgacatctacgagagaatggtgccccccagacccgacagcctgaccggcctgagaagcagctacgccagccagcacagccagctgggccaggacctgagaagcgccgtgagccccgacctgcacatcacccccatctacgagggcagaacctactacagccccgtgtacagaagccccaaccacggcaccgtggagctgcagggcagccagaccgccctgtacagaaccggcagcgtgggcatcggcaacctgcagagaaccagcagccagagaagcaccctgacctaccagagaaacaactacgccctgaacaccaccgccacctacgccgagccctacagacccatccagtacagagtgcaggagtgcaactacaacagactgcagcacgccgtgcccgccgacgacggcaccaccagaagccccagcatcgacagcatccagaaggaccccagagagttcgcctggagagaccccgagctgcccgaggtgatccacatgctgcagcaccagttccccagcgtgcaggccaacgccgccgcctacctgcagcacctgtgcttcggcgacaacaaggtgaagatggaggtgtgcagactgggcggcatcaagcacctggtggacctgctggaccacagagtgctggaggtgcagaagaacgcctgcggcgccctgagaaacctggtgttcggcaagagcaccgacgagaacaagatcgccatgaagaacgtgggcggcatccccgccctgctgagactgctgagaaagagcatcgacgccgaggtgagagagctggtgaccggcgtgctgtggaacctgagcagctgcgacgccgtgaagatgaccatcatcagagacgccctgagcaccctgaccaacaccgtgatcgtgccccacagcggctggaacaacagcagcttcgacgacgaccacaagatcaagttccagaccagcctggtgctgagaaacaccaccggctgcctgagaaacctgagcagcgccggcgaggaggccagaaagcagatgagaagctgcgagggcctggtggacagcctgctgtacgtgatccacacctgcgtgaacaccagcgactacgacagcaagaccgtggagaactgcgtgtgcaccctgagaaacctgagctacagactggagctggaggtgccccaggccagactgctgggcctgaacgagctggacgacctgctgggcaaggagagccccagcaaggacagcgagcccagctgctggggcaagaagaagaagaagaagaagagaaccccccaggaggaccagtgggacggcgtgggccccatccccggcctgagcaagagccccaagggcgtggagatgctgtggcaccccagcgtggtgaagccctacctgaccctgctggccgagagcagcaaccccgccaccctggagggcagcgccggcagcctgcagaacctgagcgccggcaactggaagttcgccgcctacatcagagccgccgtgagaaaggagaagggcctgcccatcctggtggagctgctgagaatggacaacgacagagtggtgagcagcgtggccaccgccctgagaaacatggccctggacgtgagaaacaaggagctgatcggcaagtacgccatgagagacctggtgaacagactgcccggcggcaacggccccagcgtgctgagcgacgagaccatggccgccatctgctgcgccctgcacgaggtgaccagcaagaacatggagaacgccaaggccctggccgacagcggcggcatcgagaagctggtgaacatcaccaagggcagaggcgacagaagcagcctgaaggtggtgaaggccgccgcccaggtgctgaacaccctgtggcagtacagagacctgagaagcatctacaagaaggacggctggaaccagaaccacttcatcacccccgtgagcaccctggagagagacagattcaagagccaccccagcctgagcaccaccaaccagcagatgagccccatcatccagagcgtgggcagcaccagcagcagccccgccctgctgggcatcagagaccccagaagcgagtacgacagaacccagccccccatgcagtactacaacagccagggcgacgccacccacaagggcctgtaccccggcagcagcaagcccagccccatctacatcagcagctacagcagccccgccagagagcagaacagaagactgcagcaccagcagctgtactacagccaggacgacagcaacagaaagaacttcgacgcctacagactgtacctgcagagcccccacagctacgaggacccctacttcgacgacagagtgcacttccccgccagcaccgactacagcacccagtacggcctgaagagcaccaccaactacgtggacttctacagcaccaagagacccagctacagagccgagcagtaccccggcagccccgacagctgggtgtag

SEQ ID NO: 139676 - protein, 182 aa, Artificial Sequence
  derived and/or modified sequence
MLRSVWNFLKRHKKKCIFLGTVLGVLSMLPTLREALMQQLNSESLTALLKNRPSNKLEIWEDLKIISFTRSTVAVYSTCMLVVLLRVQLNIIGGYIYLDNAAVGKNGTTILAPPDVQQQYLSSIQHLLGDGLTELITVIKQAVQKVLGSVSLKHSLSLLDLEQKLKEIRNLVEQHKSSSWIN

SEQ ID NO: 139677 - protein, 373 aa, Artificial Sequence
  derived and/or modified sequence
MLRSVWNFLKRHKKKCIFLGTVLGGVYILGKYGQKKIREIQEREAAEYIAQARRQYHFESNQRTCNMTVLSMLPTLREALMQQLNSESLTALLKNRPSNKLEIWEDLKIISFTRSTVAVYSTCMLVVLLRVQLNIIGGYIYLDNAAVGKNGTTILAPPDVQQQYLSSIQHLLGDGLTELITVIKQAVQKVLGSVSLKHSLSLLDLEQKLKEIRNLVEQHKSSSWINKDGSKPLLCHYMMPDEETPLAVQACGLSPRDITTIKLLNETRDMLESPDFSTVLNTCLNRGFSRLLDNMAEFFRPTEQDLQHGNSMNSLSSVSLPLAKIIPIVNGQIHSVCSETPSHFVQDLLTMEQVKDFAANVYEAFSTPQQLEK

SEQ ID NO: 139678 - DNA, 549 bp, Artificial Sequence
  derived and/or modified sequence
atgttgagatccgtgtggaattttctgaaaaggcacaaaaaaaagtgcatcttcctcggcacagtgttaggcgtcctctctatgctgcccactctgcgggaggccctgatgcagcaactaaattcagagagcctgaccgcactgctgaaaaatcgaccgtcaaacaagctggagatctgggaagacttaaagattatttccttcaccagatccacggtggctgtatacagtacttgcatgctcgttgtgttactaagggttcagttgaatattatcggaggttatatatacctggataatgctgcggtggggaagaacgggactaccatactggcccccccagatgttcaacagcagtacttgagcagcattcagcatctgttaggcgatgggctgacagagttaatcacagtgataaaacaggcagtgcagaaggtgctgggcagcgtgagtctcaaacatagtctcagcctgctagatctggagcaaaaactgaaggagatccgaaaccttgttgaacagcataagtcttcttcttggattaattag

SEQ ID NO: 139679 - DNA, 1122 bp, Artificial Sequence
  derived and/or modified sequence
atgctcaggtccgtgtggaattttttgaaacgacacaaaaagaagtgcattttccttggaacggtgcttggtggtgtttacatcttggggaagtacggccaaaagaagatcagagaaatccaagaacgcgaggccgcagaatatattgcccaggcacgacggcagtatcacttcgaatccaatcagaggacgtgcaatatgacggtcttgtcaatgttgcccaccttgcgcgaggcactgatgcagcagctgaactcagagtctctgactgccctgctcaaaaaccgaccttctaacaaactcgaaatctgggaggatctcaagataatttctttcaccagaagcacagttgccgtgtactctacctgcatgttagtggttctgttgagggtacaactaaacattatcggaggctatatttatctcgataacgcggctgtggggaaaaacgggacaacaattctcgcaccaccagatgtgcagcagcagtacctctccagcattcagcacctcctcggcgacggactgaccgagcttattactgttattaaacaggctgtgcagaaggtgttgggctcggtgagcttgaagcattcccttagtctgctggacctggaacagaagctgaaggaaattaggaatctggtggagcagcataagagctctagctggataaacaaggatggatcaaaaccattgttgtgccattatatgatgccagacgaggagactcccttagccgtgcaagcgtgcggcttatcccctcgtgacatcactaccatcaagctactaaatgagacacgtgacatgctcgagtctccagacttcagcaccgtgctgaacacatgtttaaatagaggattcagccggctgcttgacaacatggctgaattttttaggccgacagaacaggatctgcagcacggaaactcgatgaattcactatcctcggtaagtctgcccttggcgaaaattattccaattgttaacggacagattcacagcgtgtgtagcgagaccccctctcattttgtgcaggatctgctcacaatggagcaggtaaaagacttcgctgctaacgtttacgaggcctttagcaccccccagcagctggaaaaatag

SEQ ID NO: 139680 - DNA, 549 bp, Artificial Sequence
  derived and/or modified sequence
atgttgagaagtgtgtggaacttcctgaaacggcataagaaaaagtgcatctttctagggacagtgttaggcgtgctgtcaatgttgccaacactgagagaggcactgatgcagcaactgaatagcgaatccctgaccgccctgctcaaaaatcgtcccagtaacaagcttgagatttgggaagatctcaagataataagcttcacccgaagcaccgtagccgtgtatagcacctgtatgctggttgtgctgctgagagttcagttaaatatcattggcggatacatttaccttgacaacgcggcggtgggtaaaaacgggactaccatcctagctcctccagatgttcagcaacaatatctgtctagcatccagcacctgctgggagacggattgacagaactcatcacagttattaaacaggccgtgcagaaggtgctgggttcggtctcactgaaacatagcctatctcttctggacttagagcagaagttgaaggaaattcgcaacctggtggaacagcataagtcgtcgagctggatcaattag

SEQ ID NO: 139681 - DNA, 549 bp, Artificial Sequence
  derived and/or modified sequence
atgctgcggtctgtgtggaacttcctgaagaggcacaagaagaagtgcatcttcctgggcaccgtgctgggcgtgctgtccatgctgcccaccctgcgggaggccctgatgcagcagctgaacagcgagagcctgacagccctgctgaagaaccggcccagcaacaagctggagatctgggaggacctgaagatcatctccttcaccaggagcacagtggccgtgtacagcacctgcatgctggtggtgctgctgcgggtgcagctgaacatcatcggcggctacatctacctggacaatgctgctgtgggcaagaatggcaccaccatcctggcccccccagatgtgcagcagcagtacctgagcagcatccagcacctgctgggagatggcctgacagagctgatcaccgtcatcaagcaggccgtgcagaaggtgctgggctctgtgtccctgaagcacagcctgagcctgctggacctggagcagaagctgaaggagatccggaacctggtggagcagcacaagagcagctcctggatcaactag

SEQ ID NO: 139682 - DNA, 1122 bp, Artificial Sequence
  derived and/or modified sequence
atgctgcggtctgtgtggaacttcctgaagaggcacaagaagaagtgcatcttcctgggcaccgtgctgggcggcgtgtacatcctgggcaagtatggccagaagaagatccgggagatccaggagcgggaggccgctgagtacatcgcccaggcccggcggcagtaccactttgagagcaaccagaggacctgcaacatgacagtgctgtccatgctgcccaccctgcgggaggccctgatgcagcagctgaacagcgagagcctgacagccctgctgaagaaccggcccagcaacaagctggagatctgggaggacctgaagatcatctccttcaccaggagcacagtggccgtgtacagcacctgcatgctggtggtgctgctgcgggtgcagctgaacatcatcggcggctacatctacctggacaatgctgctgtgggcaagaatggcaccaccatcctggcccccccagatgtgcagcagcagtacctgagcagcatccagcacctgctgggagatggcctgacagagctgatcaccgtcatcaagcaggccgtgcagaaggtgctgggctctgtgtccctgaagcacagcctgagcctgctggacctggagcagaagctgaaggagatccggaacctggtggagcagcacaagagcagctcctggatcaacaaggatggcagcaagcccctgctgtgccactacatgatgccagatgaggagacccccctggccgtgcaggcctgtggcctgagcccccgggacatcaccaccatcaagctgctgaatgagacccgggacatgctggagagcccagacttcagcacagtgctgaacacctgcctgaacagaggcttcagccggctgctggacaacatggccgagttcttccggcccacagagcaggacctgcagcacggcaacagcatgaacagcctgagctctgtgtccctgcccctggccaagatcatccccatcgtgaatggccagatccacagcgtgtgcagcgagacccccagccactttgtgcaggacctgctgaccatggagcaggtgaaggactttgctgccaacgtgtatgaggccttcagcaccccccagcagctggagaagtag

SEQ ID NO: 139683 - DNA, 549 bp, Artificial Sequence
  derived and/or modified sequence
atgctgcggagcgtgtggaacttcctgaagcggcacaagaagaagtgcatttttttggggacggtgttgggcgtgctttctatgctgccaacccttagggaagctctgatgcagcaactgaatagtgaatccctcacggccctgctaaaaaatcggccatccaataaactggagatttgggaggaccttaaaatcatttcctttaccagatccacagtggctgtgtattccacctgcatgcttgtcgtccttttacgggtccagctcaatatcatcggcggatacatctaccttgacaacgcagcagtgggaaagaacggtaccacaatcctggcaccccctgatgtgcaacagcagtatttgtcatccatccagcacctcctcggcgacggcctaacggaattgattaccgtcattaagcaagcggtccagaaagtgcttggctcagtttctttaaagcattccttgtctctgctcgatctggaacaaaaactcaaggaaatcaggaatcttgtcgaacagcacaagtccagctcttggatcaattag

SEQ ID NO: 139684 - DNA, 1122 bp, Artificial Sequence
  derived and/or modified sequence
atgctgcggagcgtgtggaacttcctgaagcggcacaagaagaagtgcatctttctgggcaccgtgctgggtggtgtgtacatcctcggcaaatatgggcaaaaaaagattcgagagattcaagagagggaagccgccgaatacattgcccaggcgcgtaggcagtaccattttgagagtaaccaacgcacctgcaatatgacagtgttatctatgctccccacgctgagggaagccttaatgcagcagcttaatagcgagtctctgacagcactcctcaagaaccgaccttcaaataagctggaaatatgggaggatcttaagatcatcagcttcactcgcagtacggtcgccgtgtactctacctgtatgctggttgtgctactgcgagtgcagctgaacatcatcgggggatacatctacctagataatgccgcggtgggaaaaaacggtacaactattcttgcacctcccgacgtccaacaacagtacttgagtagcatccagcaccttctgggagacggccttactgagcttataactgtgatcaagcaagccgtgcaaaaggtgctcggctccgtgagcctcaaacactccctttctttgctggatctggaacaaaagttaaaagagattcggaacctcgttgagcagcataagtcttcaagctggattaacaaggatggctccaagccactgttatgtcactacatgatgccagacgaagaaacacccttggccgtgcaagcgtgtggattaagcccccgggacattaccacaatcaaattgctaaacgagacccgggatatgctagagtctccagacttcagtacagtgctgaacacttgtctgaaccgaggatttagccgccttttggataacatggccgaatttttccggccaaccgagcaggacctgcagcatggtaattcgatgaacagcctttccagcgtgagtcttccactcgccaagatcatccccattgttaatgggcagattcattctgtctgttctgagacaccgtcccatttcgtgcaagatctccttaccatggaacaggtcaaggactttgctgctaacgtgtacgaggctttctctacgccgcagcaactggagaagtag

SEQ ID NO: 139685 - DNA, 549 bp, Artificial Sequence
  derived and/or modified sequence
atgctgcggagcgtgtggaacttcctgaagcggcacaagaagaagtgtatattcctgggtacagtcttgggagttctgtcgatgctaccaacattacgggaggctctgatgcagcaactcaacagcgagtctcttaccgctctcctcaaaaatcgccctagcaacaagctggaaatttgggaggatctgaaaattatcagtttcacacggtctaccgttgcggtgtactcaacctgcatgctggtagtgctgttgcgcgtccaactaaatatcattggagggtacatttacctggacaatgccgccgtgggtaaaaatggcacgacgatcttagccccaccagatgtgcaacagcaatacctgtcatccattcaacatcttctgggggatggactgactgagctaattaccgttattaagcaggcagtgcaaaaggttttgggttccgtgtctttaaagcacagcctgagtctcctggacctggagcagaaactaaaggagattcggaacctagttgaacagcataagtcttcaagctggatcaattag

SEQ ID NO: 139686 - DNA, 2642 bp, Artificial Sequence
  derived and/or modified sequence
gaacggacctgggcttgtcggaccagtgagcggcggcggctgcgcggcggcagcggcagaaagcgtagctgctttgctgtagtccacgcccccttgccgctccggtgacagtctctgcggaaagtcacgtttgtgatttcgggagagcacagaacgggacgacggcgctcttgctgggtcatctgggccaggtgacgaagaaacagtttcctggtgaagcagtccctcacccctagtcagcccacacccctagggcctaaagatgctgaggtctgtatggaattttctgaaacgccacaaaaagaaatgcatcttcctgggcacggtccttggagtgctgtccatgcttccaacactgagagaggccttaatgcagcaactgaattccgagagcctcacagctctgctaaaaaacaggccttcaaacaagctagaaatatgggaggatctgaagataataagtttcacaagaagtactgtggctgtatacagtacctgtatgctggttgttcttttgcgggtccagttaaacataattggtggatatatttacctggataatgcagcagttggcaaaaatggcactacaattcttgctcccccagatgtccaacagcagtatttatcaagtattcagcacctacttggagatggcctgacagaattgatcactgtcattaaacaagctgtgcagaaggttttaggaagtgtttctcttaaacattctttgtcccttttggacttggagcaaaaactaaaagaaatcagaaatctcgttgagcagcataagtcttcttcttggattaataaagatggatccaaacctttattatgccattatatgatgccagatgaagaaactccattagcagtgcaggcctgtggactttctcctcgagacattaccactattaaacttctcaatgaaactagagacatgttggaaagcccagattttagtacagttttgaatacctgtttaaaccgaggttttagtagacttctagacaatatggctgagttctttcgacctactgaacaggacctgcaacatggtaactctatgaatagtctttccagtgtcagcctgcctttagctaagataattccaatagtaaacggacagatccattcagtttgcagtgaaacacctagtcattttgttcaggatctgttgacaatggagcaagtgaaagactttgctgctaatgtgtatgaagcttttagtacccctcagcaactggagaaatgatttttccttcaagaaaaactacagtgggattcatttactttttaaaatacactgggtaaatcacctatacttagagtaacagtttgttatcaaaatgcctgataaaatatattcttaataaaagtcttcatttcataatgaaatcaatttatttggcatcttaatatatttttttagattcatcaacagaccagtttttgtgggcatatatatatacacgtgcaaatatcagaattgttaataatttgttacacatggacatttgttccaaactgactaaaaatcaatatagatattttatatacatatatatatataaaaatacaaaattcagtgtactttaccatattaatactgaggaaaaatctgttggagacataggtctaggatgtgtgaagtttggaaaaatatgctatttaattataatgttccctagactgctgtaaacagaagtgaatcagacttttctccagctacctttcaaaataataaattatttgtctcaaatataccttgatggaggacttttttattcttatggaaatagtgaattccaacaactatgatgaactatgttctttgctatttcttcactatattttttaaggttttattaaaaagccttagaaagttacatattggtttagaggctaaaattgtgttgatgctgtttactcacctaattacatagttttaatcatttgtacataattttaaaaacttactttgtattgattttgaatacagtgaaaatcttattgcaataaactattttagtaaaatattattttgttgagttaatatttttcagctattaatttacttatcccatagcatttttgttattatttcggaagagagagcatgctagtttaagtttcattttaattggtcgtgtacttggtgcttttttgttgttgttaacttgttcatttagtaaaaagcaaatagctttactttctgaaaaagaaataattcattatctctagtaatacatctgtaattcttcatttagaagggtaattagggcaaaagtaaataaatcattatatatcattagtatgttgacatatattttcagtaacattgttttatgttcctccagcgtaacatgtagctgaacagtagaaggtagaaaataaattatgacatctcttctaaggcctggctaggcctgaagctcactgccagggagtttgtgtctagaatgtttttaaaaataggtagtggagccatagccctcaccatagacacctctgagcccactggcattgtctctgagcagaagatggctgtgccactcacatatgctaatcttggcaaatctgccaagcatgtcttcaccaagggatatggatttggcttaataaaacctgatttgaaaacaaaa

SEQ ID NO: 139687 - DNA, 1969 bp, Artificial Sequence
  derived and/or modified sequence
gaaacagtttcctggtgaagcagtccctcacccctagtcagcccacacccctagggcctaaagatgctgaggtctgtatggaattttctgaaacgccacaaaaagaaatgcatcttcctgggcacggtccttggaggagtatatattctggggaaatatggacagaagaaaatcagagaaatacaggaaagggaggctgcagaatacattgcccaagcacgacgacaatatcattttgaaagtaaccagaggacttgcaatatgacagtgctgtccatgcttccaacactgagagaggccttaatgcagcaactgaattccgagagcctcacagctctgctaaaaaacaggccttcaaacaagctagaaatatgggaggatctgaagataataagtttcacaagaagtactgtggctgtatacagtacctgtatgctggttgttcttttgcgggtccagttaaacataattggtggatatatttacctggataatgcagcagttggcaaaaatggcactacaattcttgctcccccagatgtccaacagcagtatttatcaagtattcagcacctacttggagatggcctgacagaattgatcactgtcattaaacaagctgtgcagaaggttttaggaagtgtttctcttaaacattctttgtcccttttggacttggagcaaaaactaaaagaaatcagaaatctcgttgagcagcataagtcttcttcttggattaataaagatggatccaaacctttattatgccattatatgatgccagatgaagaaactccattagcagtgcaggcctgtggactttctcctcgagacattaccactattaaacttctcaatgaaactagagacatgttggaaagcccagattttagtacagttttgaatacctgtttaaaccgaggttttagtagacttctagacaatatggctgagttctttcgacctactgaacaggacctgcaacatggtaactctatgaatagtctttccagtgtcagcctgcctttagctaagataattccaatagtaaacggacagatccattcagtttgcagtgaaacacctagtcattttgttcaggatctgttgacaatggagcaagtgaaagactttgctgctaatgtgtatgaagcttttagtacccctcagcaactggagaaatgatttttccttcaagaaaaactacagtgggattcatttactttttaaaatacactgggtaaatcacctatacttagagtaacagtttgttatcaaaatgcctgataaaatatattcttaataaaagtcttcatttcataatgaaatcaatttatttggcatcttaatatatttttttagattcatcaacagaccagtttttgtgggcatatatatatacacgtgcaaatatcagaattgttaataatttgttacacatggacatttgttccaaactgactaaaaatcaatatagatattttatatacatatatatatataaaaatacaaaattcagtgtactttaccatattaatactgaggaaaaatctgttggagacataggtctaggatgtgtgaagtttggaaaaatatgctatttaattataatgttccctagactgctgtaaacagaagtgaatcagacttttctccagctacctttcaaaataataaattatttgtctcaaatataccttgatggaggacttttttattcttatggaaatagtgaattccaacaactatgatgaactatgttctttgctatttcttcactatattttttaaggttttattaaaaagccttagaaagttacatattggtttagaggctaaaattgtgttgatgctgtttactcacctaattacatagttttaatcatttgtacataattttaaaaacttactttgtattgattttgaatacagtgaaaatcttattgcaataaactattttagtaaaata

SEQ ID NO: 139688 - DNA, 784 bp, Artificial Sequence
  derived and/or modified sequence
tgagcggcggcggctgcgcggcggcagcggcagaaagcgtagctgctttgctgtagtccacgcccccttgccgctccggtgacagtctctgcggaaagtcacgtttgtgatttcgggagagcacagaacgggacgacggcgctcttgctgggtcatctgggccaggtgacgaagaaacagtttcctggtgaagcagtccctcacccctagtcagcccacacccctagggcctaaagatgctgaggtctgtatggaattttctgaaacgccacaaaaagaaatgcatcttcctgggcacggtccttggagtgctgtccatgcttccaacactgagagaggccttaatgcagcaactgaattccgagagcctcacagctctgctaaaaaacaggccttcaaacaagctagaaatatgggaggatctgaagataataagtttcacaagaagtactgtggctgtatacagtacctgtatgctggttgttcttttgcgggtccagttaaacataattggtggatatatttacctggataatgcagcagttggcaaaaatggcactacaattcttgctcccccagatgtccaacagcagtatttatcaagtattcagcacctacttggagatggcctgacagaattgatcactgtcattaaacaagctgtgcagaaggttttaggaagtgtttctcttaaacattctttgtcccttttggacttggagcaaaaactaaaagaaatcagaaatctcgttgagcagcataagtcttcttcttggattaataa

SEQ ID NO: 139689 - DNA, 549 bp, Artificial Sequence
  derived and/or modified sequence
atgctcagatcggtctggaatttcctgaagcgccacaagaaaaagtgtatcttcctgggcaccgtactgggagtgctctccatgcttccaacactgagagaggccctgatgcagcagctgaactcagaatccctaaccgccctattaaaaaacaggccaagcaacaaattagaaatctgggaagacctgaaaattatcagttttacacgcagcaccgttgctgtttatagcacctgcatgctcgtcgtcctgctccgcgtccaactcaatatcatcggaggctacatttacctggataacgcagctgtcgggaagaacggaacgactatacttgctccaccagatgtccagcagcagtacctctctagcatccagcacttactgggtgacggtctgacagaactcatcaccgtgataaagcaggccgtgcagaaggtgctgggctcagtgtctctcaagcatagcctttccctcttggacctggagcagaagctgaaagaaattaggaaccttgtcgagcaacacaaatccagctcatggattaattag

SEQ ID NO: 139690 - DNA, 1122 bp, Artificial Sequence
  derived and/or modified sequence
atgctccggagcgtgtggaacttcctcaagcgacacaagaagaagtgtatattcctgggaactgtcctcggcggagtctatattctcgggaaatacggccagaagaaaatccgcgaaatccaggaacgcgaagcggcagagtacatagctcaggccaggcgccagtatcactttgagagcaatcagcgcacgtgcaacatgaccgtgctctcaatgttgccaaccctcagagaagcgctgatgcagcagcttaactcagaaagcctgactgctctgttgaagaaccgtccgagcaataaactggagatttgggaagatctcaagataatcagcttcactcggtctaccgttgcagtatactccacatgtatgcttgttgtgctgctgagagtgcagctcaacataattggagggtatatctatttagataacgctgccgtaggcaagaacggcactaccatcctggctcctccagatgtacagcaacagtatctctcttccatccagcacttactgggtgacggcttgaccgaactgataacggtgatcaagcaggcggtccagaaggtgctgggatctgtaagcctcaagcactcactgtcactccttgatctggagcaaaagctgaaggaaattcgcaatctggtggagcagcacaagtcaagctcatggatcaataaggatgggtccaaaccccttctgtgtcactacatgatgcccgatgaggaaaccccacttgccgtacaagcttgtggcctgtctccacgcgacattactacaataaaactgctaaacgaaacacgggatatgctggagtcgcctgatttctccaccgtgctgaatacatgtttgaatcgcggattttctaggttgctggataacatggcagaattttttaggccaaccgagcaagacctccagcacggtaatagcatgaattctttgtcctcagtgagtctgcctctggccaaaatcatccctatagtcaacggtcagattcactctgtctgcagcgagacaccctcccattttgtacaggatctgctcacaatggaacaggtaaaggacttcgcagccaatgtctatgaagcctttagtacgccccaacaactcgagaagtag

SEQ ID NO: 139691 - DNA, 549 bp, Artificial Sequence
  derived and/or modified sequence
atgctgcggagcgtctggaacttcctgaaaagacacaagaaaaaatgcatctttctgggaacggtgctgggagtactcagcatgctgcctactttacgcgaagccctgatgcaacagttaaatagcgagtccctcactgctctactgaaaaatagaccctccaataagctggaaatttgggaggatctgaagattatttccttcacacgcagtaccgtagccgtgtattctacttgcatgctcgtcgtgctcctccgagtccagctcaatatcatcggtggttatatctacttagacaatgctgcagttgggaagaacgggacaaccattctggcccctcctgacgtgcagcaacaatatctgtcaagcatccagcacctccttggggatggactgactgagctgatcacagttatcaaacaggccgtccagaaagttctggggtctgtgagcctcaagcactctctgagtctcttagacctggagcagaagctcaaggagatccgcaacctggtggagcaacacaaatcaagttcatggatcaactag

SEQ ID NO: 139692 - DNA, 549 bp, Artificial Sequence
  derived and/or modified sequence
atgctgagaagcgtgtggaacttcctgaagagacacaagaagaagtgcatcttcctgggcaccgtgctgggcgtgctgagcatgctgcccaccctgagagaggccctgatgcagcagctgaacagcgagagcctgaccgccctgctgaagaacagacccagcaacaagctggagatctgggaggacctgaagatcatcagcttcaccagaagcaccgtggccgtgtacagcacctgcatgctggtggtgctgctgagagtgcagctgaacatcatcggcggctacatctacctggacaacgccgccgtgggcaagaacggcaccaccatcctggccccccccgacgtgcagcagcagtacctgagcagcatccagcacctgctgggcgacggcctgaccgagctgatcaccgtgatcaagcaggccgtgcagaaggtgctgggcagcgtgagcctgaagcacagcctgagcctgctggacctggagcagaagctgaaggagatcagaaacctggtggagcagcacaagagcagcagctggatcaactag

SEQ ID NO: 139693 - DNA, 1122 bp, Artificial Sequence
  derived and/or modified sequence
atgctgagaagcgtgtggaacttcctgaagagacacaagaagaagtgcatcttcctgggcaccgtgctgggcggcgtgtacatcctgggcaagtacggccagaagaagatcagagagatccaggagagagaggccgccgagtacatcgcccaggccagaagacagtaccacttcgagagcaaccagagaacctgcaacatgaccgtgctgagcatgctgcccaccctgagagaggccctgatgcagcagctgaacagcgagagcctgaccgccctgctgaagaacagacccagcaacaagctggagatctgggaggacctgaagatcatcagcttcaccagaagcaccgtggccgtgtacagcacctgcatgctggtggtgctgctgagagtgcagctgaacatcatcggcggctacatctacctggacaacgccgccgtgggcaagaacggcaccaccatcctggccccccccgacgtgcagcagcagtacctgagcagcatccagcacctgctgggcgacggcctgaccgagctgatcaccgtgatcaagcaggccgtgcagaaggtgctgggcagcgtgagcctgaagcacagcctgagcctgctggacctggagcagaagctgaaggagatcagaaacctggtggagcagcacaagagcagcagctggatcaacaaggacggcagcaagcccctgctgtgccactacatgatgcccgacgaggagacccccctggccgtgcaggcctgcggcctgagccccagagacatcaccaccatcaagctgctgaacgagaccagagacatgctggagagccccgacttcagcaccgtgctgaacacctgcctgaacagaggcttcagcagactgctggacaacatggccgagttcttcagacccaccgagcaggacctgcagcacggcaacagcatgaacagcctgagcagcgtgagcctgcccctggccaagatcatccccatcgtgaacggccagatccacagcgtgtgcagcgagacccccagccacttcgtgcaggacctgctgaccatggagcaggtgaaggacttcgccgccaacgtgtacgaggccttcagcaccccccagcagctggagaagtag

SEQ ID NO: 139694 - protein, 192 aa, Artificial Sequence
  derived and/or modified sequence
  misc_feature (1)..(1): Xaa can be any naturally occurring amino acid
XTEQYSEYTGYAETYRWSRSHEDGSERDDWQRRCTEIVAIDALHFRRYLDQFVPEKMRRELNKAYCGFLRPGVSSENLSAVATGNWGCGAFGGDARLKALIQILAAAAAERDVVYFTFGDSELMRDIYSMHIFLTERKLTVGDVYKLLLRYYNEECRNCSTPGPDIKLYPFIYHAVESCAETADHSGQRTGT

SEQ ID NO: 139695 - protein, 1384 aa, Artificial Sequence
  derived and/or modified sequence
MMHLRLFCILLAAVSGAEGWGYYGCDEELVGPLYARSLGASSYYSLLTAPRFARLHGISGWSPRIGDPNPWLQIDLMKKHRIRAVATQGSFNSWDWVTRYMLLYGDRVDSWTPFYQRGHNSTFFGNVNESAVVRHDLHFHFTARYIRIVPLAWNPRGKIGLRLGLYGCPYKADILYFDGDDAISYRFPRGVSRSLWDVFAFSFKTEEKDGLLLHAEGAQGDYVTLELEGAHLLLHMSLGSSPIQPRPGHTTVSAGGVLNDQHWHYVRVDRFGRDVNFTLDGYVQRFILNGDFERLNLDTEMFIGGLVGAARKNLAYRHNFRGCIENVIFNRVNIADLAVRRHSRITFEGKVAFRCLDPVPHPINFGGPHNFVQVPGFPRRGRLAVSFRFRTWDLTGLLLFSRLGDGLGHVELTLSEGQVNVSIAQSGRKKLQFAAGYRLNDGFWHEVNFVAQENHAVISIDDVEGAEVRVSYPLLIRTGTSYFFGGCPKPASRWDCHSNQTAFHGCMELLKVDGQLVNLTLVEGRRLGFYAEVLFDTCGITDRCSPNMCEHDGRCYQSWDDFICYCELTGYKGETCHTPLYKESCEAYRLSGKTSGNFTIDPDGSGPLKPFVVYCDIRENRAWTVVRHDRLWTTRVTGSSMERPFLGAIQYWNASWEEVSALANASQHCEQWIEFSCYNSRLLNTAGGYPYSFWIGRNEEQHFYWGGSQPGIQRCACGLDRSCVDPALYCNCDADQPQWRTDKGLLTFVDHLPVTQVVIGDTNRSTSEAQFFLRPLRCYGDRNSWNTISFHTGAALRFPPIRANHSLDVSFYFRTSAPSGVFLENMGGPYCQWRRPYVRVELNTSRDVVFAFDVGNGDENLTVHSDDFEFNDDEWHLVRAEINVKQARLRVDHRPWVLRPMPLQTYIWMEYDQPLYVGSAELKRRPFVGCLRAMRLNGVTLNLEGRANASEGTSPNCTGHCAHPRLPCFHGGRCVERYSYYTCDCDLTAFDGPYCNHDIGGFFEPGTWMRYNLQSALRSAAREFSHMLSRPVPGYEPGYIPGYDTPGYVPGYHGPGYRLPDYPRPGRPVPGYRGPVYNVTGEEVSFSFSTSSAPAVLLYVSSFVRDYMAVLIKDDGTLQLRYQLGTSPYVYQLTTRPVTDGQPHSINITRVYRNLFIQVDYFPLTEQKFSLLVDSQLDSPKALYLGRVMETGVIDPEIQRYNTPGFSGCLSGVRFNNVAPLKTHFRTPRPMTAELAEALRVQGELSESNCGAMPRLVSEVPPELDPWYLPPDFPYYHDEGWVAILLGFLVAFLLLGLVGMLVLFYLQNHRYKGSYHTNEPKAAHEYHPGSKPPLPTSGPAQVPTPTAAPNQAPASAPAPAPTPAPAPGPRDQNLPQILEESRSE

SEQ ID NO: 139696 - DNA, 5453 bp, Artificial Sequence
  derived and/or modified sequence
aagagcggaggaccaggaaccagagagagagagagagaaaagagagaggagagacagagcgcttgggggcgaaaggagagagggagggaagggtgggtaaggaggagagagcggtctgctgcaaaccccaggaggagagcttggagcccaagccagaactcgagccctagccggagccgttcacagggaggcggctgccgggaccgtcagccctgcatgatgcatctccggctcttctgcatcctgctcgccgcggtctcaggagccgagggctggggctactacggctgcgacgaggagctggtgggtcccctgtatgcacgctccctgggcgcctcctcctactacagtctccttactgcgccgagattcgccaggctgcacggcataagcgggtggtcaccacggattggggatccgaatccctggctccagatagacttaatgaagaagcaccggatccgggccgtggccacacagggctcctttaattcttgggactgggtcacacgttacatgctactctacggcgaccgagtggacagctggacaccgttctaccagcgagggcacaactcgaccttctttggtaacgtgaacgagtcggcggtggtgcgccatgacctgcacttccacttcactgcgcgctacatccgcatcgtgcccctggcctggaacccacgcggcaagatcggcctgaggctcggcctctatggctgcccatacaaggccgacatactctatttcgacggcgacgatgccatctcctaccgcttcccgcgaggggtcagccgaagcctgtgggacgtgttcgccttcagcttcaagaccgaggagaaggacggtcttctgctgcacgccgagggcgcccagggcgactacgtgacgctcgagctggagggggcacacctgctgctgcacatgagcctgggcagcagccctatccagccaagaccaggtcacaccaccgtgagcgcaggcggagtcctcaatgaccagcactggcactatgtgcgggtggaccgatttggccgcgatgtaaatttcaccctggacggctatgtgcagcgctttattctcaatggagacttcgagaggctgaacctggacactgagatgttcatcggaggtctggtgggcgccgcgcggaagaacctggcctatcggcataacttccgcggctgcatagaaaacgtaatcttcaaccgcgtcaacatcgcagacctggccgtgcggcgccattcccggatcaccttcgagggtaaggtggcttttcgttgcctggacccggtaccgcaccctatcaacttcggaggccctcacaacttcgttcaagtgcccggtttcccacgccgtggccgcctggcagtctcatttcgcttccgcacctgggacctcaccgggcttctccttttctcccgtctgggggacgggctgggccacgtggagctgacgctcagcgaagggcaggtcaacgtgtccatcgcgcagagcggccgaaagaagcttcagttcgctgctgggtaccgactgaatgacggcttttggcacgaggtgaattttgtggcacaggaaaaccatgcagttatcagcattgatgatgtggaaggggcagaggtcagggtctcatacccgttgctgatccggacagggacctcatatttctttgggggttgtcccaagccagccagtcgatgggactgccactccaaccagacggcattccatggctgcatggagctgctcaaggtggatggtcaactggtcaacctgactctggtggagggccggcggcttggattctatgctgaggtcctctttgatacatgtggcatcactgataggtgcagccctaacatgtgtgagcatgatggacgctgctaccagtcttgggatgacttcatttgctactgcgaactgacgggctacaagggagagacctgccacacacctttgtataaggaatcctgtgaggcttatcggctcagtgggaaaacttctggaaacttcaccattgatcctgatggcagtggccccctgaagccatttgtagtgtactgtgatatccgagagaaccgagcgtggacagttgtgcggcatgacaggctgtggacaactcgagtgacaggttccagcatggagcggccattcctgggggctatccagtactggaatgcatcctgggaggaagtcagtgcccttgccaatgcttcccagcattgtgaacagtggatcgagttctcctgctacaattcccggctgctcaacactgcaggaggctacccctacagcttttggattggccgaaatgaggagcagcacttctactggggaggctcccagcctgggatccagcgctgtgcctgtggtctggaccggagctgtgtggaccctgccttgtactgcaactgtgacgctgaccagccccagtggagaactgacaagggactgctgacctttgtggaccatctgcctgtcactcaggtagtgataggggatacgaaccgctccacttctgaggcccagttcttcctgaggcctctgcgctgctatggcgatcgaaattcctggaacaccatttccttccacaccggggctgcactacgcttccccccaatccgtgccaaccacagcctggatgtctccttctacttcaggacctctgctccctcgggggtcttcctagagaatatggggggcccttactgccagtggcgccgaccttatgtgcgggtggaactcaacacatcccgggatgtggtcttcgcctttgatgtggggaatggggatgagaacctcacagtacactcagacgactttgagttcaatgatgacgagtggcacctggtccgggctgaaatcaacgtgaagcaggcccggctccgagtggatcaccggccctgggttctgcggcctatgccactgcagacctacatctggatggagtatgaccagcccctctatgtgggatctgcagagcttaagagacgcccctttgtgggttgcttgagggccatgcgtctgaacggagtgactctgaacctggagggccgtgccaatgcctctgagggtacctcacccaactgcacaggccactgtgcccaccctcggctcccctgtttccatggaggccgctgcgtggagcgctatagctactacacgtgtgactgtgacctcacggcttttgatgggccatactgcaaccacgatattggtggtttctttgagccgggcacctggatgcgctataacctacagtcagcgctgcgctctgcagccagggagttctcccacatgctgagccggccagtgccaggctatgagcctggctacatcccgggctatgatactccgggctatgtgcctggctaccatggccccgggtaccgcctgcccgactacccccggcctggtcggcctgtgcccggttaccgtgggcctgtctacaacgttacgggagaggaggtctccttcagcttcagcaccagctccgcccctgctgtcctgctctacgtcagttcctttgttcgtgactacatggctgtgctcatcaaggatgatgggacccttcagctgcgatatcagctgggcaccagtccctacgtgtaccagctaaccactcgaccagtgaccgatggccagccccatagcatcaatatcacccgtgtttaccggaacctcttcatccaggtggactacttcccactgacagagcagaagttctcgctgttggtggacagccagttggactcacccaaggccttgtatttagggcgtgtgatggagacaggagtcattgacccggagatccagcgctacaacaccccaggtttctcaggctgcctgtctggtgttcgattcaacaacgtggctcccctcaagacccacttccgaacccctcgacccatgactgctgagctagctgaggcccttcgagttcagggagaactgtccgaatctaattgcggagctatgccacgtcttgtttcagaggtgccacctgagcttgatccctggtatctgcccccagacttcccctactaccatgatgaaggatgggttgccatacttttaggctttttggtggcctttctgctgctggggctggtgggaatgttggtgctcttctatctgcaaaatcatcgctataagggctcctaccataccaatgagcccaaggctgcccacgagtaccatcctggcagcaaacctcccctacccacttcaggccctgcccaggtccccacccctacagcagctcccaaccaagctccagcctcagccccagccccagccccaactccagccccagcccctggcccccgggatcagaacctaccccagatcctggaggagtccaggtctgaatgagtcagaagggcttctgggaccaattccagctcctgacattcccccagtcctgcctctcccccatcctatcagggacatttggctcctcttagctggctctgctcatccagaggatattcccccatcccccccccatcaagtttggtgggcagagctacagatgggacccaagggagtggccgagcctcactgcctaaaccaatgcccttctcatccctgtttccccaggctcctggctgtttatctgccccaaaggagaagcctcatggggttgacataggtcctttctgccatctctgttccagctgctgtcagggattaacaacagagtgtaggggagattaactgcctcccttccaatagacactatcagcagggacagatgtgtgggagtgcagggctgcagagggtatggggggaggaggctgctaaaccctatcccccagcctcccccctgccctgaagatcttccatttgcttccactcagctggaggctcaagagggcttgatggctgtcccctgcccccctccttttgttttgtacacagagaccaagaggcctcagtttagcaccttagtacctccgctgcttcacttgctttagccaaagccataaaaaacctgcaacgtagagaaaataatgcagataccctgactagccagccctctactcctccaaccttttccaagatatgcaatggcctttgtgcctgcccaaaggcttcgccccctccagtgcatgaggaaccctctttcctccgctcagagatgctgcttcatttacccaggaggtcatattctttatatatattttttgttgcaaagtgtctctctagagaaactctatatattattcgaatttttaaattatttgtttatatataaaagaaaagctcaattggctgtgctgtcctgtgctgtgctgtgcccacagtctgtagtttgcctttcctgtgttggaagtgtcgtgagtcctgctggtcacccaccagcctggtccggcctccactctgaagcagggttgagcctgctgtgctctcagacgcggagccgttccaataaagcagagtggcagagcccc

SEQ ID NO: 139697 - DNA, 4155 bp, Artificial Sequence
  derived and/or modified sequence
atgatgcacctgagactgttctgcatcctgctggccgccgtgagcggcgccgagggctggggctactacggctgcgacgaggagctggtgggccccctgtacgccagaagcctgggcgccagcagctactacagcctgctgaccgcccccagattcgccagactgcacggcatcagcggctggagccccagaatcggcgaccccaacccctggctgcagatcgacctgatgaagaagcacagaatcagagccgtggccacccagggcagcttcaacagctgggactgggtgaccagatacatgctgctgtacggcgacagagtggacagctggacccccttctaccagagaggccacaacagcaccttcttcggcaacgtgaacgagagcgccgtggtgagacacgacctgcacttccacttcaccgccagatacatcagaatcgtgcccctggcctggaaccccagaggcaagatcggcctgagactgggcctgtacggctgcccctacaaggccgacatcctgtacttcgacggcgacgacgccatcagctacagattccccagaggcgtgagcagaagcctgtgggacgtgttcgccttcagcttcaagaccgaggagaaggacggcctgctgctgcacgccgagggcgcccagggcgactacgtgaccctggagctggagggcgcccacctgctgctgcacatgagcctgggcagcagccccatccagcccagacccggccacaccaccgtgagcgccggcggcgtgctgaacgaccagcactggcactacgtgagagtggacagattcggcagagacgtgaacttcaccctggacggctacgtgcagagattcatcctgaacggcgacttcgagagactgaacctggacaccgagatgttcatcggcggcctggtgggcgccgccagaaagaacctggcctacagacacaacttcagaggctgcatcgagaacgtgatcttcaacagagtgaacatcgccgacctggccgtgagaagacacagcagaatcaccttcgagggcaaggtggccttcagatgcctggaccccgtgccccaccccatcaacttcggcggcccccacaacttcgtgcaggtgcccggcttccccagaagaggcagactggccgtgagcttcagattcagaacctgggacctgaccggcctgctgctgttcagcagactgggcgacggcctgggccacgtggagctgaccctgagcgagggccaggtgaacgtgagcatcgcccagagcggcagaaagaagctgcagttcgccgccggctacagactgaacgacggcttctggcacgaggtgaacttcgtggcccaggagaaccacgccgtgatcagcatcgacgacgtggagggcgccgaggtgagagtgagctaccccctgctgatcagaaccggcaccagctacttcttcggcggctgccccaagcccgccagcagatgggactgccacagcaaccagaccgccttccacggctgcatggagctgctgaaggtggacggccagctggtgaacctgaccctggtggagggcagaagactgggcttctacgccgaggtgctgttcgacacctgcggcatcaccgacagatgcagccccaacatgtgcgagcacgacggcagatgctaccagagctgggacgacttcatctgctactgcgagctgaccggctacaagggcgagacctgccacacccccctgtacaaggagagctgcgaggcctacagactgagcggcaagaccagcggcaacttcaccatcgaccccgacggcagcggccccctgaagcccttcgtggtgtactgcgacatcagagagaacagagcctggaccgtggtgagacacgacagactgtggaccaccagagtgaccggcagcagcatggagagacccttcctgggcgccatccagtactggaacgccagctgggaggaggtgagcgccctggccaacgccagccagcactgcgagcagtggatcgagttcagctgctacaacagcagactgctgaacaccgccggcggctacccctacagcttctggatcggcagaaacgaggagcagcacttctactggggcggcagccagcccggcatccagagatgcgcctgcggcctggacagaagctgcgtggaccccgccctgtactgcaactgcgacgccgaccagccccagtggagaaccgacaagggcctgctgaccttcgtggaccacctgcccgtgacccaggtggtgatcggcgacaccaacagaagcaccagcgaggcccagttcttcctgagacccctgagatgctacggcgacagaaacagctggaacaccatcagcttccacaccggcgccgccctgagattcccccccatcagagccaaccacagcctggacgtgagcttctacttcagaaccagcgcccccagcggcgtgttcctggagaacatgggcggcccctactgccagtggagaagaccctacgtgagagtggagctgaacaccagcagagacgtggtgttcgccttcgacgtgggcaacggcgacgagaacctgaccgtgcacagcgacgacttcgagttcaacgacgacgagtggcacctggtgagagccgagatcaacgtgaagcaggccagactgagagtggaccacagaccctgggtgctgagacccatgcccctgcagacctacatctggatggagtacgaccagcccctgtacgtgggcagcgccgagctgaagagaagacccttcgtgggctgcctgagagccatgagactgaacggcgtgaccctgaacctggagggcagagccaacgccagcgagggcaccagccccaactgcaccggccactgcgcccaccccagactgccctgcttccacggcggcagatgcgtggagagatacagctactacacctgcgactgcgacctgaccgccttcgacggcccctactgcaaccacgacatcggcggcttcttcgagcccggcacctggatgagatacaacctgcagagcgccctgagaagcgccgccagagagttcagccacatgctgagcagacccgtgcccggctacgagcccggctacatccccggctacgacacccccggctacgtgcccggctaccacggccccggctacagactgcccgactaccccagacccggcagacccgtgcccggctacagaggccccgtgtacaacgtgaccggcgaggaggtgagcttcagcttcagcaccagcagcgcccccgccgtgctgctgtacgtgagcagcttcgtgagagactacatggccgtgctgatcaaggacgacggcaccctgcagctgagataccagctgggcaccagcccctacgtgtaccagctgaccaccagacccgtgaccgacggccagccccacagcatcaacatcaccagagtgtacagaaacctgttcatccaggtggactacttccccctgaccgagcagaagttcagcctgctggtggacagccagctggacagccccaaggccctgtacctgggcagagtgatggagaccggcgtgatcgaccccgagatccagagatacaacacccccggcttcagcggctgcctgagcggcgtgagattcaacaacgtggcccccctgaagacccacttcagaacccccagacccatgaccgccgagctggccgaggccctgagagtgcagggcgagctgagcgagagcaactgcggcgccatgcccagactggtgagcgaggtgccccccgagctggacccctggtacctgccccccgacttcccctactaccacgacgagggctgggtggccatcctgctgggcttcctggtggccttcctgctgctgggcctggtgggcatgctggtgctgttctacctgcagaaccacagatacaagggcagctaccacaccaacgagcccaaggccgcccacgagtaccaccccggcagcaagccccccctgcccaccagcggccccgcccaggtgcccacccccaccgccgcccccaaccaggcccccgccagcgcccccgcccccgcccccacccccgcccccgcccccggccccagagaccagaacctgccccagatcctggaggagagcagaagcgagtag

SEQ ID NO: 139698 - DNA, 4155 bp, Artificial Sequence
  derived and/or modified sequence
atgatgcacctgcgcttattttgcattctcctcgctgcggtgtccggggctgaaggctggggatattacggatgtgatgaggaactggtcggacccctttatgccagaagtctcggcgccagcagctactactccttactgactgcgcccaggtttgctcggcttcatggtatttcgggatggagccctaggattggtgaccccaatccttggctgcaaatcgatttgatgaagaagcacaggatccgagccgtggccactcagggatctttcaattcttgggactgggtaacacgatatatgctgttgtacggtgacagagtagatagttggaccccattctatcaacgcgggcacaatagcaccttttttgggaacgtgaacgagagtgccgtggtgcgccatgatctgcactttcactttaccgctaggtatatacggatcgttccactggcatggaacccccggggcaagatcggtctgagactaggtctgtatggatgcccttacaaagccgatatattatatttcgatggagatgacgccattagctatcgattccccaggggagtttctagatcgctctgggacgtgttcgctttctctttcaagacagaggagaaggacggcctcttgctacatgcggagggggcacaaggtgactatgtgacgctcgaattagagggcgcccatcttttgcttcacatgtcgctggggtcaagccctattcaaccaaggcctggtcacacaactgtgtcagccggtggcgtactcaacgaccagcattggcactacgtgcgagtcgatcgtttcggaagagatgtgaacttcacactggacggctacgtgcagcgcttcatcctgaatggagatttcgaaagactcaatcttgatactgaaatgtttatcggcggactcgtcggggccgcccggaagaacctcgcctaccggcacaatttcagaggatgcattgaaaacgtgatatttaacagggtgaatatcgccgacctggccgttcgccgccacagcagaattacgtttgaagggaaagtggcgttccggtgcctggaccccgttccccatccaattaactttggcggccctcataattttgtgcaggtcccgggatttccgcggaggggacggctggccgtgtcatttcgtttcaggacgtgggaccttacagggctgttgctgttttcccgactgggtgacggcttagggcacgtggagcttaccctctcagagggtcaggtaaatgtgtctatcgcccaaagcggtaggaagaaactgcaattcgccgctggataccgcctaaacgatggcttctggcatgaagtgaactttgtcgcccaggagaaccatgccgtgatttcaattgatgacgttgagggcgcggaggtccgagttagctatcctctgctcatcaggaccgggacaagctacttctttggaggctgcccaaagcccgcaagccgttgggactgtcacagcaatcagactgccttccacgggtgcatggagcttctgaaagtcgatggccagctggtcaacttgacactagtggagggtcggagacttggtttttacgcagaggtcctgttcgatacatgcggtattactgataggtgtagtcctaatatgtgcgagcacgatgggaggtgctaccaaagttgggatgactttatctgctactgtgagctgaccggttataaaggcgagacatgccacacgccgctgtacaaagaaagctgtgaagcctatcgcctctcgggtaaaacttcaggcaacttcactatcgatccggacgggtcagggccactgaaacccttcgtggtttactgcgacattagggagaatagggcatggaccgtcgtgcggcacgacaggctgtggactacacgcgtcactggttcctcaatggagcgcccatttctcggagcaatccagtattggaacgcatcctgggaggaagtctcggctcttgcaaatgcctcacagcattgtgaacagtggattgagttctcgtgctacaacagccgcctgctgaatacagccggcgggtatccatactcattctggattgggcgaaatgaggagcagcacttttattggggcggaagccagccaggcattcaaaggtgtgcatgcgggctggacagatcttgtgttgaccctgccctttattgtaactgcgatgcagatcaaccacagtggcgcacggacaaaggcctcctgacattcgttgaccatctgccagtgacccaagtggtgatcggggacacaaaccgctccacttccgaggcgcagttcttcctgagaccattaaggtgttatggggacaggaactcgtggaataccatctcttttcacacaggcgctgctcttcgtttcccgcctatcagggccaatcactccctcgatgtgagtttctacttcaggaccagtgcaccttctggagtctttttagagaacatgggagggccatactgtcagtggagaaggccttacgtgagagtcgagctgaatacctcccgggacgttgtgtttgcctttgacgttggcaatggagacgagaacctgacagtgcactctgacgatttcgagttcaacgatgacgagtggcatttggtgcgagccgagatcaacgtaaaacaggcacgcctcagagtcgatcatcgaccttgggtgctaagacccatgcctctacaaacatacatttggatggagtatgatcagccactgtatgttgggagcgcagagctgaaacggcggccattcgtgggttgtttgagagctatgaggctcaatggagttacactcaacttggaaggtagagccaatgcctcagaggggacatcaccaaactgcacagggcattgtgcccatcccagactcccttgttttcatgggggacggtgtgtggagaggtatagctactatacatgtgactgtgacctaacagcttttgacggcccgtattgtaatcacgatattggtggattctttgaacctggaacctggatgcgatacaatttgcagagtgccttaaggagtgctgcccgggagttcagtcacatgctcagtagacccgtgccgggttacgagcccgggtatattcctggttacgacactcccggctacgtgcccgggtaccatggcccagggtacagattgccggactatccccgccccggtcggcctgtgcctggttaccgtggccccgtgtataacgtgactggggaggaggtttcattttctttctctactagctcagcgcccgctgtgttattatatgtgagtagttttgtgagagattacatggccgtcttgattaaagacgacggcacacttcaactgagatatcagttaggcacctccccatacgtataccagctgaccactaggcctgttacggacggccagcctcattcaatcaatataaccagggtgtatcggaacctgtttattcaagtcgattactttcctctcaccgagcagaagttttcacttttggtcgattcccaattggatagtccaaaggccctgtacctcggcagagtcatggagacaggagtcatcgaccctgaaatccagcgatataatactccgggtttttctggatgcctaagcggagtgagatttaataatgtggcccctctgaagacacattttaggacccctcgccccatgactgctgagctggccgaggccctgcgcgtgcaaggcgaactctctgaaagcaactgcggggcgatgcctagactggtgtcggaggtaccgcctgagctggatccttggtacttgcctccggatttcccatactaccatgacgaaggttgggtcgcaattcttcttggttttctagtcgcctttctactgctgggcttggtgggtatgctggtgctgttttatctgcaaaaccatagatacaaaggctcgtatcacaccaacgagccaaaggccgcccatgagtatcatcccggcagtaaacctccccttccaacgagcgggccggcccaggtgccaacaccgacagccgcccctaaccaagcacccgcaagtgcaccagcgcccgctccaacaccagcaccagcacccgggccgagggaccaaaacctgccccaaatccttgaagaatctcggagcgaatag

SEQ ID NO: 139699 - DNA, 4155 bp, Artificial Sequence
  derived and/or modified sequence
atgatgcacctgcggctcttctgcatcctgctggccgctgtgtctggagctgagggctggggctactacggctgtgatgaggagctggtgggccccctgtatgcccggagcctgggcgccagcagctactacagcctgctgacagcccccaggtttgcccggctgcacggcatcagcggctggagccccagaattggagaccccaacccctggctgcagattgacctgatgaagaagcaccgcatccgggctgtggccacccagggcagcttcaacagctgggactgggtgacccgctacatgctgctgtatggagacagagtggacagctggacccccttctaccagaggggccacaacagcaccttctttggaaatgtgaatgaatctgctgtggtgagacatgacctgcacttccacttcaccgcccgctacatccgcatcgtgcccctggcctggaacccccggggcaagattggcctgcggctgggcctgtatggctgcccctacaaggctgacatcctgtactttgatggagatgatgccatctcctaccgcttcccccggggcgtgagccgcagcctgtgggatgtgtttgccttctccttcaagacagaggagaaggatggcctgctgctgcatgctgagggcgcccagggcgactatgtgaccctggagctggagggcgcccacctgctgctgcacatgagcctgggcagcagccccatccagcccaggcctggccacaccaccgtgtctgctgggggcgtgctgaatgaccagcactggcactacgtgcgggtggacagatttggaagagatgtgaacttcaccctggatggctacgtgcagcgcttcatcctgaatggagactttgagcggctgaacctggacacagagatgtttattggaggcctggtgggcgccgccaggaagaacctggcctaccgccacaacttccggggctgcattgaaaatgtcatcttcaacagagtgaacattgctgacctggccgtgcggcggcacagccgcatcacctttgagggcaaggtggccttccgctgcctggaccctgtgccccaccccatcaactttggaggcccccacaactttgtgcaggtgcccggcttcccccggcggggccgcctggccgtgtccttccgcttccgcacctgggacctgaccggcctgctgctcttcagccggctgggagatggcctgggccacgtggagctgaccctgtctgagggccaggtgaatgtgtccatcgcccagagcggcaggaagaagctgcagtttgctgctggctaccgcctgaatgatggcttctggcatgaggtgaactttgtggcccaggagaaccacgccgtcatcagcattgatgatgtggagggcgctgaggtgcgggtgtcctaccccctgctgatcagaacaggcaccagctacttcttcggcggctgccccaagccagccagccgctgggactgccacagcaaccagacagccttccacggctgcatggagctgctgaaggtggatggccagctggtgaacctgaccctggtggagggccgccgcctgggcttctatgcagaggtgctgtttgacacctgtggcatcacagaccgctgcagccccaacatgtgtgaacatgatggccgctgctaccagagctgggatgacttcatctgctactgtgagctgaccggctacaagggggagacctgccacacccccctgtacaaggagagctgtgaggcctaccgcctgagcggcaagaccagcggcaacttcaccatcgaccctgatggcagcggccccctgaagccctttgtggtgtactgtgacatcagagaaaatagagcctggacagtggtgagacatgaccggctgtggaccaccagggtgacaggcagctccatggagcggcccttcctgggcgccatccagtactggaatgcctcctgggaggaggtgtctgccctggccaatgccagccagcactgtgagcagtggattgagttcagctgctacaacagccggctgctgaacacagctgggggctacccctacagcttctggattggaagaaatgaggagcagcacttctactggggcggcagccagcccggcatccagagatgtgcctgtggcctggacaggagctgtgtggaccctgccctgtactgcaactgtgatgctgaccagccccagtggaggacagacaagggcctgctgacctttgtggaccacctgcctgtgacccaggtggtgattggagacaccaacagaagcaccagcgaggcccagttcttcctgcggcccctgcgctgctatggagacaggaacagctggaacaccatctccttccacactggagctgccctgcgcttcccccccatccgggccaaccacagcctggatgtgtccttctacttccgcaccagcgcccccagcggggtcttcctggagaacatgggcggcccctactgccagtggaggcggccctacgtgcgggtggagctgaacaccagcagagatgtggtgtttgcctttgatgtgggcaatggagatgagaacctgactgtgcacagtgatgactttgagttcaatgatgatgagtggcacctggtgcgggcagagatcaacgtgaagcaggcccggctgcgggtggaccaccggccctgggtgctgcggcccatgcccctgcagacctacatctggatggagtatgaccagcccctgtatgtgggcagcgctgagctgaagaggcggccctttgtgggctgcctgcgggccatgaggctgaatggagtgaccctgaacctggagggccgggccaatgccagcgagggcaccagccccaactgcaccggccactgtgcccacccccggctgccctgcttccacggcggccgctgtgtggagcgctacagctactacacctgtgactgtgacctgacagcctttgatggcccctactgcaaccacgacattggaggcttctttgagcccggcacctggatgagatacaacctgcagagcgccctgcggtctgctgcccgggagttcagccacatgctgagcaggcctgtgcccggctatgagcccggctacatccctggctatgacaccccaggctacgtgcccggctaccacggccctggctaccgcctgcctgactaccccaggcctggccggcctgtgcccggctaccggggccctgtgtacaacgtgactggagaggaggtgtccttctccttcagcaccagcagcgccccagctgtgctgctgtatgtgagcagctttgtgcgggactacatggctgtgctgatcaaggatgatggcaccctgcagctgcgctaccagctgggcaccagcccctacgtgtaccagctgaccaccaggcctgtgacagatggccagccccacagcatcaacatcaccagggtgtacagaaacctcttcatccaggtggactacttccccctgacagagcagaagttcagcctgctggtggacagccagctggacagccccaaggccctgtacctgggccgggtgatggagactggagtcatcgaccctgagatccagcgctacaacaccccaggcttcagcggctgcctgtctggagtgcgcttcaacaacgtggcccccctgaagacccacttccgcaccccccggcccatgacagctgagctggccgaggccctgcgggtgcagggcgagctgtctgagagcaactgtggggccatgccccggctggtgtctgaggtgcccccagagctggacccctggtacctgcccccagacttcccctactaccatgatgagggctgggtggccatcctgctgggcttcctggtggccttcctgctgctgggcctggtgggcatgctggtgctcttctacctgcagaaccaccgctacaagggcagctaccacaccaatgagcccaaggccgcccacgagtaccaccctggcagcaagccacccctgcccaccagcggccctgcccaggtgcccacccccacagctgcccccaaccaggccccagccagcgccccagccccagcccccaccccagccccagcccctggcccccgggaccagaacctgccccagatcctggaggagagccgctctgagtag

SEQ ID NO: 139700 - DNA, 4155 bp, Artificial Sequence
  derived and/or modified sequence
atgatgcacctgcggctgttctgcatcctgctggccgccgtgagcggcgctgaggggtgggggtactacgggtgcgatgaggaactggtcgggccactttacgcacgctccctgggggcctcctcgtactacagtctgctaacggcaccccgttttgccagactccacggcattagtggatggagcccgcgcattggcgatccaaacccctggttgcagattgacttaatgaaaaagcaccgaattcgcgcagtggccacccagggctctttcaatagctgggactgggtcactcgatatatgctgctgtacggtgacagggttgattcttggaccccattctatcagcgcggtcacaacagcactttcttcggtaatgtcaacgagtcggcagtcgttcgtcacgacctccactttcattttacagctagatacatccgtatagtgccattggcatggaaccctagaggcaagattgggctccgcctagggctgtacgggtgtccatataaggcagacattctttactttgatggggacgatgcgatcagttatcggttcccccgcggggtgtctaggagtctgtgggatgtcttcgcattctcattcaagacagaggagaaggacggccttctcctgcatgccgagggcgcacaaggggactatgttacccttgagcttgagggcgcccatctgcttctccacatgtctttaggcagcagcccgattcagcctagaccaggtcatacaaccgttagcgccggcggggtcttgaatgaccagcactggcactacgtgcgcgtggataggtttggaagagacgtcaacttcacccttgatgggtatgtgcaacgattcatcctaaacggtgactttgaaaggctgaatttagatactgagatgttcattggaggtctggtaggagctgcccggaagaatctagcctaccgacataacttcagggggtgtattgagaatgttatttttaaccgggtgaatattgccgacctggctgtgaggcgacactcacggatcaccttcgaggggaaggtggcctttcgctgcctcgatccggtgccccatcctattaactttggcgggcctcacaactttgtccaagttcctggctttccccgtcgcggtcggctcgcagtgtcctttaggttcaggacatgggacctcacaggtctactactttttagccgcttgggagatggactcggacacgttgagctgacattgtccgagggacaagtgaatgtgtcaatcgcacagtctggccgcaagaagctgcagtttgccgctggctatcggctgaatgacggtttttggcatgaagtgaattttgtcgcccaggagaaccatgctgtcatcagtatcgacgacgtcgagggagccgaggtccgggtgtcataccctcttctcattcggaccgggaccagttacttcttcggaggctgccctaagcccgccagcagatgggactgccacagcaaccagacggccttccatggctgtatggagttacttaaggtggacggacagctggtcaacctcacactagtggagggccgacggttggggttctatgccgaggtgttgtttgacacctgtggaattactgaccggtgttcacctaacatgtgtgaacatgatggcagatgttaccagtcctgggatgacttcatttgttactgcgaactgactgggtataaaggtgaaacctgccacaccccactgtataaggaatcatgcgaagcgtatcgcctgtctggcaaaacgtcgggaaacttcaccattgaccctgatggcagcggtccactaaagccctttgtagtgtattgtgacattcgcgagaaccgcgcttggacggtcgtacgccatgatcgactctggacaaccagggtcaccgggtcttcaatggagcggcccttccttggggctattcagtactggaatgcctcctgggaagaggtcagcgctcttgccaatgcctcacaacattgcgaacagtggatagaatttagctgctataactcgcggctcttaaatactgcaggcggttatccgtattctttttggatcggacgaaatgaggaacagcatttttattggggcggttctcagcccggcatccagcggtgtgcatgcgggctggaccggtcgtgtgttgaccctgcactatattgtaactgtgatgccgatcagcctcagtggcgcacagacaagggtctgctaaccttcgtggaccatctgccagttacgcaagttgtaatcggcgataccaatcgatcaactagcgaagcccagttttttctccggcctctaagatgttacggggataggaactcctggaatactattagctttcataccggggccgccctgcgtttcccaccaattcgtgcaaaccactctctagacgtatctttctatttccggaccagtgcaccctcaggggttttcctcgaaaacatgggtggaccgtactgccagtggcggcgaccctatgttcgagtagagctcaatacctctagggatgttgtgtttgcatttgacgtgggtaacggagatgaaaatctgaccgtccacagtgatgactttgagttcaatgacgacgagtggcatctcgtaagggcggagattaatgtcaaacaagccagactgcgggttgatcatagaccctgggtgctgaggccaatgcccctgcagacatatatctggatggagtacgaccagccactgtacgtgggctcagcagaactcaagcgccggccgttcgttgggtgcttacgggccatgagactcaatggcgtgactcttaatcttgagggcagggctaacgccagtgagggcaccagtcccaattgtaccggccactgtgctcatcccaggctaccgtgtttccacggaggccgttgtgtcgaaaggtactcatactacacatgtgactgtgacctgacagctttcgacggcccttattgtaatcacgatatcggcgggttttttgagcccggcacttggatgcggtataatctgcagtctgctctgcgcagtgcagcacgggagttctctcacatgttatcccgtccagtgcccggctacgagcccggttacatcccagggtacgacacccccggatacgtgcctggctaccatggacctggatacaggctgcctgattaccctaggcctggtagacccgtccccggatacaggggcccggtgtacaacgtaaccggcgaggaggtcagtttttcatttagcacaagcagtgcacccgccgtgctcctgtacgtgtcctcattcgtgcgcgattacatggccgtccttattaaagacgatggtacattgcagttaaggtaccagctgggaacctccccttacgtgtaccagttaactacaagaccagtcactgacggccagccacactcgattaacattacccgggtataccgcaatctgttcatacaggtagactattttcctctaactgagcagaagttctctctgcttgttgactcacagctcgatagcccgaaagccctgtacctaggccgggtcatggaaaccggggtgattgaccccgaaattcagcggtataatacccctgggtttagcggctgtctgagcggggtgcggttcaacaacgtggcaccactgaagactcattttaggactccgagacccatgaccgctgaactcgcagaggcgctgagggtgcaaggggagctctccgaatccaactgtggggccatgccccggctggtttcagaggttccacctgagctggatccttggtacctaccccctgattttccttactaccatgacgagggctgggtcgctattttgttgggattcctggttgcttttttactactgggccttgtggggatgctggtgctgttctatcttcagaatcacaggtacaaagggagttatcatactaacgagcccaaggccgcccacgagtaccacccaggtagcaagcccccactgcccactagcggccctgcccaggtccctaccccaacagctgctcctaaccaagccccggccagcgctccagccccagctcctaccccagcccccgcccccggtccccgggaccagaatctgccccagatcctcgaggaatcccgaagtgaatag

SEQ ID NO: 139701 - DNA, 4155 bp, Artificial Sequence
  derived and/or modified sequence
atgatgcacctgaggctcttctgcattcttctggctgctgtgagtggggctgaggggtggggttattatgggtgtgatgaggaattagtcggcccattatacgctaggtccttgggcgcatcatcttactattctctgctcacagctcccagattcgctcgactgcacggcatctctggatggtcccctcgcattggcgatcctaatccatggctgcaaatcgacctgatgaagaaacacagaatcagggctgtcgccacccagggctcgttcaatagttgggattgggtgacccggtatatgctcctgtatggggaccgcgtggactcctggacacctttttatcagcgagggcacaacagtacatttttcggtaacgtcaacgagtctgccgttgtccgccacgatcttcattttcacttcacagccagatatatacgcatcgtgcctcttgcctggaaccctagaggcaagattggcctccggctcggattgtatggatgcccatacaaagcggacatcctctacttcgatggagacgacgccataagttatcggttccccaggggggtgtctaggtctctgtgggatgtgtttgccttctcatttaagaccgaggagaaagacgggctgctgctccacgcagagggcgctcagggagactacgtgaccttagagctcgagggggcacacctcttattgcatatgagcctgggatcctcccccatccaaccgcgacccggtcatacaaccgtgagcgctggtggcgtcctgaatgatcagcattggcattatgttcgggtcgatcgatttggtcgggatgtaaattttactttggatgggtatgtgcagagatttatcctcaacggagattttgaaaggctgaacctcgataccgaaatgttcataggaggacttgttggtgccgcacgcaaaaatctcgcttataggcacaatttcagggggtgtatagagaacgtcatctttaatcgcgtgaacatagcagacttggctgtccgacgacactcccgcataaccttcgaggggaaggtggcttttaggtgcctggaccctgtgccacatcccataaattttgggggtccacacaattttgtgcaggtacccggatttcccagacgaggcagattggcagtgtcctttagatttcgcacctgggacctaacaggcctcttgctgttttcccggctgggagatgggctgggtcacgtggagcttactttgtcagaggggcaagtgaatgtctccatagcccagtccggcaggaagaagctgcaattcgctgccggatacaggcttaacgatggattctggcacgaggtaaactttgtagcccaggagaatcatgcggtgatcagtatcgatgatgtggagggtgcagaggtccgcgtcagttatcccctcctcatcaggacaggaacctcttatttcttcgggggatgcccaaaacctgcttcgcgatgggactgtcatagcaaccagactgcttttcacggttgcatggaactgctgaaagtggacggccagctggtaaacctcaccctggtcgaggggcgtcgcctgggattttatgccgaggttctgttcgatacttgcggaattactgaccggtgttcgccaaatatgtgcgagcatgatgggagatgctatcagagttgggatgacttcatctgttattgcgagttgaccgggtataagggcgaaacctgccatactcccctgtataaagaatcatgtgaggcctatcggctttctgggaagacctcaggtaatttcaccattgaccctgatggttccgggccactcaagccttttgtggtgtactgtgacatccgtgaaaacagggcgtggacagttgtgcgacacgatagactttggactactagggtgactgggtcaagtatggaacggccattcctgggcgctattcagtattggaatgcctcctgggaagaagtgtccgcactggccaatgcctcccagcactgcgagcagtggatcgagtttagctgttataactcgagactactcaataccgccggaggctacccatacagcttctggatcggcagaaacgaagagcaacacttttactggggtggcagtcagccgggaatccagcgttgtgcctgtgggctggatcgatcttgtgtggatccagccctgtactgtaactgtgatgccgaccaaccacagtggcggaccgacaaggggcttctgacttttgtcgatcatttaccagttactcaggttgtaatcggcgacacaaaccggagcacatccgaagcccagttttttcttagaccactgcggtgctatggagatagaaatagttggaacacgattagcttccacacaggagccgcactcaggtttccgcctatcagggccaaccatagcctggacgtgtccttctatttcaggacaagtgctccctctggggtttttctagagaatatggggggtccttattgtcagtggagacgcccatacgtgcgtgtcgagcttaacacttctcgggacgtggtctttgcgttcgacgtgggcaatggggatgagaacctgaccgttcattcggacgacttcgaattcaacgatgatgaatggcatctcgtacgcgcagaaattaatgtaaaacaggccaggctaagagtggatcacagaccctgggtgttacgcccaatgcctctgcagacatacatatggatggaatacgaccagcccctctacgttgggtccgcagaactgaagaggaggccctttgtggggtgcctgcgcgctatgcgactgaacggagtcacactgaaccttgagggcagagccaacgctagcgagggaaccagccccaactgcacaggccactgcgctcatcctagattgccttgtttccacgggggaaggtgtgtggaacgctattcctactatacctgcgattgcgacctgacagccttcgacggtccttattgcaatcatgacatcgggggattctttgaacctggaacatggatgcggtacaacttacaatccgccctgcggagtgctgcaagggagttctcccacatgttaagccgccctgtgcctggatatgaaccaggatatatacctggatacgacacaccagggtatgtgcccggttaccacggaccgggttaccgtctgccagactaccccagaccaggcaggcctgtgccaggctaccgcggaccagtgtataacgtgactggggaggaggtttccttttcatttagtacctcatctgctcctgctgttctcttgtatgtgtcctcattcgtgagggattacatggccgtcttaatcaaggacgacggcacactgcagctgcgctatcagctcggtacttctccttatgtttaccagcttacaacgcgcccagtgacagatggacaaccacacagcatcaatatcactagggtgtacagaaacctttttatccaggtggattactttccattaacagagcagaagttctccctcctggtggactcccagcttgatagtcccaaggctttataccttggacgcgtgatggagacaggggttatcgacccagagatccagaggtataatacaccgggattctcaggatgcttatccggcgtcagatttaataatgtcgctcctttgaagacccatttccgcacaccaaggccaatgacagctgagctggcagaggctcttcgggtgcagggggagttatcggagagcaactgtggagctatgccacgcctggtgagcgaagtgcctccagagcttgatccttggtacctgccgccagactttccatattaccatgacgaaggatgggttgctatactgctgggctttctcgttgcatttcttttgttgggtcttgtcggcatgctcgtccttttctatctgcagaatcaccggtacaaggggagctaccacacgaatgagccaaaggcagcacacgaataccatcctggctccaagccacccctgcctactagcggcccagcacaggtgccgacgccaaccgccgctcctaatcaagctccagcgtcggccccagctccagcgcctactcctgcaccggctcctggacctagagaccaaaacctgccacagatcttggaggagtctcgttctgaatag

SEQ ID NO: 139702 - protein, 284 aa, Artificial Sequence
  derived and/or modified sequence
MAPRLCSISVTARRLLGGPGPRAGDVASAAAARFYSKDNEGSWFRSLFVHKVDPRKDAHSTLLSKKETSNLYKIQFHNVKPEYLDAYNSLTEAVLPKLHLDEDYPCSLVGNWNTWYGEQDQAVHLWRFSGGYPALMDCMNKLKNNKEYLEFRRERSQMLLSRRNQLLLEFSFWNEPQPRMGPNIYELRTYKLKPGTMIEWGNNWARAIKYRQENQEAVGGFFSQIGELYVVHHLWAYKDLQSREETRNAAWRKRGWDENVYYTVPLVRHMESRIMIPLKISPLQ

SEQ ID NO: 139703 - DNA, 855 bp, Artificial Sequence
  derived and/or modified sequence
atggcccccagactgtgcagcatcagcgtgaccgccagaagactgctgggcggccccggccccagagccggcgacgtggccagcgccgccgccgccagattctacagcaaggacaacgagggcagctggttcagaagcctgttcgtgcacaaggtggaccccagaaaggacgcccacagcaccctgctgagcaagaaggagaccagcaacctgtacaagatccagttccacaacgtgaagcccgagtacctggacgcctacaacagcctgaccgaggccgtgctgcccaagctgcacctggacgaggactacccctgcagcctggtgggcaactggaacacctggtacggcgagcaggaccaggccgtgcacctgtggagattcagcggcggctaccccgccctgatggactgcatgaacaagctgaagaacaacaaggagtacctggagttcagaagagagagaagccagatgctgctgagcagaagaaaccagctgctgctggagttcagcttctggaacgagccccagcccagaatgggccccaacatctacgagctgagaacctacaagctgaagcccggcaccatgatcgagtggggcaacaactgggccagagccatcaagtacagacaggagaaccaggaggccgtgggcggcttcttcagccagatcggcgagctgtacgtggtgcaccacctgtgggcctacaaggacctgcagagcagagaggagaccagaaacgccgcctggagaaagagaggctgggacgagaacgtgtactacaccgtgcccctggtgagacacatggagagcagaatcatgatccccctgaagatcagccccctgcagtag

SEQ ID NO: 139704 - DNA, 855 bp, Artificial Sequence
  derived and/or modified sequence
atggcaccacgtctgtgctcgatctcagtcacagcgcgtagactcctggggggccctggacccagagcaggcgacgtggcgagtgcagctgctgctagattttactcgaaggacaatgaaggcagttggttccgaagcctgttcgtgcacaaggtggacccaagaaaggacgcccattctacactcctcagtaaaaaagagacgtcgaacctatataagatacagttccacaacgtgaagccggaatatctggatgcatacaacagtcttaccgaagctgtcctgcccaagctgcatctggacgaggattacccatgctcactggtgggcaactggaacacgtggtatggagaacaggaccaggcggtgcacctgtggagattttccgggggttatccagcactgatggactgcatgaataaactgaaaaacaataaggaatatctggagttcagacgtgagcggagccagatgctcttgagcagaagaaatcagctgttgttagagtttagcttttggaatgaaccgcagccgcggatgggtccaaacatttacgaactgcgcacatataagttgaaacccggtacgatgattgagtgggggaacaactgggctagggccatcaagtatcgacaagaaaatcaggaggccgtaggcggatttttttctcagatcggcgaattgtatgtagtccatcatttgtgggcctacaaggacttgcagtcccgtgaagaaaccaggaatgcggcatggcgaaaacggggctgggatgagaatgtgtattacacagtcccgctggtcaggcacatggagagtcgcatcatgattcccctcaagatctcccctcttcagtag

SEQ ID NO: 139705 - DNA, 855 bp, Artificial Sequence
  derived and/or modified sequence
atggccccccggctgtgcagcatctctgtgacagcccggcggctgctgggcggccctggccccagggctggagatgtggccagcgctgctgctgcccgcttctacagcaaggacaatgaaggctcctggttccgcagcctgtttgtgcacaaggtggaccccaggaaggatgcccacagcaccctgctgagcaagaaggagaccagcaacctgtacaagatccagttccacaacgtgaagccagagtacctggatgcctacaacagcctgacagaagctgtgctgcccaagctgcacctggatgaggactacccctgcagcctggtgggcaactggaacacctggtacggggagcaggaccaggccgtgcacctgtggaggttcagcggcggctacccagccctgatggactgcatgaacaagctgaagaacaacaaggagtacctggagttccggcgggagaggagccagatgctgctgagcagaagaaaccagctgctgctggagttctccttctggaatgagccccagcccaggatgggccccaacatctatgagctgcggacctacaagctgaagccaggcaccatgattgagtggggcaacaactgggcccgggccatcaagtaccggcaggagaaccaggaggccgtgggcggcttcttcagccagattggagagctgtatgtggtgcaccacctgtgggcctacaaggacctgcagagccgggaggagaccagaaatgctgcctggaggaagaggggctgggatgaaaatgtgtactacacagtgcccctggtgcgccacatggagagccgcatcatgatccccctgaagatcagccccctgcagtag

SEQ ID NO: 139706 - DNA, 855 bp, Artificial Sequence
  derived and/or modified sequence
atggccccccggctgtgcagcatcagcgtgaccgcccggcggctgctggggggacccggaccaagggccggcgatgtcgcctccgccgctgcagcccgattttacagcaaagacaacgaaggctcgtggttcaggagcctcttcgtgcacaaagttgacccaagaaaggatgctcattccacccttctctcgaagaaagagacctccaatttatataaaattcagttccataatgtaaaaccagagtatctggatgcttataattccctgactgaagccgttctgcctaagctgcacctggatgaggattatccttgtagcctcgtggggaattggaatacctggtacggagaacaggaccaggccgtccacctctggcgcttctccggcggctaccccgctctgatggactgtatgaacaagctcaagaataacaaagagtatctagagttccgccgagagaggtcacagatgttactttcacgccggaaccagctgctcctggaattctccttctggaacgagccccaacctcgaatgggccctaatatttacgaacttagaacctataaactcaagcctggaactatgatcgaatggggaaacaattgggccagagccatcaagtaccgccaggaaaaccaggaggccgtcggaggctttttctcacagatcggggagctgtacgttgtccaccacctgtgggcctataaagatctccaatctcgcgaggagacaaggaacgcggcttggagaaaacgcgggtgggatgagaatgtgtactacacagtgcctctggtacgacacatggagtccagaattatgataccactgaaaatctcgccactgcagtag

SEQ ID NO: 139707 - DNA, 855 bp, Artificial Sequence
  derived and/or modified sequence
atggctcccagactctgctctatttcagtcaccgcaaggcgacttttaggaggacctggcccaagggcgggagatgtggccagcgctgccgctgctaggttctacagcaaggacaacgagggatcctggtttcggtccctgttcgtgcacaaggtagatccgcgtaaggacgctcacagcaccttgttatcaaagaaagagacttcaaatctctataagattcagttccataacgtgaaacctgagtacctggatgcctacaatagcctgactgaggccgtgcttcccaaactacatttggacgaggattatccttgtagtctggtggggaactggaatacttggtatggcgagcaggatcaagcggttcacctttggaggttctcagggggatatcccgcattaatggactgcatgaacaagctcaaaaataataaggagtaccttgagttccggagggagcgctcacagatgctgctgtcaagacggaaccagttgctactggagttttcattctggaatgagcctcagcctcgcatgggcccaaatatatatgaactacggacatataaattaaagcccggtacaatgatcgagtggggtaacaattgggccagagctattaaataccgacaggagaaccaggaggcagtgggtggcttcttcagccagatcggggagttgtacgtggtccaccacctgtgggcttataaggatctccagtctcgggaggagactcgtaatgctgcatggagaaaaaggggatgggatgaaaatgtgtattacaccgtccccctggtcaggcacatggaaagtagaatcatgattcccttaaagattagcccccttcaatag

SEQ ID NO: 139708 - DNA, 2237 bp, Artificial Sequence
  derived and/or modified sequence
ccacgctcccattttaccgaggtggatcctgaggcccagagtgggcaaagggcttgccaaggtcgcagagcgcgcagaggattagaaccctgacttccgtccagcacctgcggagttggagacgcccacaggaaacgcccacctgaccgggtgagtgagggggcgggcgagccggaggggtggagtttattcgcgccccgcctccgccaccagggcttgggggcggggccttcctgcaacctttgcggctccaacatggctccgcggctgtgcagcatctctgtgacggcgcggcggctgctggggggcccggggcctcgcgctggggacgttgcgtctgcagctgcggcgcgtttctattccaaggacaatgaaggcagctggttccgctccctctttgttcacaaagtggatccccggaaggatgcccactccaccctgctgtccaagaaggaaaccagcaacctctataagatccagtttcacaatgtaaagcctgaatacctggatgcctacaacagcctcacggaggctgtgctgcccaagcttcacctggatgaggactacccatgctcactcgtgggcaactggaacacgtggtatggggagcaggaccaggcagtgcacctgtggcgattctcaggtggctacccagccctcatggactgcatgaacaagctcaaaaacaataaggagtacctggagttccgaagggagcggagccagatgctgctgtccaggagaaaccagctgctcctcgagttcagcttctggaatgagccacagcccagaatgggtcccaacatctatgagctgaggacatacaagctcaagccaggaaccatgatcgagtgggggaacaactgggctcgggccatcaagtaccggcaggagaaccaggaggcagtgggcggcttcttctcacagataggagagctctacgtggtgcaccatctctgggcctataaagacctgcagtctcgggaggagactcgaaacgctgcctggaggaagagaggctgggatgaaaatgtctactatacagtccccctggtgcgacacatggagtctaggatcatgatccccttgaagatctcgcctctgcagtgatgctgcctacacctccacctccttccccttctccctcaggcaaccccgacagacagtggcactcctggtcctgctgtcttggttttgtcttggctctgggaggactctgaggggcagtgctcagttcagacaagggggaactgaaggctgacaagttctgaggattacagctctgcccaggccctttctactttccctgcctgcctccctccccctgctagaagtagtttctgatttccctgaatgaaagatagtgatcttttaggccttcatttatcttctaaaattcctcatctcaaggccaccagtccccagttatcacccttggaaatcctctgtttagcttagttgcacaaaaggtagtatgtccagtggctagaggtggggtgggaagagaggaggccaggccaggccctcaggaattccctggtttccactgggccacccacttgctggacagtctgagccaagtccctcctgctggagaaaagcctggaactgccaaaacaaaaaaacaaatacaaacaaacctcgtcaccacggtcaggaggaggttcagacattctgcccagaggggctggggaaagggatgggagccaggaaagatttaggggcaggagacagacacgtaacaggaactcggaaggtagaacttagaattcagaacttgggtttcaattgtagaatttggaatctggaatacagaattgggaagaagaacagagatgacaaaagaccacttgaagagaggttcctaatactagacagatggagagtggcttggctgtttccccctgcatattggggttgaaaacttaaatgtgtagttccagtccttctatgcagagtctctcctgccctccctccttcctgcaggcaaatatacaagctagaccctgttccctcaccctgtatcctgtctcccctaattgacattctatcagcccaaccctcattctgcagggccacctggtgtgtggaggtggcgggaggggtcagtgactctgggggtctcctcagtgacccccatacctcatcatgaacccttgggtagcttgattctgcctaccatccaggaaaacttgtgctggaattgctgatggaaacaattaaatatttactataaa

SEQ ID NO: 139709 - protein, 1063 aa, Artificial Sequence
  derived and/or modified sequence
MSPGASRGPRGSQAPLIAPLCCAAAALGMLLWSPACQAFNLDVEKLTVYSGPKGSYFGYAVDFHIPDARTASVLVGAPKANTSQPDIVEGGAVYYCPWPAEGSAQCRQIPFDTTNNRKIRVNGTKEPIEFKSNQWFGATVKAHKGKVVACAPLYHWRTLKPTPEKDPVGTCYVAIQNFSAYAEFSPCRNSNADPEGQGYCQAGFSLDFYKNGDLIVGGPGSFYWQGQVITASVADIIANYSFKDILRKLAGEKQTEVAPASYDDSYLGYSVAAGEFTGDSQQELVAGIPRGAQNFGYVSIINSTDMTFIQNFTGEQMASYFGYTVVVSDVNSDGLDDVLVGAPLFMEREFESNPREVGQIYLYLQVSSLLFRDPQILTGTETFGRFGSAMAHLGDLNQDGYNDIAIGVPFAGKDQRGKVLIYNGNKDGLNTKPSQVLQGVWASHAVPSGFGFTLRGDSDIDKNDYPDLIVGAFGTGKVAVYRARPVVTVDAQLLLHPMIINLENKTCQVPDSMTSAACFSLRVCASVTGQSIANTIVLMAEVQLDSLKQKGAIKRTLFLDNHQAHRVFPLVIKRQKSHQCQDFIVYLRDETEFRDKLSPINISLNYSLDESTFKEGLEVKPILNYYRENIVSEQAHILVDCGEDNLCVPDLKLSARPDKHQVIIGDENHLMLIINARNEGEGAYEAELFVMIPEEADYVGIERNNKGFRPLSCEYKMENVTRMVVCDLGNPMVSGTNYSLGLRFAVPRLEKTNMSINFDLQIRSSNKDNPDSNFVSLQINITAVAQVEIRGVSHPPQIVLPIHNWEPEEEPHKEEEVGPLVEHIYELHNIGPSTISDTILEVGWPFSARDEFLLYIFHIQTLGPLQCQPNPNINPQDIKPAASPEDTPELSAFLRNSTIPHLVRKRDVHVVEFHRQSPAKILNCTNIECLQISCAVGRLEGGESAVLKVRSRLWAHTFLQRKNDPYALASLVSFEVKKMPYTDQPAKLPEGSIVIKTSVIWATPNVSFSIPLWVIILAILLGLLVLAILTLALWKCGFFDRARPPQEDMTDREQLTNDKTPEA

SEQ ID NO: 139710 - DNA, 3192 bp, Artificial Sequence
  derived and/or modified sequence
atgagccccggcgccagcagaggccccagaggcagccaggcccccctgatcgcccccctgtgctgcgccgccgccgccctgggcatgctgctgtggagccccgcctgccaggccttcaacctggacgtggagaagctgaccgtgtacagcggccccaagggcagctacttcggctacgccgtggacttccacatccccgacgccagaaccgccagcgtgctggtgggcgcccccaaggccaacaccagccagcccgacatcgtggagggcggcgccgtgtactactgcccctggcccgccgagggcagcgcccagtgcagacagatccccttcgacaccaccaacaacagaaagatcagagtgaacggcaccaaggagcccatcgagttcaagagcaaccagtggttcggcgccaccgtgaaggcccacaagggcaaggtggtggcctgcgcccccctgtaccactggagaaccctgaagcccacccccgagaaggaccccgtgggcacctgctacgtggccatccagaacttcagcgcctacgccgagttcagcccctgcagaaacagcaacgccgaccccgagggccagggctactgccaggccggcttcagcctggacttctacaagaacggcgacctgatcgtgggcggccccggcagcttctactggcagggccaggtgatcaccgccagcgtggccgacatcatcgccaactacagcttcaaggacatcctgagaaagctggccggcgagaagcagaccgaggtggcccccgccagctacgacgacagctacctgggctacagcgtggccgccggcgagttcaccggcgacagccagcaggagctggtggccggcatccccagaggcgcccagaacttcggctacgtgagcatcatcaacagcaccgacatgaccttcatccagaacttcaccggcgagcagatggccagctacttcggctacaccgtggtggtgagcgacgtgaacagcgacggcctggacgacgtgctggtgggcgcccccctgttcatggagagagagttcgagagcaaccccagagaggtgggccagatctacctgtacctgcaggtgagcagcctgctgttcagagacccccagatcctgaccggcaccgagaccttcggcagattcggcagcgccatggcccacctgggcgacctgaaccaggacggctacaacgacatcgccatcggcgtgcccttcgccggcaaggaccagagaggcaaggtgctgatctacaacggcaacaaggacggcctgaacaccaagcccagccaggtgctgcagggcgtgtgggccagccacgccgtgcccagcggcttcggcttcaccctgagaggcgacagcgacatcgacaagaacgactaccccgacctgatcgtgggcgccttcggcaccggcaaggtggccgtgtacagagccagacccgtggtgaccgtggacgcccagctgctgctgcaccccatgatcatcaacctggagaacaagacctgccaggtgcccgacagcatgaccagcgccgcctgcttcagcctgagagtgtgcgccagcgtgaccggccagagcatcgccaacaccatcgtgctgatggccgaggtgcagctggacagcctgaagcagaagggcgccatcaagagaaccctgttcctggacaaccaccaggcccacagagtgttccccctggtgatcaagagacagaagagccaccagtgccaggacttcatcgtgtacctgagagacgagaccgagttcagagacaagctgagccccatcaacatcagcctgaactacagcctggacgagagcaccttcaaggagggcctggaggtgaagcccatcctgaactactacagagagaacatcgtgagcgagcaggcccacatcctggtggactgcggcgaggacaacctgtgcgtgcccgacctgaagctgagcgccagacccgacaagcaccaggtgatcatcggcgacgagaaccacctgatgctgatcatcaacgccagaaacgagggcgagggcgcctacgaggccgagctgttcgtgatgatccccgaggaggccgactacgtgggcatcgagagaaacaacaagggcttcagacccctgagctgcgagtacaagatggagaacgtgaccagaatggtggtgtgcgacctgggcaaccccatggtgagcggcaccaactacagcctgggcctgagattcgccgtgcccagactggagaagaccaacatgagcatcaacttcgacctgcagatcagaagcagcaacaaggacaaccccgacagcaacttcgtgagcctgcagatcaacatcaccgccgtggcccaggtggagatcagaggcgtgagccaccccccccagatcgtgctgcccatccacaactgggagcccgaggaggagccccacaaggaggaggaggtgggccccctggtggagcacatctacgagctgcacaacatcggccccagcaccatcagcgacaccatcctggaggtgggctggcccttcagcgccagagacgagttcctgctgtacatcttccacatccagaccctgggccccctgcagtgccagcccaaccccaacatcaacccccaggacatcaagcccgccgccagccccgaggacacccccgagctgagcgccttcctgagaaacagcaccatcccccacctggtgagaaagagagacgtgcacgtggtggagttccacagacagagccccgccaagatcctgaactgcaccaacatcgagtgcctgcagatcagctgcgccgtgggcagactggagggcggcgagagcgccgtgctgaaggtgagaagcagactgtgggcccacaccttcctgcagagaaagaacgacccctacgccctggccagcctggtgagcttcgaggtgaagaagatgccctacaccgaccagcccgccaagctgcccgagggcagcatcgtgatcaagaccagcgtgatctgggccacccccaacgtgagcttcagcatccccctgtgggtgatcatcctggccatcctgctgggcctgctggtgctggccatcctgaccctggccctgtggaagtgcggcttcttcgacagagccagacccccccaggaggacatgaccgacagagagcagctgaccaacgacaagacccccgaggcctag

SEQ ID NO: 139711 - DNA, 3192 bp, Artificial Sequence
  derived and/or modified sequence
atgtcccctggcgcctctaggggaccacgaggcagccaagcacccctgatcgccccgctctgttgcgccgccgcggcgctcggcatgctgctgtggtctcctgcttgccaggcttttaatctagatgtggaaaaactgactgtctatagtggtccgaaaggctcttacttcggatacgcagtggatttccatattcccgacgcccgtactgcctccgtcttagtgggagcgcctaaagctaacacaagtcagcctgatatagtggaaggcggggctgtgtactactgtccctggcccgccgaggggtcagcccagtgccggcaaatacccttcgataccaccaacaatagaaagatcagagttaacggaactaaggagcccattgaattcaagagcaaccagtggttcggggccactgtcaaggcccacaaagggaaggtggtggcctgcgcccctctctatcattggcgcacactgaagccaactcctgagaaggatccagtcggcacctgctacgtagccatccaaaacttctcagcatatgctgagttctctccttgtcgaaacagcaatgctgaccccgaagggcaggggtactgccaggctggcttctctctcgacttttacaaaaatggtgatttgattgttggcggtccgggatcattctattggcagggccaggtcatcactgctagtgtcgctgacataatagcaaattactcttttaaagatattctgagaaaactggcaggcgaaaagcagaccgaggtggcaccggcttcttacgacgattcctatttgggatacagtgtagccgccggcgagttcacgggagactcccaacaggagttggttgccggaatccccaggggcgctcaaaattttgggtatgtgtccataattaatagcaccgacatgacctttatacagaatttcacaggtgaacaaatggcctcgtacttcggttacacggtagttgtctcagatgttaattctgatggtctagacgatgtgttggtgggcgccccgttgttcatggagcgtgagtttgaaagcaatcctagggaagtgggacaaatctacctgtatctccaggtgtctagtttgctgttccgcgatcctcagatcctgaccggtactgagaccttcgggcgatttggctccgcaatggcacacctaggtgacctaaatcaagacggatataacgatatcgctatcggcgtgccgttcgcagggaaagatcagcgcggaaaagttcttatttacaatgggaataaggatggtctgaacacgaagccgtcccaggtcctccagggggtatgggcctcccacgcagttccaagcggtttcggcttcacgctgcggggggatagcgacatcgacaagaacgactaccccgatctaatcgtgggtgcctttgggaccggcaaggtggccgtatacagggctcgtccggtcgtcactgtcgacgcccagcttctccttcatccaatgattattaatctggaaaataagacgtgtcaggtgccggattcgatgacatctgcagcatgtttttctctgagagtgtgcgcgagcgtcaccggccaatcaatcgccaataccatcgtcctcatggcagaggtgcagttggatagcctgaagcaaaagggcgccattaagagaacgctatttctggataatcaccaggctcaccgagtcttcccccttgtcattaaacgtcagaaatcccatcaatgccaagactttattgtttacctgagggacgaaaccgaattcagggataagctctcacccatcaacatcagtctcaattacagcctggatgagtccacttttaaggaggggcttgaggtcaaacctatcctcaactattaccgggaaaatatcgtgagcgaacaggcacatatcctagttgactgcggagaggacaatctgtgtgtgcctgacctgaagctatctgcacgccccgacaagcaccaagtgatcatcggcgacgagaatcatctaatgcttatcataaacgccaggaacgagggtgagggagcttacgaagctgaactgtttgtgatgatcccagaagaggcagattatgtgggaatagagagaaacaacaagggattcagacctctgtcctgtgagtacaaaatggaaaacgtgacccggatggtcgtctgcgacctgggaaacccaatggtgagtggaactaactattccctaggcctgcgtttcgccgtgcccagacttgagaaaactaacatgagcattaacttcgacctgcagatacgttccagcaacaaagataatcctgactccaatttcgtcagcctccagattaacattaccgccgtagcccaggtggaaatcaggggagtgagtcatcctcctcagatcgtcttgcccatccataattgggaacccgaggaggagccacacaaggaggaagaagtgggtccactggtggagcacatctacgaactgcataatatcggaccctctactataagcgatactatacttgaggtcggctggcccttcagcgctcgcgatgagtttctattatatatatttcacatccaaacattggggcccttgcagtgtcagcctaatccaaacattaatcctcaggacataaagcctgcggctagccccgaggacaccccagagcttagcgccttcttaaggaatagcacaatccctcatctcgtcaggaagcgcgacgtccacgtggtggagtttcacaggcaaagcccagcaaagattctgaattgtactaatatcgagtgccttcagatctcatgcgctgtgggacgcttagagggcggtgaatccgctgtgttgaaggttcgctctcgactttgggcacatacttttttacaacggaagaacgatccttatgcgttagcctccttagtgagtttcgaggtgaagaaaatgccctacacagatcaaccggctaaactgcccgaaggcagcatcgtgataaagacatctgtcatttgggctaccccaaatgtcagtttctccattccattatgggtcattatcctggcaatcctgctaggactattagtcttagccatcttaactctagccctgtggaaatgtggatttttcgatcgggcccggccgccacaagaggacatgacagacagagaacagctcacgaatgataagacccctgaagcctag

SEQ ID NO: 139712 - DNA, 6755 bp, Artificial Sequence
  derived and/or modified sequence
gagatgggactgcaatagaaatccgggcagcccgaagaggcacccagcgctccagccaccagctgggccgcccgggagtccctggctctagaccagccgcgaggaggcgccgcgagagagctggtccctgcccgcggccggaggagggctagagcccctgggccagccccccgagccggctgggcgggcgggcgggtgggagcagacgccgggcactgtcaccacgggtgcgccgagcgcaccgacccgggacacgggcagctggggaccgccagattccaccagccccccttgccccgcaggggtcctcggctcgcgctcctgggtagcagccacccaccggggcggagggagatgtcgcccggggccagccgcggtccccggggaagccaggcgccgctgatcgcgcccctctgctgcgccgcggccgcgctggggatgttgctgtggtcccccgcctgtcaggcgttcaacctggacgtggaaaagctcacagtgtacagcggccccaagggcagctacttcggctacgccgtggacttccacatacccgacgcccgcacagcgagtgtcttggtgggggcgcccaaagccaacaccagccagcccgatatcgtggaagggggagccgtctattactgtccttggcccgcggaggggtctgcgcagtgcaggcagataccgtttgacaccaccaacaacagaaagatcagagttaatggaaccaaagaacctatcgagttcaaatccaatcagtggtttggagcaacagtgaaagctcacaaaggaaaagttgtggcctgtgctcctttatatcactggagaactcttaaaccgacaccagaaaaggacccagttggcacctgctatgtagcaattcagaacttcagcgcctatgccgagttctctccttgccggaacagcaatgctgatccggaaggccagggttactgccaagcaggatttagtctggatttttataagaatggagaccttattgtgggaggacctgggagtttctactggcaaggacaagtgatcactgccagtgttgcagatatcattgcaaattactcattcaaggatatcctcaggaaactggcaggagaaaagcagacggaagtggctccagcttcctatgatgacagttaccttggatactcagttgctgctggggagtttactggggattctcagcaagaattggttgctggaattccaagaggagcacagaattttggatatgtttccatcattaactctacggatatgacgtttattcagaatttcacgggagaacagatggcatcttattttggatataccgttgtcgtatcagatgttaacagtgatggactggatgatgtcctggttggggcacctctctttatggaacgtgaatttgagagcaaccccagagaagtagggcaaatctacctgtatttgcaagtgagctctctcctcttcagagacccccagatcctcactggcaccgagacgtttgggagattcggtagtgctatggcacacttaggagacctgaaccaagatggatacaatgacattgccatcggagtgccttttgcaggcaaggatcaaagaggcaaagtgctcatttataatgggaacaaagatggcttaaacaccaagccttcccaagttctgcaaggagtgtgggcctcacatgctgtcccttccggatttggctttactttaagaggagattcagacatagacaagaatgattacccagatttgattgtgggtgcatttggaacaggaaaagtcgctgtttacagagcaagaccggttgtgactgtagatgcccagcttctgctgcacccaatgattatcaatcttgaaaataaaacttgccaggttccagactctatgacatctgctgcctgcttttctttaagagtatgtgcatctgtcacaggccagagcattgcaaacacaatagtcttgatggcagaggtgcaattagattccctgaaacagaaaggagctattaaacggacgctcttccttgataaccatcaggctcatcgcgtcttccctcttgtgataaaaaggcagaaatcccaccagtgccaggatttcatcgtttaccttcgagatgaaactgaattccgagataaattatctccaatcaacattagtttgaattacagtttggacgaatccacctttaaagaaggcctggaagtgaaaccaatattgaactactacagagaaaacattgttagtgaacaggctcacattctggtggactgtggagaagacaatctgtgtgttcctgacttgaagctgtcggctagaccagataagcatcaggtaatcattggagatgaaaatcaccttatgctcataataaatgcaagaaatgaaggggaaggagcatatgaagctgaactctttgtaatgataccagaagaggcagattatgttggaatcgaacgcaacaacaagggatttcgaccactgagctgtgagtacaagatggaaaatgtaaccaggatggtggtgtgtgaccttgggaaccctatggtgtctggaacaaattattccctgggcctccgatttgcagttccacgtcttgagaaaacaaacatgagcattaacttcgatctccaaatcagaagttccaacaaggacaatccagacagcaattttgtgagcctgcaaatcaacatcactgctgtagcgcaggtggaaataagaggagtgtcacaccctccgcagattgttctgcccattcataactgggaaccagaagaggagccccacaaagaggaggaggttggaccattggtggaacatatttatgagctgcacaatattggaccaagtaccatcagtgacaccatcctggaggtgggctggcctttctctgcccgggatgaatttcttctctatattttccatattcaaactctgggacctctgcagtgccaaccaaatcctaatatcaatccacaggatataaagcctgctgcctccccagaggacacccctgagctcagcgcctttttgcgaaactctactattcctcatcttgtcaggaagagggatgtacatgtggtcgaattccacagacagagccctgcaaaaatactgaattgtacaaatatcgagtgtttacaaatctcctgtgcagtgggacgactcgaaggaggagaaagcgcagtcctgaaagtcaggtcacgattatgggcccacaccttcctccagagaaaaaatgatccctatgctcttgcatccctggtgtcctttgaagttaagaagatgccttatacagatcagccagcaaaactcccagaaggaagcatagtaattaagacatcagttatttgggcaactccgaatgtttccttctcaatcccattatgggtaataatactagcaatacttcttggattgttggttctcgccattttaaccttagctttatggaagtgtggattctttgacagagccagacctcctcaggaggacatgaccgacagggaacagctgacaaatgacaagacccctgaggcatgacaagaaaaaaaaagaagaccaaagacctcaaacactggtcctgttcaaagaaaaagaaagaacatgagggttaaaaatcaaagctttctgatacctgacagtgacccaggaaatggaggggaccctggaaacatcacctcatctacaccgcactttggagaaattgtcctgggtgcccagtgagccctgttggaaaaggaaacaccaaagctggagaagccatcagcaattgtggaagattttcttttgctttaatcgttctgtacttggcagacactttgaaatgcgtatgggaacgtaagttgcagtccagatcaatccagcataagttgcagagatgaaatgtctgaatcactatagaatttacaaggtgaactaaggtgaaatgactgatttactatagaacttagaactaagaccacaccatccaacactactgtatccaatggaacatttgacacctccctatggaaaagaaacatttctaaggacattatggctcagggagacaagcaatatgttgttggtactgtgaaagtacttttgaaaggacaaaaataatcttgtgagtgagggtgagagtttatttatttattttccatgtctctaggttgagaatctgtcatctagagaatttggaaattaagatttggttagctagttttcaaaatcactcactcagtttcctcctaagaaccactgtgtgcagataactcatttagcagagcttcttcagaatttagacagtgctaaggaaaggaagattggcattaggaatcagttctatttaataccttgctgccttccatctgaaattcctttcactcacattatccagggactcacatctgcttaatttagctttgcaagatgttgcatttatatttccttgtatatctttccattgacttagttaatacatgaatttcgaggtactctctacctttggagtgtttaaaagtcatggtaaaatgtctagagttcattaattaaaaagcaatttaacattatgggtaaacattatttttaatatctataagaagcaacacttcttatagatatttagcttgggattaaatacccgtttttcctgctatgccttgtacttgtatacacagagaaaacatgttgaatataacttagacaaaaacataaaattatacaggcatgagccaaactgggaaaactgattcctaaagatttttatttaaaattgcttattccaactttattacttatttttactgctaatctttataatatgtaactttggagaataatcttttatttaagctattttcccatcatcttgaatttaaccatcacaaattttttatgtttaaaactcttgtaaataattcataatcttgtaatattatcatttttgaagtaaaattgaccagccaaatttataggtagtctgcacaattttgtatccttttttaataatgaaaaattactatgaagaaatactgaacaaatttttatgtgcaatattttatagacctatgtatctgaagcatgtttacactggcgtttttttttttaattaatttcctaaatgttaagtatgatagaacaagctgacccaaatccttaagtttacaaagctgttggaaaactttgtgtcctgatttcaacaatcacgctttgtttgaaagatgagccaagctcacagacactaaattttatgtcatgccataagctggagaggagccatttggctacagctgcggaacttcattgaggagcaaatgaaaggcacatggacgagcacgctggtgcagttcatgttcttcctgcctgtgaattgaatactgtcctggtagcagtttcgggtcggtcaggagctcaaggctggtttgtgtggctgactacggatgagcactgaagttgcctcaaagaattaaggggtgtccacaccagcctctgggggtctttggtgttagtcttccaggtagagctggttttacaagtaggtggccatctacaggatgtgatgtgagcgatgccagacagctctctctgaccccaggtaatgccctgaatctggtgatcctggctgatctgtgaccaatagagattagctccttgggatttggggtcctaaaaggtccctgaaaaaatgcaccccttgtctttaagccaacattggtgaaggaactgagaactcttagggttacataaaaaaagacccctgttgagatagtttatgcagatacctggaaggaactagagatgccaggaggaagactgagacccagaatgaagcaaggcatgagggctccaaagtgaactgcaccatcccagagtctcagccaagatggccctttcctagagggacgggcaccttccacctgcccacaggcactgctacctatgggaattgcagaaggccgttgtacacacgcgcatgcacgcagtggccctctgccctttagaatatggaagcaaagtctgggtgcagtgactcacacttgtaatcccaacactttgggaggccgagacgggcagatcacctgagttcaggagttcaagaccagcctggccaacgtggcaaaaccccatctctactaaaaatacaaaaattagctgggcgtggtggcagtctcctgtaatcccagctacctaggaggctgaggcagagagagaatcgcttgaacccaggaggcggaggttgcagtgagctgagatcgcgcgactgcactccagcctgggcgacagagggaaactctgtctcaacaaaaaaataaataaaataaaaaataaaaaaagaatatggaagcaaatggagaaagggaggaaactgaggtcaggcaaaccttccagcaatccgttctgcccagagaacatactgacgacagagaacacactgagcgttatctgcttctagttagagcattgccgattgccttcataattcataatgtgctgtgctcctctgagggtctatctgtatttctcttcaaagaattccctttttaaattcttgcagctgggttttaagacacaataatggggcaaattaagttttataaacttggagatttttatacagtaaataaaaaaataatatgtactagtcacccctgaaactgcattcttagaactcgactcttgttttatttaaatacgtgcgtagatatctgtgaagattttcatgtacctatttaccttgtcactaataaaattaaaactgaaagacttga

SEQ ID NO: 139713 - DNA, 3192 bp, Artificial Sequence
  derived and/or modified sequence
atgagccctggggccagccggggcccccggggcagccaggcccccctgattgcccccctgtgctgtgccgctgctgccctgggcatgctgctgtggagccctgcctgccaggccttcaacctggatgtggagaagctgactgtgtacagcggccccaagggcagctacttcggctatgctgtggacttccacatcccagatgccaggacagcctctgtgctggtgggcgcccccaaggccaacaccagccagcctgacatcgtggagggcggcgctgtgtactactgcccctggccagctgagggcagcgcccagtgccggcagatcccctttgacaccaccaacaacaggaagatccgggtgaatggcaccaaggagcccatcgagttcaagagcaaccagtggtttggagccaccgtgaaggcccacaagggcaaggtggtggcctgtgcccccctgtaccactggaggaccctgaagcccaccccagagaaggaccctgtgggcacctgctacgtggccatccagaacttcagcgcctatgcagagttcagcccctgcaggaacagcaatgctgaccctgagggccagggctactgccaggccggcttcagcctggacttctacaagaatggagacctgattgtgggcggccctggcagcttctactggcagggccaggtgatcacagcctctgtggccgacatcatcgccaactacagcttcaaggacatcctgaggaagctggccggggagaagcagacagaggtggccccagccagctatgatgacagctacctgggctacagcgtggccgccggggagttcaccggggacagccagcaggagctggtggccggcatccccaggggggcccagaactttggctacgtgtccatcatcaacagcacagacatgaccttcatccagaacttcaccggggagcagatggccagctacttcggctacacagtggtggtgtctgatgtgaacagtgatggcctggatgatgtgctggtgggcgcccccctcttcatggagcgggagtttgagagcaacccccgggaggtgggccagatctacctgtacctgcaggtgagcagcctgctcttccgggacccccagatcctgaccggcacagagaccttcggccgcttcggcagcgccatggcccacctgggggacctgaaccaggacggctacaatgacatcgccatcggcgtgccctttgctgggaaggaccagaggggcaaggtgctgatctacaatggaaacaaggatggcctgaacaccaagcccagccaggtgctgcagggcgtgtgggccagccatgctgtgcccagcggcttcggcttcaccctgcggggggacagcgacatcgacaagaatgactacccagacctgattgtgggcgcctttggaacaggcaaggtggccgtgtaccgggcccggcctgtggtgacagtggatgcccagctgctgctgcaccccatgatcatcaacctggagaacaagacctgccaggtgcctgacagcatgaccagcgctgcctgcttcagcctgcgggtgtgtgcctctgtgacaggccagagcatcgccaacaccatcgtgctgatggccgaggtgcagctggacagcctgaagcagaagggggccatcaagaggaccctcttcctggacaaccaccaggcccacagggtcttccccctggtgatcaagaggcagaagagccaccagtgccaggacttcatcgtgtacctgagagatgaaacagagttccgggacaagctgagccccatcaacatcagcctgaactacagcctggatgagagcaccttcaaggagggcctggaggtgaagcccatcctgaactactaccgggagaacatcgtgtctgagcaggcccacatcctggtggactgtggggaggacaacctgtgtgtgcctgacctgaagctgagcgcccggccagacaagcaccaggtgatcattggagatgagaaccacctgatgctgatcatcaatgccagaaatgaaggagagggcgcctatgaggccgagctgtttgtgatgatccctgaggaggccgactatgtgggcattgaaagaaacaacaagggcttccggcccctgagctgtgagtacaagatggagaatgtgaccaggatggtggtgtgtgacctgggcaaccccatggtgtctggcaccaactacagcctgggcctgcgctttgctgtgccccggctggagaagaccaacatgagcatcaactttgacctgcagatccgcagcagcaacaaggacaacccagacagcaactttgtgtccctgcagatcaacatcacagctgtggcccaggtggagatccggggcgtgagccaccccccccagatcgtgctgcccatccacaactgggagcctgaggaggagccccacaaggaggaggaggtgggccccctggtggagcacatctatgagctgcacaacatcggccccagcaccatcagtgacaccatcctggaggtgggctggcccttcagcgccagagatgagttcctgctgtacatcttccacatccagaccctgggccccctgcagtgccagcccaaccccaacatcaacccccaggacatcaagccagctgccagccctgaggacaccccagagctgagcgccttcctgaggaacagcaccatcccccacctggtgaggaagagagatgtgcacgtggtggagttccaccggcagagccctgccaagatcctgaactgcaccaacatcgagtgcctgcagatcagctgtgctgtgggccgcctggagggcggggagagcgctgtgctgaaggtgcgcagccggctgtgggcccacaccttcctgcagaggaagaatgacccctatgccctggccagcctggtgtcctttgaggtgaagaagatgccctacacagaccagcctgccaagctgcctgagggcagcatcgtcatcaagaccagcgtcatctgggccaccccaaatgtgtccttcagcatccccctgtgggtgatcatcctggccatcctgctgggcctgctggtgctggccatcctgaccctggccctgtggaagtgtggcttctttgaccgggcccggcccccccaggaggacatgacagaccgggagcagctgaccaatgacaagaccccagaggcctag

SEQ ID NO: 139714 - DNA, 3192 bp, Artificial Sequence
  derived and/or modified sequence
atgagccccggcgccagccggggcccccggggcagccaggcccccctcatcgcccctctctgctgcgccgccgctgccctgggcatgctgctgtggagtccggcatgccaggccttcaacctggacgtcgagaagttgacggtgtatagtggtccaaaagggtcgtactttggttacgcggtagatttccatatccccgacgcaaggacagccagtgtgcttgtgggggcacccaaggccaacacttctcaacccgacattgtagaagggggagccgtctattattgcccatggcctgcagaaggttccgcccagtgtcgacagattcctttcgacaccacaaataaccgaaagatcagggtgaacggcaccaaagagcctatcgaatttaagagcaatcagtggtttggtgctactgtcaaagctcacaaagggaaggtggtggcttgtgctccgctctatcactggcggaccttgaaacctactccggaaaaagaccccgttggtacatgttacgtggccatccagaactttagcgcctacgcagaattttccccctgtcgcaatagcaatgcagacccagaggggcaaggctattgtcaggcagggttcagtctggatttctacaagaatggcgacttgatagtggggggccccggcagtttctactggcagggccaggtgataaccgcatccgttgctgacatcattgctaactattcatttaaagatatccttcgaaagttagccggggagaagcagactgaagtcgcacctgcctcttatgacgactcctacctaggctattcagtcgctgcgggcgagtttacaggcgacagccagcaagagctggtggccggaatacctagaggagctcaaaatttcggttacgtaagcatcatcaacagtacagacatgacattcatccagaactttacaggagagcaaatggcgtcttacttcggctacactgttgtcgtcagtgatgttaacagcgacgggctcgacgacgttctggtgggggccccgctgttcatggaacgggagtttgagtcaaatccacgagaggtcggtcaaatttatctctacctccaggtgagctcactactattccgggacccacagatcctgacaggtactgaaacatttggaagattcggttctgccatggcacatctcggcgatctcaatcaggacggttacaatgacatagcaatcggtgtgcccttcgccgggaaggaccagcgaggtaaagtgctcatttataatggcaataaagacggtttgaacacgaaaccttctcaggtgctgcaaggtgtgtgggcctctcatgctgttccctccggctttggattcacactgcgcggagactcagatatagataaaaacgactaccccgacctaattgtgggcgcattcggcactggcaaggtggctgtgtaccgggcccggccagtcgtgactgtcgatgcccagcttctcctgcacccaatgatcattaatttggagaataaaacttgccaagtacctgatagcatgacgagcgccgcatgtttctcattgcgcgtgtgcgcatctgtgaccggccagagcatcgctaatacaatcgttctaatggctgaggtgcagctagacagcctgaaacagaagggggcaatcaagcgtactctgtttctggacaaccaccaagcccatcgggtgttccccctggtgatcaagagacagaagagccaccaatgtcaggattttatcgtctacttgcgggacgaaaccgagttccgggataagctgtcacccattaacatctcgctaaactattcgctggacgaatccacattcaaggagggcctggaagttaaacccatcctgaactactatagagagaatatcgttagtgaacaggcgcatattttagtggattgcggcgaagataacctttgcgtgccagatctgaaattgagtgccagacccgataaacaccaggtgatcattggtgacgagaatcacttgatgcttataataaatgccaggaatgagggcgagggggcctacgaagcagagttatttgttatgattcccgaagaagcagattacgtgggaatcgagcgcaacaacaagggcttcaggcccttgtcatgtgaatataaaatggaaaacgttacaagaatggtcgtgtgcgatctgggcaaccctatggttagcggtaccaattactctctgggacttagattcgctgttccacggctggagaagaccaacatgtctataaacttcgacctgcagatccggagctctaataaagataaccctgacagtaactttgtgtcactgcagattaacattactgctgtggcacaggtggaaattaggggagtatcacatccaccacagattgtgctgcccatccataactgggaaccagaagaggagcctcataaagaggaggaggtcgggccactggttgagcatatctacgagctgcacaacatcgggccatctaccatctctgatactattcttgaagtcggctggcctttcagcgctcgagacgagtttctgttgtatatcttccacattcagaccctgggacctcttcagtgtcagcccaatcctaatattaatcctcaagatataaaacccgcggcttctcccgaggatactccagagctctcagcttttctgcggaattccacaatcccgcacctcgtccggaaaagggatgtgcatgtagtagagtttcacagacaatctcctgccaaaatcttgaactgtactaatattgaatgtctgcagatcagttgtgctgtggggcgattggagggaggtgagtcagccgtgctgaaggtacgctcaaggctgtgggcccacaccttcttacagagaaagaatgacccctacgcacttgccagccttgtttcattcgaggtgaagaaaatgccttataccgatcagcccgccaagctccccgaaggctcaatcgtcatcaaaacatctgtgatctgggctacccccaatgtgagcttctctattcccctctgggtcatcattcttgctatcctactgggcctactggtcctggctatattgaccctcgccctgtggaagtgcggcttttttgaccgggctcggccgccccaggaggatatgaccgacagagagcaacttaccaacgataagactcccgaggcctag

SEQ ID NO: 139715 - DNA, 3192 bp, Artificial Sequence
  derived and/or modified sequence
atgagtccaggcgcaagccgcggtcccagaggtagccaggctcccttgatagccccactctgttgtgccgctgccgctcttggcatgttgctctggtctccagcctgccaagcctttaacctagacgttgagaagctgaccgtttactcaggtcccaaaggcagctatttcggttacgctgtggatttccacatccctgatgcccgtaccgcctccgtgctcgtcggcgctcccaaggcgaacacaagtcagcccgatatcgtggaaggcggagcggtctattattgcccctggccggcagagggtagcgcccaatgtcgacagattcccttcgatacgactaataaccgtaagatccgcgtaaacggtacaaaggaacctattgaatttaaaagtaatcagtggttcggcgcaaccgtcaaggctcataagggcaaagtcgtcgcgtgtgcccctctctaccattggcgcacactcaagcccacccccgagaaagatcccgtagggacctgctacgtagcaatacagaattttagtgcctacgccgagttcagcccttgccgaaactccaacgccgatccagaaggtcaaggctactgccaagctgggttcagtctggacttctacaagaatggagatctgatcgttgggggaccaggcagtttctattggcagggccaggtaatcaccgcttctgttgccgatatcatcgcaaattacagcttcaaagatattctcaggaaactcgccggtgaaaaacagaccgaggttgccccagcatcctatgacgattcttacctcggctattccgtggccgcaggagaattcacaggcgatagccagcaggagctagtcgccggtatcccacggggagcacagaatttcgggtatgtaagtattatcaattcaaccgacatgacttttatccagaacttcacgggcgagcagatggctagctatttcggatacactgtagtggtaagcgacgtgaatagcgatgggctggatgacgtgctagtgggggctcctctcttcatggagcgtgaattcgaatctaaccccagagaggtggggcagatttatctctacctgcaggtgtcaagcctcctgtttcgagaccctcagatactgaccgggaccgaaactttcggccgattcggctccgccatggcgcatcttggtgacctgaatcaggacggctacaacgacatcgcgattggcgtgcccttcgcaggcaaagatcaacgtggaaaagtgttgatttataatggaaataaggacggactgaataccaagccgagtcaagtgctgcagggagtctgggcttcccatgcagtgcccagtggtttcggtttcacgcttcgtggagatagcgacatcgataaaaacgactaccctgacttgattgtgggagctttcgggaccggaaaagtcgcagtttatcgcgcaagacctgtggttacggtggacgcccagcttctgctacaccctatgatcatcaatctggaaaataagacttgccaagtgcctgactccatgacgtcagctgcatgcttttctctcagggtgtgtgcctctgtaacgggtcaaagtattgcaaatacaatagtccttatggctgaagtgcagttggattcgctgaagcagaaaggcgctataaaacgtacactgttcctcgataatcatcaggcacaccgagtattccccctggttattaagagacagaagtcacaccagtgccaggacttcattgtatatttgagggacgagactgagtttcgtgacaaactcagtcccatcaacatctcactgaactactcactggacgagtctacctttaaggaggggcttgaagtcaaacctatcctcaattactaccgggagaatatcgtgagcgagcaggctcacatcctcgtggactgtggcgaggataacctctgcgtcccagatcttaaactcagcgcccgacccgacaaacaccaagtaatcatcggcgacgaaaatcatttaatgttaattattaacgcaaggaacgagggagagggggcatacgaagccgagctgtttgtgatgatacccgaggaggcggactatgtgggtatcgaacgaaataacaaaggcttccggcctctgtcatgtgagtataagatggaaaatgttactagaatggtggtgtgcgaccttggaaatccaatggtaagtggtaccaattattcactgggcctgagatttgcagtacccagacttgagaaaacgaacatgtcaatcaactttgatctgcaaataaggtcgtccaacaaagacaaccctgacagtaacttcgttagcctccagatcaacatcacggccgtcgctcaggtagaaattcgaggagtgtcccacccaccccagattgtactacctattcacaactgggagccagaagaggaaccacacaaagaggaggaagttggaccactggtcgagcacatttacgagttacacaatatcggaccttctactatcagcgataccattctggaggttggctggccattctctgcccgtgacgagttcctgttgtatatcttccacatacagacactgggtcccctccagtgccagccgaatccaaacattaaccctcaggatatcaaacctgcagcctccccggaagatacccccgagctctccgcattcctgcgaaacagcacaatacctcatctcgttcggaagcgagatgtgcatgtcgtggagtttcaccggcagtccccagctaaaattctgaactgtactaatatcgaatgtttacagatcagctgcgcagtcggcagactggaggggggagaatcagctgtgctgaaggtccggagtaggctctgggcccacacgttccttcagcgaaagaacgacccttatgctctggcaagcctggtctcctttgaggttaagaagatgccttatacagatcaacccgcaaagctgcctgaaggtagcatcgtcattaagactagcgtaatttgggcaactcccaatgtcagcttctccatccccctgtgggtaatcatacttgccatactactgggcctgctggtgttagctatattgaccctggcgctctggaaatgcgggttctttgatcgcgctcgaccgccacaggaggacatgaccgatagagagcaactgacaaatgacaagactcctgaagcttag

SEQ ID NO: 139716 - protein, 1332 aa, Artificial Sequence
  derived and/or modified sequence
MRNLKLFRTLEFRDIQGPGNPQCFSLRTEQGTVLIGSEHGLIEVDPVSREVKNEVSLVAEGFLPEDGSGRIVGVQDLLDQESVCVATASGDVILCSLSTQQLECVGSVASGISVMSWSPDQELVLLATGQQTLIMMTKDFEPILEQQIHQDDFGESKFITVGWGRKETQFHGSEGRQAAFQMQMHESALPWDDHRPQVTWRGDGQFFAVSVVCPETGARKVRVWNREFALQSTSEPVAGLGPALAWKPSGSLIASTQDKPNQQDIVFFEKNGLLHGHFTLPFLKDEVKVNDLLWNADSSVLAVWLEDLQREESSIPKTCVQLWTVGNYHWYLKQSLSFSTCGKSKIVSLMWDPVTPYRLHVLCQGWHYLAYDWHWTTDRSVGDNSSDLSNVAVIDGNRVLVTVFRQTVVPPPMCTYQLLFPHPVNQVTFLAHPQKSNDLAVLDASNQISVYKCGDCPSADPTVKLGAVGGSGFKVCLRTPHLEKRYKIQFENNEDQDVNPLKLGLLTWIEEDVFLAVSHSEFSPRSVIHHLTAASSEMDEEHGQLNVSSSAAVDGVIISLCCNSKTKSVVLQLADGQIFKYLWESPSLAIKPWKNSGGFPVRFPYPCTQTELAMIGEEECVLGLTDRCRFFINDIEVASNITSFAVYDEFLLLTTHSHTCQCFCLRDASFKTLQAGLSSNHVSHGEVLRKVERGSRIVTVVPQDTKLVLQMPRGNLEVVHHRALVLAQIRKWLDKLMFKEAFECMRKLRINLNLIYDHNPKVFLGNVETFIKQIDSVNHINLFFTELKEEDVTKTMYPAPVTSSVYLSRDPDGNKIDLVCDAMRAVMESINPHKYCLSILTSHVKKTTPELEIVLQKVHELQGNAPSDPDAVSAEEALKYLLHLVDVNELYDHSLGTYDFDLVLMVAEKSQKDPKEYLPFLNTLKKMETNYQRFTIDKYLKRYEKAIGHLSKCGPEYFPECLNLIKDKNLYNEALKLYSPSSQQYQDISIAYGEHLMQEHMYEPAGLMFARCGAHEKALSAFLTCGNWKQALCVAAQLNFTKDQLVGLGRTLAGKLVEQRKHIDAAMVLEECAQDYEEAVLLLLEGAAWEEALRLVYKYNRLDIIETNVKPSILEAQKNYMAFLDSQTATFSRHKKRLLVVRELKEQAQQAGLDDEVPHGQESDLFSETSSVVSGSEMSGKYSHSNSRISARSSKNRRKAERKKHSLKEGSPLEDLALLEALSEVVQNTENLKDEVYHILKVLFLFEFDEQGRELQKAFEDTLQLMERSLPEIWTLTYQQNSATPVLGPNSTANSIMASYQQQKTSVPVLDAELFIPPKINRRTQWKLSLLD

SEQ ID NO: 139717 - protein, 983 aa, Artificial Sequence
  derived and/or modified sequence
MWDPVTPYRLHVLCQGWHYLAYDWHWTTDRSVGDNSSDLSNVAVIDGNRVLVTVFRQTVVPPPMCTYQLLFPHPVNQVTFLAHPQKSNDLAVLDASNQISVYKCGDCPSADPTVKLGAVGGSGFKVCLRTPHLEKRYKIQFENNEDQDVNPLKLGLLTWIEEDVFLAVSHSEFSPRSVIHHLTAASSEMDEEHGQLNVSSSAAVDGVIISLCCNSKTKSVVLQLADGQIFKYLWESPSLAIKPWKNSGGFPVRFPYPCTQTELAMIGEEECVLGLTDRCRFFINDIEVASNITSFAVYDEFLLLTTHSHTCQCFCLRDASFKTLQAGLSSNHVSHGEVLRKVERGSRIVTVVPQDTKLVLQMPRGNLEVVHHRALVLAQIRKWLDKLMFKEAFECMRKLRINLNLIYDHNPKVFLGNVETFIKQIDSVNHINLFFTELKEEDVTKTMYPAPVTSSVYLSRDPDGNKIDLVCDAMRAVMESINPHKYCLSILTSHVKKTTPELEIVLQKVHELQGNAPSDPDAVSAEEALKYLLHLVDVNELYDHSLGTYDFDLVLMVAEKSQKDPKEYLPFLNTLKKMETNYQRFTIDKYLKRYEKAIGHLSKCGPEYFPECLNLIKDKNLYNEALKLYSPSSQQYQDISIAYGEHLMQEHMYEPAGLMFARCGAHEKALSAFLTCGNWKQALCVAAQLNFTKDQLVGLGRTLAGKLVEQRKHIDAAMVLEECAQDYEEAVLLLLEGAAWEEALRLVYKYNRLDIIETNVKPSILEAQKNYMAFLDSQTATFSRHKKRLLVVRELKEQAQQAGLDDEVPHGQESDLFSETSSVVSGSEMSGKYSHSNSRISARSSKNRRKAERKKHSLKEGSPLEDLALLEALSEVVQNTENLKDEVYHILKVLFLFEFDEQGRELQKAFEDTLQLMERSLPEIWTLTYQQNSATPVLGPNSTANSIMASYQQQKTSVPVLDAELFIPPKINRRTQWKLSLLD

SEQ ID NO: 139718 - DNA, 3999 bp, Artificial Sequence
  derived and/or modified sequence
atgcgcaacctgaagctgttccgcactcttgaatttcgcgatattcagggacccgggaatccccagtgcttcagtctgagaaccgaacagggcactgtactgatcggctcagaacatggcctaattgaagttgaccctgttagtcgggaagtgaaaaacgaagtcagtttggtagctgaaggattcctgcctgaagacggatcgggccgcattgttggagtgcaagacctgctggatcaggaaagtgtgtgtgtggcaaccgccagcggggacgtgattctatgcagcctgagcactcagcagctggaatgtgtggggagcgtggcgtccggcatttccgtaatgagttggtcaccggatcaggaactggtgcttcttgctaccggacagcagacacttattatgatgaccaaggactttgagcctattcttgagcagcagatacatcaggatgactttggtgaatccaagtttattacggtaggatggggccgaaaggagactcagttccatggcagcgaaggtcgacaagctgctttccagatgcagatgcacgaatcagcactcccatgggacgaccataggccacaagtgacttggagaggtgacggacagttctttgccgtgtcagtggtctgtcccgagacaggagcccggaaagtacgagtttggaatagggaatttgccctgcaatccacaagcgaaccagtggccggcctcggacctgctctggcctggaagcctagcgggtctctcatagcgtccacacaggacaagcccaaccaacaggacattgttttcttcgagaagaatggcttgctgcatggtcacttcaccctgcccttcctgaaggatgaagtgaaggtgaatgatcttctatggaacgcagacagttccgtgctggcggtgtggctcgaagacctgcagcgggaggagtcttctatccccaagacctgcgttcaattatggacggtgggcaattaccactggtatctcaagcaatcactgagcttcagcacatgtggaaaatctaaaattgtttctctgatgtgggatccggtgaccccctacagattgcatgtgctgtgccaaggttggcactatctcgcatatgactggcactggactactgaccggagcgtcggcgataattcatccgatctgtccaacgtcgccgtcattgatggcaatagggtgctggtcacagtctttcggcagaccgtcgtgcccccgccaatgtgtacttatcaacttctcttccctcaccccgtcaaccaagtgacattccttgcccatcctcagaagagtaatgatttggcagttctggacgcctccaatcagattagcgtgtacaaatgtggagattgtccaagcgccgatcctacagtgaaactgggggcggtgggcggctcagggttcaaggtatgcctcagaacaccccacctcgagaagcgatacaaaatacagttcgagaacaatgaggatcaggacgtaaaccctctgaaactgggactgctgacatggatcgaggaagatgtctttcttgccgtatcccactcagaattctctccacgctcagttatccatcacctgacagccgcatcaagtgagatggatgaggaacatggtcagttgaacgtgtctagtagcgcagccgtagatggtgtgatcatatcactctgttgcaactcaaagactaagtcggtcgtactgcaactagctgatggccagattttcaagtatctttgggaatccccctcccttgcaattaagccttggaagaactccgggggcttccccgtgagatttccatatccttgtactcagaccgaacttgccatgattggtgaagaagagtgcgtgctcgggctgactgatagatgtagattctttattaacgacatcgaggtggcaagcaacatcacttcatttgcagtctacgatgagttcctgctcttgaccacccactcccacacatgtcaatgcttctgtcttagggacgcaagtttcaaaacattgcaagcaggcttatcttctaaccatgtgtcccatggcgaagtgctgaggaaggttgagaggggctcccgcatcgtgacagtggtacctcaagacacaaagctggtgcttcaaatgcctcggggtaatctggaagtcgtccaccacagggctcttgtgctagcccagataaggaagtggctggataaactcatgtttaaggaagctttcgaatgtatgagaaagttgcggatcaacctgaatctgatttacgatcacaaccctaaggtcttcctgggaaatgttgagacattcataaaacagattgactctgtgaaccatattaatctgttctttacagagctaaaggaggaggacgtgacaaaaacaatgtaccccgcccccgttacctcttcagtctatttatctcgggatccagatggaaataagatcgacctcgtgtgtgatgccatgagggccgttatggagtccatcaatccccacaagtattgtttatccatcctgacgtcccatgtcaagaaaacaaccccagagttggaaatcgttctgcagaaagtccacgaacttcagggtaatgcaccttcagaccccgacgctgtttccgcagaggaagccctcaaatacctgctgcatctggtggacgtgaatgaactttacgaccacagcctgggaacttacgacttcgacctcgtcctcatggtcgctgagaagtcgcagaaggatcctaaagagtatctgcccttcctaaacacacttaaaaaaatggaaactaattaccagaggttcacaattgataagtacctgaaaaggtacgagaaagccatcggacacctgtccaagtgcggccccgaatactttcctgagtgcttgaatctgatcaaagacaaaaacctgtataatgaggctcttaagttatacagcccctcctcccagcaatatcaggacatcagcatcgcctacggcgaacatctcatgcaggagcatatgtacgaaccagcaggtctcatgtttgcccggtgtggggcccacgagaaagccctgagtgcgttcctgacatgcggaaactggaagcaggccctttgtgttgccgctcagttaaattttaccaaggatcagctggtcgggctgggtcgaactctcgcgggaaagctcgttgagcagcgaaagcatatagacgccgcaatggtccttgaggagtgtgcccaggattatgaggaagcagtgttactgctcttagaaggcgcagcttgggaagaagcgctaagactggtgtacaaatacaataggctcgatataatagaaacaaatgtgaaaccgagcattcttgaggctcagaaaaactacatggctttcctggatagccagactgctacgttttcaagacataaaaagagattactggtggtaagagaactgaaggaacaggcacaacaggcaggcctcgacgatgaggtgccccacgggcaggagtcagacctgttcagcgaaacttctagcgtggtcagcggaagcgagatgtctgggaagtacagccactccaactctaggatcagtgctagaagttcaaagaatcgtcggaaggctgaacggaagaaacatagcttgaaagaggggtctcctctggaggacttagccttgctagaggccctcagcgaagtcgtgcaaaatactgagaatctgaaggatgaggtgtaccacatcctaaaagtccttttcctgtttgaatttgacgagcagggacgggagctacagaaagccttcgaagacactttacagctgatggaacgcagccttcccgaaatctggactctgacataccagcagaactccgccactcctgttttggggcctaactctactgcaaacagtattatggccagctatcaacagcagaaaaccagcgtcccagtgctggacgcagagttgttcattccgcctaaaattaaccgacgcacccagtggaagctgtcactgctcgattag

SEQ ID NO: 139719 - DNA, 5905 bp, Artificial Sequence
  derived and/or modified sequence
agtgctgcggctgcctagttgacgcacccattgagtcgctggcttctttgcagcgcttcagcgttttcccctggagggcgcctccatccttggaggcctagtgccgtcggagagagagcgggagccgcggacagagacgcgtgcgcaattcggagccgactctgggtgcggactgtgggagctgactctgggtagccggctgcgcgtggctggggaggcgaggccggacgcacctctgtttgggggtcctcagagattaatgattcatcaagggatagttgtacttgtctcgtgggaatcacttcatcatgcgaaatctgaaattatttcggaccctggagttcagggatattcaaggtccagggaatcctcagtgcttctctctccgaactgaacaggggacggtgctcattggttcagaacatggcctgatagaagtagaccctgtctcaagagaagtgaaaaatgaagtttctttggtggcagaaggctttctcccagaggatggaagtggccgcattgttggtgttcaggacttgctggatcaggagtctgtgtgtgtggccacagcctctggagacgtcatactctgcagtctcagcacacaacagctggagtgtgttgggagtgtagccagtggtatctctgttatgagttggagtcctgaccaagagctggtgcttcttgccacaggtcaacagaccctgattatgatgacaaaagattttgagccaatcctggagcagcagatccatcaggatgattttggtgaaagcaagtttatcactgttggatggggtaggaaggagacacagttccatggatcagaaggcagacaagcagcttttcagatgcaaatgcatgagtctgctttgccctgggatgaccatagaccacaagttacctggcggggggatggacagttttttgctgtgagtgttgtttgcccagaaacaggggctcggaaggtcagagtgtggaaccgagagtttgctttgcagtcaaccagtgagcctgtggcaggactgggaccagccctggcttggaaaccctcaggcagtttgattgcatctacacaagataaacccaaccagcaggatattgtgttttttgagaaaaatggactccttcatggacactttacacttcccttccttaaagatgaggttaaggtaaatgacttgctctggaatgcagattcctctgtgcttgcagtctggctggaagaccttcagagagaagaaagctccattccgaaaacctgtgttcagctctggactgttggaaactatcactggtatctcaagcaaagtttatccttcagcacctgtgggaagagcaagattgtgtctctgatgtgggaccctgtgaccccataccggctgcatgttctctgtcagggctggcattacctcgcctatgattggcactggacgactgaccggagcgtgggagataattcaagtgacttgtccaatgtggctgtcattgatggaaacagggtgttggtgacagtcttccggcagactgtggttccgcctcccatgtgcacctaccaactgctgttcccacaccctgtgaatcaagtcacattcttagcacaccctcaaaagagtaatgaccttgctgttctagatgccagtaaccagatttctgtttataaatgtggtgattgtccaagtgctgaccctacagtgaaactgggagctgtgggtggaagtggatttaaagtttgccttagaactcctcatttggaaaagagatacaaaatccagtttgagaataatgaagatcaagatgtaaacccgctgaaactaggccttctcacttggattgaagaagacgtcttcctggctgtaagccacagtgagttcagcccccggtctgtcattcaccatttgactgcagcttcttctgagatggatgaagagcatggacagctcaatgtcagttcatctgcagcggtggatggggtcataatcagtctatgttgcaattccaagaccaagtcagtagtattacagctggctgatggccagatatttaagtacctttgggagtcaccttctctggctattaaaccatggaagaactctggtggatttcctgttcggtttccttatccatgcacccagaccgaattggccatgattggagaagaggaatgtgtccttggtctgactgacaggtgtcgctttttcatcaatgacattgaggttgcgtcaaatatcacgtcatttgcagtatatgatgagtttttattgttgacaacccattcccatacctgccagtgtttttgcctgagggatgcttcatttaaaacattacaggccggcctgagcagcaatcatgtgtcccatggggaagttctgcggaaagtggagaggggttcacggattgtcactgttgtgccccaggacacaaagcttgtattacagatgccaaggggaaacttagaagttgttcatcatcgagccctggttttagctcagattcggaagtggttggacaaacttatgtttaaagaggcatttgaatgcatgagaaagctgagaatcaatctcaatctgatttatgatcataaccctaaggtgtttcttggaaatgtggaaaccttcattaaacagatagattctgtgaatcatattaacttgttttttacagaattgaaagaagaagatgtcacgaagaccatgtaccctgcaccagttaccagcagtgtctacctgtccagggatcctgacgggaataaaatagaccttgtctgcgatgctatgagagcagtcatggagagcataaatcctcataaatactgcctatccatacttacatctcatgtaaagaagacaaccccagaactggaaattgtactgcaaaaagtacacgagcttcaaggaaatgctccctctgatcctgatgctgtgagtgctgaagaggccttgaaatatttgctgcatctggtagatgttaatgaattatatgatcattctcttggcacctatgactttgatttggtcctcatggtagctgagaagtcacagaaggatcccaaagaatatcttccatttcttaatacacttaagaaaatggaaactaattatcagcggtttactatagacaaatacttgaaacgatatgaaaaagccattggccacctcagcaaatgtggacctgagtacttcccagaatgcttaaacttgataaaagataaaaacttgtataacgaagctctgaagttatattcaccaagctcacaacagtaccaggatatcagcattgcttatggggagcacctgatgcaggagcacatgtatgagccagcggggctcatgtttgcccgttgcggtgcccacgagaaagctctctcagcctttctgacatgtggcaactggaagcaagccctctgtgtggcagcccagcttaactttaccaaagaccagctggtgggcctcggcagaactctggcaggaaagctggttgagcagaggaagcacattgatgcggccatggttttggaagagtgtgcccaggattatgaagaagctgtgctcttgctgttagaaggagctgcctgggaagaagctttgaggctggtatacaaatataacagactggatattatagaaaccaacgtaaagccttccattttagaagcccagaaaaattatatggcatttctggactctcagacagccacattcagtcgccacaagaaacgtttattggtagttcgagagctcaaggagcaagcccagcaggcaggtctggatgatgaggtaccccacgggcaagagtcagacctcttctctgaaactagcagtgtcgtgagtggcagtgagatgagtggcaaatactcccatagtaactccaggatatcagcgagatcatccaagaatcgccgaaaagcggagcggaagaagcacagcctcaaagaaggcagtccgctggaggacctggccctcctggaggcactgagtgaagtggtgcagaacactgaaaacctgaaagatgaagtataccatattttaaaggtactctttctctttgagtttgatgaacaaggaagggaattacagaaggcctttgaagatacgctgcagttgatggaaaggtcacttccagaaatttggactcttacttaccagcagaattcagctaccccggttctaggtcccaattctactgcaaatagtatcatggcatcttatcagcaacagaagacttcggttcctgttcttgatgctgagctttttataccaccaaagatcaacagaagaacccagtggaagctgagcctgctagactgagtgactgcagttaggagggatccgacagagaagaccatttccactcattcctgttgtcctaccaccccttgctctttgagggctggctattgagaactggaaagagtaaaatgataacttaccttagcattgccaagaacttcagcagacaacaagcaattctatttattttatgttgtgtatacatcttgatcattagcaagacattaagctttaaccattatggcaccattttgtgagaatgattgttctttcacttgggctgtttgagagcataattatggtaatcatgagattaatgtttcatgatttctacctccaaagtgtgaagacaagtaaaacaatgtttctaaattgtcttattttgttggcggagaagattacaatggctattagtgctacatttggtcaaatgtaatcacttaaatagcttcttgtcaccttaaactaaagcagaataaaaagtatcctttgaaattataagccctcctttgctgacagctattattttgtaacatcttaccaggtcatgtgctttcagttataactgggctgagcctcctataattacaatgtctatagggactgttttactgcctgtgtattttctgctagagagttagcaatgttagagctagaacagattagaatttctaaacagtatcatgcacagttggtgtgagtgatcagtgtgcattgtatggcatgcatggttgtgaattattctctgttctccaaatactgtttctttaactcagatatttttgttagtgtctaggccacttcatttatttttcgtcatggtactttactgacttctctttattcaattctccacgccctcaccaaaaaaaactgtctcaaaatgagaatattttattttcatggtgagtctagaaaacgcccacttcattctgattaaaaattcttccatgttttaaatatcagaaccagacctttcttactgtgtatcttagcccatttgtgtctctataacaacaaccagctttcaaaggaactaatagagtgaaaactcactcattaccacgaggatggcacaagcgattcacgtaggatctgcccctgtgaccaaaacacctcccattgggccccacttccaacactggtgatcacatttcaacatgaggtttagggaaacaaatgcctaaactacagcactgtacataaactaacaggaaatgctgcttttgatcctcaaagaagtgatatagccaaaattgtaatttaagaagcctttcccagtatagcaagatgttaactatagaatcaatctaggagtattcactgtaaaattcaacttttctgtatgtttgaacattttcacaatctcataggagtttttaaaaagaagagaaagaagatatactttgctttggagaaatctactttttgacttacatgggtttgctgtaattaagtgcccaatattgaaaggctgcaagtactttgtaatcactctttggcatgggtaaataagcatggtaacttatattgaaatatagtgctcttgctttggataactgtaaagggacccatgctgatagactggaaatagaagtaaatgtgtttattgataa

SEQ ID NO: 139720 - DNA, 3999 bp, Artificial Sequence
  derived and/or modified sequence
atgaggaacctgaagctgttccgcaccctggagttccgggacatccagggccctggcaacccccagtgcttcagcctgaggacagagcagggcaccgtgctgattggcagcgagcacggcctcatcgaggtggaccctgtgtcccgggaggtgaagaatgaggtgtccctggtggccgagggcttcctgcctgaagatggcagcggcagaattgtgggcgtgcaggacctgctggaccaggagagcgtgtgtgtggccacagccagcggagatgtgatcctgtgcagcctgagcacccagcagctggagtgtgtgggctctgtggccagcggcatctctgtgatgtcctggagcccagaccaggagctggtgctgctggccaccggccagcagaccctcatcatgatgaccaaggactttgagcccatcctggagcagcagatccaccaggatgactttggagagagcaagttcatcaccgtgggctggggcaggaaggagacccagttccacggcagcgagggccggcaggccgccttccagatgcagatgcatgaaagtgccctgccctgggatgaccaccggccccaggtgacctggagaggagatggccagttctttgctgtgtctgtggtgtgcccagagaccggggccaggaaggtgcgggtgtggaaccgggagtttgccctgcagagcaccagcgagcctgtggccggcctgggccctgccctggcctggaagcccagcggcagcctgattgccagcacccaggacaagcccaaccagcaggacatcgtgttctttgagaagaatggcctgctgcacggccacttcaccctgcccttcctgaaggatgaggtgaaggtgaatgacctgctgtggaatgctgacagctctgtgctggccgtgtggctggaggacctgcagcgggaggagagcagcatccccaagacctgtgtgcagctgtggacagtgggcaactaccactggtacctgaagcagagcctgtccttcagcacctgtgggaagagcaagatcgtgtccctgatgtgggaccctgtgaccccctaccgcctgcacgtgctgtgccagggctggcactacctggcctatgactggcactggaccacagacagatctgtgggggacaacagcagtgacctgagcaatgtggccgtgattgatggcaacagagtgctggtgaccgtcttccggcagacagtggtgcccccacccatgtgcacctaccagctgctcttcccccaccctgtgaaccaggtgaccttcctggcccacccccagaagagcaatgacctggccgtgctggatgccagcaaccagatctctgtgtacaagtgtggggactgccccagcgctgaccccaccgtgaagctgggcgctgtgggcggcagcggcttcaaggtgtgcctgcggaccccccacctggagaagcgctacaagatccagtttgaaaataatgaagaccaggatgtgaaccccctgaagctgggcctgctgacctggattgaagaagatgtgttcctggccgtgagccacagcgagttcagccccaggagcgtcatccaccacctgacagctgccagcagcgagatggatgaggagcacggccagctgaatgtgagcagcagcgctgctgtggatggagtcatcatcagcctgtgctgcaacagcaagaccaagtctgtggtgctgcagctggctgatggccagatcttcaagtacctgtgggagagccccagcctggccatcaagccctggaagaacagcggcggcttccctgtgcgcttcccctacccctgcacccagacagagctggccatgattggagaggaggagtgtgtgctgggcctgacagaccgctgccgcttcttcatcaatgacatcgaggtggccagcaacatcaccagctttgctgtgtatgatgagttcctgctgctgaccacccacagccacacctgccagtgcttctgcctgagagatgccagcttcaagaccctgcaggccggcctgagcagcaaccacgtgagccacggggaggtgctgaggaaggtggagcggggcagcagaattgtgacagtggtgccccaggacaccaagctggtgctgcagatgccccggggcaacctggaggtggtgcaccaccgggccctggtgctggcccagatcaggaagtggctggacaagctgatgttcaaggaggcctttgagtgcatgaggaagctgcgcatcaacctgaacctgatctatgaccacaaccccaaggtgttcctgggcaatgtggagaccttcatcaagcagattgacagcgtgaaccacatcaacctcttcttcacagagctgaaggaggaggatgtgaccaagaccatgtacccagcccctgtgaccagctctgtgtacctgagccgggaccctgatggcaacaagattgacctggtgtgtgatgccatgagagctgtgatggagagcatcaacccccacaagtactgcctgagcatcctgaccagccacgtgaagaagaccaccccagagctggagatcgtgctgcagaaggtgcatgagctgcagggcaatgcccccagcgaccctgatgctgtgtctgctgaggaggccctgaagtacctgctgcacctggtggatgtgaatgagctgtatgaccacagcctgggcacctatgactttgacctggtgctgatggtggccgagaagagccagaaggaccccaaggagtacctgcccttcctgaacaccctgaagaagatggagaccaactaccagcgcttcaccatcgacaagtacctgaagagatatgagaaggccatcggccacctgagcaaatgtggccctgagtacttccctgagtgcctgaacctgatcaaggacaagaacctgtacaatgaggccctgaagctgtacagccccagcagccagcagtaccaggacatcagcatcgcctacggggagcacctgatgcaggagcacatgtatgagcctgctggcctgatgtttgcccgctgtggggcccacgagaaggccctgagcgccttcctgacctgtggcaactggaagcaggccctgtgtgtggccgcccagctgaacttcaccaaggaccagctggtgggcctgggccgcaccctggccggcaagctggtggagcagaggaagcacattgatgctgccatggtgctggaggagtgtgcccaggactatgaggaggccgtgctgctgctgctggagggcgccgcctgggaggaggccctgcggctggtgtacaagtacaaccggctggacatcatcgagaccaacgtgaagcccagcatcctggaggcccagaagaactacatggccttcctggacagccagacagccaccttcagccgccacaagaagaggctgctggtggtgcgggagctgaaggagcaggcccagcaggccggcctggatgatgaggtgccccacggccaggagagtgacctcttcagcgagaccagctctgtggtgtctggcagcgagatgtctgggaagtacagccacagcaacagccgcatcagcgcccggagcagcaagaacagaaggaaggccgagaggaagaagcacagcctgaaggagggcagccccctggaggacctggccctgctggaggccctgtctgaggtggtgcagaacacagagaacctgaaggatgaggtgtaccacatcctgaaggtgctcttcctgtttgaatttgatgagcagggccgggagctgcagaaggcctttgaggacaccctgcagctgatggagaggagcctgcctgagatctggaccctgacctaccagcagaacagcgccacccctgtgctgggccccaacagcacagccaacagcatcatggccagctaccagcagcagaagacctctgtgcctgtgctggatgctgagctgttcatcccccccaagatcaacagaaggacccagtggaagctgagcctgctggactag

SEQ ID NO: 139721 - DNA, 3999 bp, Artificial Sequence
  derived and/or modified sequence
atgcggaacctgaagctgttccggaccctggagttccgggacatccagggcccgggaaatccccagtgtttcagcctccgaacggagcaggggaccgtgctgatcggctcagaacatggactgatcgaagtggatccagtgtcccgcgaagttaagaacgaggtgtcactggtagccgagggctttctgccagaggatggcagcggccgaatcgtcggggttcaggacctcctggaccaggagagtgtgtgcgttgccaccgcctcgggagacgttatcctctgtagcttgagcacccagcagttggaatgtgtgggttctgtcgcatccggaattagcgtcatgtcttggagcccggaccaggagctcgtcctgcttgcaactgggcagcagaccctgatcatgatgacaaaagactttgaacctattctggagcaacaaattcatcaggacgatttcggtgagtccaagtttataaccgtcgggtggggaagaaaagaaacccagttccatggatcggaggggagacaagccgcgttccaaatgcagatgcatgagagcgcacttccgtgggacgatcacagacctcaggtgacttggcgtggtgatggccagttttttgccgtgtctgtcgtttgccccgagacaggtgcccggaaggttagggtctggaatagggagtttgccttgcagtcaaccagcgagccagttgccggcctcggaccagccctggcctggaagcccagcggctctcttatagcaagcactcaggacaaaccaaaccaacaagacatcgtgttttttgaaaagaatggtctcttgcacgggcactttacactaccatttcttaaagacgaggtgaaagtgaacgatctgctgtggaatgctgactcaagcgttctggcagtgtggctggaagatctacagagagaagagtctagcatcccgaaaacttgcgtgcagctgtggaccgtaggtaactaccactggtacctgaaacagtcgctgagcttctctacctgtgggaagtctaaaattgttagtttgatgtgggaccctgtcacaccctatcggttacacgtcctctgccagggatggcactaccttgcttacgattggcactggactaccgatcggtcagttggggacaacagtagtgacctgtctaatgtcgcagtgattgacggcaatcgtgttctggtgaccgtgttcaggcagactgtggtccctcccccgatgtgcacgtaccagctgctcttccctcacccagttaatcaggtcacttttctcgcgcatccccagaaatctaacgatcttgcagtgctggacgcaagtaatcaaatttccgtgtataagtgtggcgattgtccttccgctgaccccacggtcaagctgggagcagtgggaggcagcggctttaaggtgtgtctgcgcaccccacatctggagaagaggtataagattcagttcgagaataatgaggatcaagatgtgaacccgctcaagctgggtttattaacttggatcgaggaggatgtcttcctggccgtatctcacagcgaattctcgcccagatctgtgatccaccatctgaccgccgcctcttccgaaatggacgaagaacacggtcagctaaacgtctcatcatctgcggcagtggacggtgtgattatcagcctgtgctgcaactcgaaaacaaaaagcgtggtcctgcagttggccgatgggcaaatctttaagtatctgtgggagtcacccagcttagccattaagccctggaaaaattccggtggtttccctgtacgattcccctacccatgcactcagacagaactcgctatgattggggaggaggagtgtgttcttggcctgaccgacaggtgcagatttttcattaatgatattgaggtggctagcaacattaccagctttgcagtgtacgatgaattcctcctgctaaccactcacagccatacctgccagtgcttctgtttgagggacgcctctttcaagacactgcaggccggccttagctctaaccacgtgtcacacggcgaggtgctcagaaaggtcgagcgagggagtcgcattgtcacggtggtcccccaggacacgaagctggtgttacagatgccacgcggtaatctagaagtagtacaccatcgggcgctagtgctcgcccagatcaggaagtggctcgacaagttaatgtttaaggaggcttttgagtgtatgcggaagctgagaattaatctaaatctgatttacgaccacaaccccaaagtctttctcgggaatgtagaaacattcatcaagcagatcgactccgttaaccatatcaaccttttcttcaccgaactcaaggaagaggacgtcacaaagacaatgtatcccgcgccggtcactagctccgtctatctttcaagggatccggacgggaacaagattgatctggtctgcgatgcaatgagggctgtgatggaaagtattaaccctcataagtactgtctctctatcctgactagtcatgtaaagaagaccacacctgaactcgaaatcgtgctccaaaaagtgcacgagctgcaggggaacgcgccttctgaccccgatgccgtatctgctgaagaggcactgaagtacctgttgcacctcgttgatgttaatgagttatacgatcactcattgggcacctatgactttgacttggtcttgatggtcgccgagaaatctcaaaaggacccaaaggagtatctgccgtttttaaacaccttgaaaaaaatggagaccaactatcagcggttcaccattgataaatatctaaagcggtatgaaaaagctatcggtcacctgtctaaatgtgggcccgaatattttcccgaatgcctgaacctgataaaagataagaatctctacaacgaagcgttaaaactgtacagtcctagcagtcagcagtaccaggatatcagcatcgcctacggtgaacacctgatgcaagaacacatgtatgaaccagctggcctgatgttcgcccgatgcggggcccacgagaaagcattaagcgcatttctgacatgcggcaattggaaacaggctctctgcgttgccgcccagttgaatttcaccaaggatcagctggtcggcttgggaagaactctggccgggaaactggtcgaacaacggaaacacattgacgccgccatggtgttggaggagtgcgcccaagactacgaagaagccgtgcttctgctgttggagggcgcagcttgggaggaggcactgagactcgtctacaaatacaaccgactggacatcatcgagactaatgtcaagccaagtattctagaggcacaaaagaattacatggcttttctcgatagccagacagccactttcagccggcacaaaaaacgcctgctggtggtgcgtgaactgaaagagcaggcacagcaggcaggcctggacgacgaggtaccgcacggacaggagtcagacctgttcagcgagacatcaagtgttgtatctggaagcgagatgtctggcaagtatagtcatagtaacagcaggatttccgctaggtcaagcaaaaatagacgcaaagcagagagaaagaagcacagcctaaaagaaggcagtccactagaagatctggccctgctggaggcactctccgaggtcgtgcagaacaccgaaaaccttaaggacgaggtctaccacattcttaaagtgctatttttgttcgaattcgatgaacaggggcgggaattacagaaggccttcgaagacaccttgcagcttatggagcggagcctgcccgaaatttggactcttacatatcaacagaacagcgccacccccgtactgggccctaattccactgccaatagcatcatggctagctatcagcaacagaagacttccgtgccggttctggacgctgagttgttcatcccgccaaagatcaatcgtagaactcagtggaagctctccctgctggactag

SEQ ID NO: 139722 - DNA, 3999 bp, Artificial Sequence
  derived and/or modified sequence
atgcggaacctaaaactgttccgtaccctggaattccgggatatacaaggtccaggcaaccctcagtgtttcagcctccgcactgagcagggcactgtgctgattggcagcgagcacggtttgatcgaggtggaccccgtatcaagggaggtgaagaatgaggttagcctggtagctgaagggtttctgcccgaagatggctcaggcagaatcgtcggggtgcaggatctgctagaccaagaaagtgtttgtgttgccacagcttctggggatgttatcctgtgtagtctgagcactcagcagctggagtgtgtagggagcgtggcaagtgggatttctgttatgtcctggagcccggatcaggagctggtgctgctcgctaccggccagcagacattgattatgatgacaaaagacttcgagcccatcctcgagcagcaaattcaccaagacgatttcggcgagtctaagttcatcacggttggatgggggcgtaaggagacccaattccatggaagtgaggggagacaggcggctttccagatgcagatgcatgaatcagccctcccttgggatgaccacagaccgcaagtgacctggaggggggatggacagtttttcgctgtgtctgtcgtgtgcccagagaccggcgcaaggaaggtacgcgtttggaatcgagagtttgcactccagagcacatctgaaccggttgctggactgggacctgctctcgcgtggaagccaagcgggtccctgattgcctctacacaggacaaacctaaccaacaggacatcgtgtttttcgaaaagaacggtctgctccacggccatttcaccctcccgttcctgaaggatgaggtgaaggtgaacgacctgctgtggaatgctgattctagcgtgttggccgtctggttggaggatctgcagagagaggagagcagcattcccaagacatgcgtgcagctgtggacagttggcaattatcactggtacctgaaacagtctctgtcctttagcacctgtggcaagagtaaaatagtatcactgatgtgggaccctgtgacaccatatcgcttacatgtcctttgccagggatggcactatcttgcctatgattggcattggactacagaccggtctgtgggagacaatagttctgacttgtcaaacgtggccgtcattgacgggaatagagtcctggttacagttttccggcagacagtcgtgccaccccctatgtgcacttatcaactgttgttcccacatccggtgaatcaggtaactttcttggctcatccccaaaaaagtaatgatctggcagtcctcgatgccagcaaccagattagtgtgtataagtgcggcgattgtccgagcgctgatccaactgttaaactgggtgctgtcggaggcagtgggttcaaagtctgtctgcggacgccgcaccttgaaaaaaggtacaaaatacaatttgagaacaacgaggaccaggacgtcaaccctcttaagcttggcctacttacttggattgaagaggatgtgttcttggcagtgtctcattccgaattttcccccaggtctgtgattcaccacctgaccgcagcctccagtgagatggacgaagaacacgggcagttaaacgtctcttcctcggctgccgtggacggcgtaataatctcactgtgttgtaatagcaaaactaagtccgtggtcctgcagttggccgacggacagatcttcaaatacttgtgggagtctccgtctctggctatcaagccctggaagaactctggcggattccctgttagatttccttatccgtgcacacagaccgagctggcaatgatcggtgaagaggaatgtgtcctgggcctgactgataggtgtagattctttattaacgacatcgaggtcgctagcaatattactagcttcgccgtgtacgatgagttcttgctgctgaccacgcacagccacacctgtcagtgtttttgccttcgggatgcatcttttaaaaccctgcaggccggactcagcagcaaccatgtgagccacggtgaggtcttgcggaaagtggaacgtggctcccgcattgtgacggtggtgcctcaggatacaaaacttgtacttcagatgccccgaggtaatctcgaagttgttcatcatcgggctctagtcttagcacagatcaggaaatggctagataaactgatgtttaaggaggcattcgagtgcatgaggaagctgcggatcaatctgaatcttatctacgaccacaatcctaaggtgttcctgggaaatgtggagacttttattaaacaaatcgactcagttaaccatattaacctattctttactgagttaaaggaggaggatgtgaccaagaccatgtaccctgccccagtgacaagctctgtttacttaagtcgggatcctgatggaaacaaaatcgatctggtgtgtgatgccatgagagccgtaatggaatctattaatccacataagtactgtctgtcgatcttaacaagtcacgttaagaagaccactcccgagttggagatagtgctgcagaaggtacacgaacttcagggcaacgctccgtcggaccctgacgcggtctctgccgaggaggctctcaaatatctgctgcacctggtggacgtgaacgagctgtatgatcacagcctaggcacctacgactttgatctggtgttgatggtggccgagaagagtcagaaggatcccaaagaatacctgccattccttaacactctgaagaaaatggagaccaactaccagaggtttaccatcgacaagtatctcaagagatatgaaaaagcaattggccacctttccaaatgtggacctgagtactttcctgagtgcctgaaccttatcaaagataagaacctgtacaacgaagcgttgaaactctacagtccctcgtctcaacagtatcaggacatatcaatcgcatacggcgagcatttaatgcaagagcacatgtacgagcctgcaggtctgatgtttgccaggtgtggagcacacgaaaaagctctgtcagcttttctcacatgtggaaactggaagcaggcactctgcgtggcggctcaactgaacttcaccaaggaccaattggttgggcttggtaggaccctggctggcaaactggtcgaacagcgaaagcacatcgacgctgcgatggtgctcgaagaatgcgctcaagattacgaagaggccgtgctccttttgcttgagggcgctgcttgggaagaagcgctgcgactggtgtacaaatacaaccgtctggatatcatcgaaacgaacgtgaagccctccattcttgaggctcagaaaaactatatggccttcttggattcccagaccgctacattcagcagacacaagaagcggctgctggtagtgcgcgagctgaaagaacaagcgcagcaagctggtctggatgacgaggtgccacatggccaggagtccgatctgttcagcgagacctctagtgttgtctcaggctccgaaatgagcggtaagtactcacactctaacagtagaatctctgcgaggtccagcaaaaaccggcgtaaggcagagaggaagaaacattcccttaaggagggatccccactggaggatttagccctgttagaagcgctgtcagaggtggtgcagaatacagaaaatcttaaagacgaggtctaccacattttgaaggtgctgtttctcttcgagtttgacgagcagggtagggaactgcagaaggcttttgaggacaccctgcagctgatggaacggtctctacctgagatctggactctcacataccagcagaatagcgccactcccgttctggggcctaatagcacagccaactcaattatggcaagttatcagcagcagaagacatctgtgcccgtgctcgacgctgagttgttcattccacccaaaatcaacaggagaacacagtggaaactgtcactactcgattag

SEQ ID NO: 139723 - DNA, 3999 bp, Artificial Sequence
  derived and/or modified sequence
atgagaaacctgaagctgttcagaaccctggagttcagagacatccagggccccggcaacccccagtgcttcagcctgagaaccgagcagggcaccgtgctgatcggcagcgagcacggcctgatcgaggtggaccccgtgagcagagaggtgaagaacgaggtgagcctggtggccgagggcttcctgcccgaggacggcagcggcagaatcgtgggcgtgcaggacctgctggaccaggagagcgtgtgcgtggccaccgccagcggcgacgtgatcctgtgcagcctgagcacccagcagctggagtgcgtgggcagcgtggccagcggcatcagcgtgatgagctggagccccgaccaggagctggtgctgctggccaccggccagcagaccctgatcatgatgaccaaggacttcgagcccatcctggagcagcagatccaccaggacgacttcggcgagagcaagttcatcaccgtgggctggggcagaaaggagacccagttccacggcagcgagggcagacaggccgccttccagatgcagatgcacgagagcgccctgccctgggacgaccacagaccccaggtgacctggagaggcgacggccagttcttcgccgtgagcgtggtgtgccccgagaccggcgccagaaaggtgagagtgtggaacagagagttcgccctgcagagcaccagcgagcccgtggccggcctgggccccgccctggcctggaagcccagcggcagcctgatcgccagcacccaggacaagcccaaccagcaggacatcgtgttcttcgagaagaacggcctgctgcacggccacttcaccctgcccttcctgaaggacgaggtgaaggtgaacgacctgctgtggaacgccgacagcagcgtgctggccgtgtggctggaggacctgcagagagaggagagcagcatccccaagacctgcgtgcagctgtggaccgtgggcaactaccactggtacctgaagcagagcctgagcttcagcacctgcggcaagagcaagatcgtgagcctgatgtgggaccccgtgaccccctacagactgcacgtgctgtgccagggctggcactacctggcctacgactggcactggaccaccgacagaagcgtgggcgacaacagcagcgacctgagcaacgtggccgtgatcgacggcaacagagtgctggtgaccgtgttcagacagaccgtggtgcccccccccatgtgcacctaccagctgctgttcccccaccccgtgaaccaggtgaccttcctggcccacccccagaagagcaacgacctggccgtgctggacgccagcaaccagatcagcgtgtacaagtgcggcgactgccccagcgccgaccccaccgtgaagctgggcgccgtgggcggcagcggcttcaaggtgtgcctgagaaccccccacctggagaagagatacaagatccagttcgagaacaacgaggaccaggacgtgaaccccctgaagctgggcctgctgacctggatcgaggaggacgtgttcctggccgtgagccacagcgagttcagccccagaagcgtgatccaccacctgaccgccgccagcagcgagatggacgaggagcacggccagctgaacgtgagcagcagcgccgccgtggacggcgtgatcatcagcctgtgctgcaacagcaagaccaagagcgtggtgctgcagctggccgacggccagatcttcaagtacctgtgggagagccccagcctggccatcaagccctggaagaacagcggcggcttccccgtgagattcccctacccctgcacccagaccgagctggccatgatcggcgaggaggagtgcgtgctgggcctgaccgacagatgcagattcttcatcaacgacatcgaggtggccagcaacatcaccagcttcgccgtgtacgacgagttcctgctgctgaccacccacagccacacctgccagtgcttctgcctgagagacgccagcttcaagaccctgcaggccggcctgagcagcaaccacgtgagccacggcgaggtgctgagaaaggtggagagaggcagcagaatcgtgaccgtggtgccccaggacaccaagctggtgctgcagatgcccagaggcaacctggaggtggtgcaccacagagccctggtgctggcccagatcagaaagtggctggacaagctgatgttcaaggaggccttcgagtgcatgagaaagctgagaatcaacctgaacctgatctacgaccacaaccccaaggtgttcctgggcaacgtggagaccttcatcaagcagatcgacagcgtgaaccacatcaacctgttcttcaccgagctgaaggaggaggacgtgaccaagaccatgtaccccgcccccgtgaccagcagcgtgtacctgagcagagaccccgacggcaacaagatcgacctggtgtgcgacgccatgagagccgtgatggagagcatcaacccccacaagtactgcctgagcatcctgaccagccacgtgaagaagaccacccccgagctggagatcgtgctgcagaaggtgcacgagctgcagggcaacgcccccagcgaccccgacgccgtgagcgccgaggaggccctgaagtacctgctgcacctggtggacgtgaacgagctgtacgaccacagcctgggcacctacgacttcgacctggtgctgatggtggccgagaagagccagaaggaccccaaggagtacctgcccttcctgaacaccctgaagaagatggagaccaactaccagagattcaccatcgacaagtacctgaagagatacgagaaggccatcggccacctgagcaagtgcggccccgagtacttccccgagtgcctgaacctgatcaaggacaagaacctgtacaacgaggccctgaagctgtacagccccagcagccagcagtaccaggacatcagcatcgcctacggcgagcacctgatgcaggagcacatgtacgagcccgccggcctgatgttcgccagatgcggcgcccacgagaaggccctgagcgccttcctgacctgcggcaactggaagcaggccctgtgcgtggccgcccagctgaacttcaccaaggaccagctggtgggcctgggcagaaccctggccggcaagctggtggagcagagaaagcacatcgacgccgccatggtgctggaggagtgcgcccaggactacgaggaggccgtgctgctgctgctggagggcgccgcctgggaggaggccctgagactggtgtacaagtacaacagactggacatcatcgagaccaacgtgaagcccagcatcctggaggcccagaagaactacatggccttcctggacagccagaccgccaccttcagcagacacaagaagagactgctggtggtgagagagctgaaggagcaggcccagcaggccggcctggacgacgaggtgccccacggccaggagagcgacctgttcagcgagaccagcagcgtggtgagcggcagcgagatgagcggcaagtacagccacagcaacagcagaatcagcgccagaagcagcaagaacagaagaaaggccgagagaaagaagcacagcctgaaggagggcagccccctggaggacctggccctgctggaggccctgagcgaggtggtgcagaacaccgagaacctgaaggacgaggtgtaccacatcctgaaggtgctgttcctgttcgagttcgacgagcagggcagagagctgcagaaggccttcgaggacaccctgcagctgatggagagaagcctgcccgagatctggaccctgacctaccagcagaacagcgccacccccgtgctgggccccaacagcaccgccaacagcatcatggccagctaccagcagcagaagaccagcgtgcccgtgctggacgccgagctgttcatcccccccaagatcaacagaagaacccagtggaagctgagcctgctggactag

SEQ ID NO: 139724 - protein, 125 aa, Artificial Sequence
  derived and/or modified sequence
MHKEEHEVAVLGPPPSTILPRSTVINIHSETSVPDHVVWSLFNTLFLNWCCLGFIAFAYSVKSRDRKMVGDVTGAQAYASTAKCLNIWALILGILMTIGFILLLVFGSVTVYHIMLQIIQEKRGY

SEQ ID NO: 139725 - protein, 99 aa, Artificial Sequence
  derived and/or modified sequence
PQSQKMHKEEHEVAVLGPPPSTILPRSTVINIHSETSVPDHVVVPVQHPLLECCLGFIAFAYSVKSRDRKMVGDVTGAQALHRQVPEHLGPDSGHPHDH

SEQ ID NO: 139726 - DNA, 378 bp, Artificial Sequence
  derived and/or modified sequence
atgcacaaagaagaacacgaggtagcagtcttaggccccccccccagtaccatcctgccccgaagcactgtgatcaacatacactccgagactagcgtgcctgaccacgtcgtttggtcactttttaacactctatttctgaactggtgttgcctggggttcattgcatttgcttacagcgtgaagtcgcgcgaccggaaaatggtcggagacgttacgggagcccaggcctacgcttccaccgcaaagtgtctcaacatatgggctctcattctgggtatcttaatgacaatcggattcattttgctgctggtcttcggttctgtgacagtgtatcacattatgctgcaaatcatccaagagaaacgcggttactag

SEQ ID NO: 139727 - DNA, 378 bp, Artificial Sequence
  derived and/or modified sequence
atgcataaggaagagcatgaagtcgcagtgcttggacctccaccttcgactattctcccccgctcaaccgtgatcaacattcactctgaaactagcgtcccagatcacgtggtgtggagtctgtttaatactctttttctgaattggtgctgcctaggttttatcgccttcgcatactccgtgaaaagcagagaccgcaagatggtaggcgacgtgactggcgcgcaggcatacgcaagcactgccaagtgtttaaacatatgggccctgatcctggggatactcatgactattggattcatactgctgctcgtgttcggttccgtgacagtttatcatattatgctgcagattattcaagagaagagagggtactag

SEQ ID NO: 139728 - DNA, 300 bp, Artificial Sequence
  derived and/or modified sequence
ccccagtctcagaaaatgcacaaggaagagcacgaagtcgcggttctgggcccacctccttctacaatactgcctcggagcacggtgatcaatatccactccgaaacctctgtcccggaccatgttgtagtgccagttcaacaccctcttctcgaatgctgcctcggatttatcgcctttgcctactccgtcaagtctcgggacagaaagatggtcggtgacgtcacaggggcccaggccctccatcgccaggtgccggagcacttagggccagactctggccatccccatgaccactag

SEQ ID NO: 139729 - DNA, 378 bp, Artificial Sequence
  derived and/or modified sequence
atgcacaaagaagagcacgaagtggcagtactcgggccgccaccctctactattctcccacgatctacggtgattaatattcattccgagaccagcgtgcccgaccacgtggtgtggtcactgttcaacacgcttttcctgaactggtgctgtctaggcttcatagcatttgcatactctgtgaaatctcgagaccgaaaaatggtgggtgatgtgacaggagctcaggcttatgcttccactgccaagtgtctgaacatatgggcacttattctcggcattctgatgacgattggatttatattacttctagtatttggatccgtgaccgtttatcacatcatgctacagatcatccaagagaagcggggatattag

SEQ ID NO: 139730 - DNA, 844 bp, Artificial Sequence
  derived and/or modified sequence
cgttcctgggcctggagggctgctttggggcaggaaactttggccaccaggcctctgacctgcaccaggagacactgggaggtttagtccccaaacccgcacagagcaggactgcagcctgaggaaagagcaaggatttcaggagagaggcctgcgacaagtgagcaggaaatagaaacttaagagaaatacacacttctgagaaactgaaacgacaggggaaaggaggtctcactgagcaccgtcccagcatccggacaccacagcggcccttcgctccacgcagaaaaccacacttctcaaaccttcactcaacacttccttccccaaagccagaagatgcacaaggaggaacatgaggtggctgtgctggggccaccccccagcaccatccttccaaggtccaccgtgatcaacatccacagcgagacctccgtgcccgaccatgtcgtctggtccctgttcaacaccctcttcttgaactggtgctgtctgggcttcatagcattcgcctactccgtgaagtctagggacaggaagatggttggcgacgtgaccggggcccaggcctatgcctccaccgccaagtgcctgaacatctgggccctgattctgggcatcctcatgaccattggattcatcctgttactggtattcggctctgtgacagtctaccatattatgttacagataatacaggaaaaacggggttactagtagccgcccatagcctgcaacctttgcactccactgtgcaatgctggccctgcacgctggggctgttgcccctgcccccttggtcctgcccctagatacagcagtttatacccacacacctgtctac

SEQ ID NO: 139731 - DNA, 855 bp, Artificial Sequence
  derived and/or modified sequence
ctagtcctgacttgagtttctgatgaggaagcctctctccttagccttcagcctttcctcccaccctgccataaagtaatttgatcctcaagaagttaaaccacacctcattggtccctggctaattcaccaatttacaaacagcaggaaatagaaacttaagagaaatacacacttctgagaaactgaaacgacaggggaaaggaggtctcactgagcaccgtcccagcatccggacaccacagcggcccttcgctccacgcagaaaaccacacttctcaaaccttcactcaacacttccttccccaaagccagaagatgcacaaggaggaacatgaggtggctgtgctggggccaccccccagcaccatccttccaaggtccaccgtgatcaacatccacagcgagacctccgtgcccgaccatgtcgtctggtccctgttcaacaccctcttcttgaactggtgctgtctgggcttcatagcattcgcctactccgtgaagtctagggacaggaagatggttggcgacgtgaccggggcccaggcctatgcctccaccgccaagtgcctgaacatctgggccctgattctgggcatcctcatgaccattggattcatcctgttactggtattcggctctgtgacagtctaccatattatgttacagataatacaggaaaaacggggttactagtagccgcccatagcctgcaacctttgcactccactgtgcaatgctggccctgcacgctggggctgttgcccctgcccccttggtcctgcccctagatacagcagtttatacccacacacctgtctacagtgtcattcaataaagtgcacgtgcttgtga

SEQ ID NO: 139732 - DNA, 655 bp, Artificial Sequence
  derived and/or modified sequence
aaacgacaggggaaaggaggtctcactgagcaccgtcccagcatccggacaccacagcggcccttcgctccacgcagaaaaccacacttctcaaaccttcactcaacacttccttccccaaagccagaagatgcacaaggaggaacatgaggtggctgtgctggggccaccccccagcaccatccttccaaggtccaccgtgatcaacatccacagcgagacctccgtgcccgaccatgtcgtcgtccctgttcaacaccctcttcttgaatgctgtctgggcttcatagcattcgcctactccgtgaagtctagggacaggaagatggttggcgacgtgaccggggcccaggccctccaccgccaagtgcctgaacatctgggccctgattctgggcatcctcatgaccattggattcatcctgttactggtattcggctctgtgacagtctaccatattatgttacagataatacaggaaaaacggggttactagtagccgcccatagcctgcaacctttgcactccactgtgcaatgctggccctgcacgctggggctgttgcccctgcccccttggtcctgcccctagatacagcagtttatacccacacacctgtctacagtgtcattcaataaagtgcacgtgcttgtg

SEQ ID NO: 139733 - DNA, 730 bp, Artificial Sequence
  derived and/or modified sequence
gtcagttctccccagagtccccgttcctgggcctggagggctgctttggggcaggaaactttggccaccaggcctctgacctgcaccaggagacactgggaggtttagtccccaaacccgcacagagcaggactgcagcctgaggaaagagcaaggatttcaggagagaggcctgcgacaagtgagccagaagatgcacaaggaggaacatgaggtggctgtgctggggccaccccccagcaccatccttccaaggtccaccgtgatcaacatccacagcgagacctccgtgcccgaccatgtcgtctggtccctgttcaacaccctcttcttgaactggtgctgtctgggcttcatagcattcgcctactccgtgaagtctagggacaggaagatggttggcgacgtgaccggggcccaggcctatgcctccaccgccaagtgcctgaacatctgggccctgattctgggcatcctcatgaccattggattcatcctgttactggtattcggctctgtgacagtctaccatattatgttacagataatacaggaaaaacggggttactagtagccgcccatagcctgcaacctttgcactccactgtgcaatgctggccctgcacgctggggctgttgcccctgcccccttggtcctgcccctagatacagcagtttatacccacacacctgtctacagtgtcattcaataaagtgcacgtgcttgtga

SEQ ID NO: 139734 - DNA, 378 bp, Artificial Sequence
  derived and/or modified sequence
atgcacaaggaggagcacgaggtggccgtgctgggccccccacccagcaccatcctgcccaggagcaccgtcatcaacatccacagcgagacctctgtgcctgaccacgtggtgtggagcctcttcaacaccctcttcctgaactggtgctgcctgggcttcatcgcctttgcctacagcgtgaagagccgggacaggaagatggtgggagatgtgactggagcccaggcctatgccagcacagccaagtgcctgaacatctgggccctgatcctgggcatcctgatgaccatcggcttcatcctgctgctggtgtttggatctgtgacagtgtaccacatcatgctgcagatcatccaggagaagaggggctactag

SEQ ID NO: 139735 - DNA, 300 bp, Artificial Sequence
  derived and/or modified sequence
ccccagagccagaagatgcacaaggaggagcacgaggtggccgtgctgggccccccacccagcaccatcctgcccaggagcaccgtcatcaacatccacagcgagacctctgtgcctgaccacgtggtggtgcctgtgcagcaccccctgctggagtgctgcctgggcttcatcgcctttgcctacagcgtgaagagccgggacaggaagatggtgggagatgtgactggagcccaggccctgcaccggcaggtgcctgagcacctgggcccagattctggccacccccatgaccactag

SEQ ID NO: 139736 - DNA, 378 bp, Artificial Sequence
  derived and/or modified sequence
atgcacaaggaggagcacgaggtggccgtgctgggcccccccccctccacaattctccctagaagcactgtgattaacattcattccgagacctcagtgcctgaccacgtagtttggtccctttttaacactctgtttctcaattggtgctgtctaggctttattgccttcgcctattctgtcaagtcccgcgatcgcaaaatggtcggtgatgttacaggggctcaggcttacgcatctaccgcgaagtgcttgaatatatgggccctcatactcggaattttaatgaccataggctttatcctgctcctggtcttcggcagcgtgaccgtgtaccacatcatgctgcagattattcaagagaagcgtggctactag

SEQ ID NO: 139737 - DNA, 378 bp, Artificial Sequence
  derived and/or modified sequence
atgcacaaggaggagcacgaggtggccgtgctgggcccccccccctccaccatactcccgcggagcacagtgatcaacattcactcagaaacctcagtgcccgatcatgtagtgtggagcctattcaatactctgtttctgaattggtgttgccttggatttatagcgtttgcctacagcgttaaatctagagatcggaaaatggtgggtgacgttacgggcgctcaggcctatgcctcaaccgccaagtgcctgaacatctgggccctcatccttgggatcctgatgacaatcggatttattctgctacttgtgtttggttctgtgacagtgtatcatattatgctccagatcatccaagaaaagaggggctactag

SEQ ID NO: 139738 - DNA, 300 bp, Artificial Sequence
  derived and/or modified sequence
ccccagagccagaagatgcacaaggaggagcacgaggtggccgtgttggggcctcccccctcaaccattctccccagatcgaccgtgatcaacattcacagcgagacctctgttcccgaccacgttgttgttcccgtgcagcaccccctcttggaatgttgcttgggatttattgccttcgcctattccgttaaaagtagggatcggaaaatggtcggagatgttactggcgcacaggccctgcatcgtcaagtgcccgagcatttaggcccagatagcggccatcctcatgatcactag

SEQ ID NO: 139739 - DNA, 378 bp, Artificial Sequence
  derived and/or modified sequence
atgcacaaggaggagcacgaggtggccgtgctgggcccccccccctccacgatcttaccaaggtcgacggtgatcaacattcatagtgagacctcagtgcctgatcatgtggtgtggtcactttttaacaccttgttcctgaactggtgttgtttagggttcatcgcattcgcttactccgtcaaatctcgggatcggaagatggtgggggacgtaactggtgcccaagcttacgccagcactgctaagtgtctgaatatttgggctttaattcttggaatcctgatgaccattggattcatcctgcttttggtttttggatctgtaacagtgtaccatatcatgctgcagatcatccaggagaagcggggatattag

SEQ ID NO: 139740 - DNA, 378 bp, Artificial Sequence
  derived and/or modified sequence
atgcataaggaagaacatgaggttgccgttctcgggccaccacctagcacaatcttgccaaggagcactgttattaacatacactcagaaacctcggtgccggaccacgtcgtgtggtctctgttcaatacattgttcctaaattggtgctgcctcggctttatcgcctttgcctacagcgtgaaaagcagagaccgtaagatggtgggtgatgtgaccggcgcacaggcctacgcctctaccgctaaatgtcttaacatctgggctttgattttgggtatcttgatgacgattggtttcattctgctcctggtttttggatcagttacagtttaccatattatgctccagatcatccaagaaaaacgcggttattag

SEQ ID NO: 139741 - DNA, 378 bp, Artificial Sequence
  derived and/or modified sequence
atgcacaaggaggaacacgaggtggcagttttggggcctcccccatccactattcttccaagaagtaccgtcattaatatacactctgaaacatctgttcccgatcacgttgtttggtctctgtttaatacactttttctgaactggtgttgtctcggatttatcgctttcgcgtattcagttaaatccagggacaggaagatggtgggggacgtgacaggcgctcaggcatacgcatcgactgcaaaatgtttgaatatttgggctctgatcttggggattctgatgactattggcttcattctgctactggtctttggatcagtgacagtgtatcacatcatgcttcaaattatccaggagaaaagagggtattag

SEQ ID NO: 139742 - DNA, 300 bp, Artificial Sequence
  derived and/or modified sequence
cctcaatctcagaagatgcacaaagaggagcatgaggttgctgtgctgggcccaccaccgtccacaatcctccccagatccacagtgattaacatccactctgaaacatccgtgcctgaccacgtggtggtacctgtccaacaccccttactcgagtgttgtttaggcttcatagcctttgcctattctgtcaagtcgcgagaccgaaagatggttggtgatgttacaggcgcacaggctctccatcgacaggtgccagagcacctggggccagactctggccacccacatgaccattag

SEQ ID NO: 139743 - DNA, 378 bp, Artificial Sequence
  derived and/or modified sequence
atgcataaggaagagcatgaagtcgccgtactggggcctccgccttccacaatcctccctcgatctacagtgattaacatccattcagaaacctccgtgccagatcatgttgtgtggtctctctttaacacccttttcctgaactggtgttgtcttggcttcatcgcgtttgcttacagtgtaaaaagtcgggatagaaagatggtgggcgatgttaccggtgcgcaggcctatgcttcaaccgccaaatgtctgaatatctgggccctgattttggggatcctgatgacaatcgggtttatcctgctcttggtctttggtagcgtcacagtttaccacatcatgctgcagattatacaggaaaagaggggttattag

SEQ ID NO: 139744 - DNA, 378 bp, Artificial Sequence
  derived and/or modified sequence
atgcacaaggaggagcacgaggtggccgtgctgggccccccccccagcaccatcctgcccagaagcaccgtgatcaacatccacagcgagaccagcgtgcccgaccacgtggtgtggagcctgttcaacaccctgttcctgaactggtgctgcctgggcttcatcgccttcgcctacagcgtgaagagcagagacagaaagatggtgggcgacgtgaccggcgcccaggcctacgccagcaccgccaagtgcctgaacatctgggccctgatcctgggcatcctgatgaccatcggcttcatcctgctgctggtgttcggcagcgtgaccgtgtaccacatcatgctgcagatcatccaggagaagagaggctactag

SEQ ID NO: 139745 - DNA, 300 bp, Artificial Sequence
  derived and/or modified sequence
ccccagagccagaagatgcacaaggaggagcacgaggtggccgtgctgggccccccccccagcaccatcctgcccagaagcaccgtgatcaacatccacagcgagaccagcgtgcccgaccacgtggtggtgcccgtgcagcaccccctgctggagtgctgcctgggcttcatcgccttcgcctacagcgtgaagagcagagacagaaagatggtgggcgacgtgaccggcgcccaggccctgcacagacaggtgcccgagcacctgggccccgacagcggccacccccacgaccactag

SEQ ID NO: 139746 - protein, 419 aa, Artificial Sequence
  derived and/or modified sequence
MAGFGAMEKFLVEYKSAVEKKLAEYKCNTNTAIELKLVRFPEDLENDIRTFFPEYTHQLFGDDETAFGYKGLKILLYYIAGSLSTMFRVEYASKVDENFDCVEADDVEGKIRQIIPPGFCTNTNDFLSLLEKEVDFKPFGTLLHTYSVLSPTGGENFTFQIYKADMTCRGFREYHERLQTFLMWFIETASFIDVDDERWHYFLVFEKYNKDGATLFATVGYMTVYNYYVYPDKTRPRVSQMLILTPFQGQGHGAQLLETVHRYYTEFPTVLDITAEDPSKSYVKLRDFVLVKLCQDLPCFSREKLMQGFNEDMAIEAQQKFKINKQHARRVYEILRLLVTDMSDAEQYRSYRLDIKRRLISPYKKKQRDLAKMRKCLRPEELTNQMNQIEISMQHEQLEESFQELVEDYRRVIERLAQE

SEQ ID NO: 139747 - protein, 334 aa, Artificial Sequence
  derived and/or modified sequence
MFRVEYASKVDENFDCVEADDVEGKIRQIIPPGFCTNTNDFLSLLEKEVDFKPFGTLLHTYSVLSPTGGENFTFQIYKADMTCRGFREYHERLQTFLMWFIETASFIDVDDERWHYFLVFEKYNKDGATLFATVGYMTVYNYYVYPDKTRPRVSQMLILTPFQGQGHGAQLLETVHRYYTEFPTVLDITAEDPSKSYVKLRDFVLVKLCQDLPCFSREKLMQGFNEDMAIEAQQKFKINKQHARRVYEILRLLVTDMSDAEQYRSYRLDIKRRLISPYKKKQRDLAKMRKCLRPEELTNQMNQIEISMQHEQLEESFQELVEDYRRVIERLAQE

SEQ ID NO: 139748 - DNA, 1260 bp, Artificial Sequence
  derived and/or modified sequence
atggccggcttcggcgccatggagaagttcctggtggagtacaagagcgccgtggagaagaagctggccgagtacaagtgcaacaccaacaccgccatcgagctgaagctggtgagattccccgaggacctggagaacgacatcagaaccttcttccccgagtacacccaccagctgttcggcgacgacgagaccgccttcggctacaagggcctgaagatcctgctgtactacatcgccggcagcctgagcaccatgttcagagtggagtacgccagcaaggtggacgagaacttcgactgcgtggaggccgacgacgtggagggcaagatcagacagatcatcccccccggcttctgcaccaacaccaacgacttcctgagcctgctggagaaggaggtggacttcaagcccttcggcaccctgctgcacacctacagcgtgctgagccccaccggcggcgagaacttcaccttccagatctacaaggccgacatgacctgcagaggcttcagagagtaccacgagagactgcagaccttcctgatgtggttcatcgagaccgccagcttcatcgacgtggacgacgagagatggcactacttcctggtgttcgagaagtacaacaaggacggcgccaccctgttcgccaccgtgggctacatgaccgtgtacaactactacgtgtaccccgacaagaccagacccagagtgagccagatgctgatcctgacccccttccagggccagggccacggcgcccagctgctggagaccgtgcacagatactacaccgagttccccaccgtgctggacatcaccgccgaggaccccagcaagagctacgtgaagctgagagacttcgtgctggtgaagctgtgccaggacctgccctgcttcagcagagagaagctgatgcagggcttcaacgaggacatggccatcgaggcccagcagaagttcaagatcaacaagcagcacgccagaagagtgtacgagatcctgagactgctggtgaccgacatgagcgacgccgagcagtacagaagctacagactggacatcaagagaagactgatcagcccctacaagaagaagcagagagacctggccaagatgagaaagtgcctgagacccgaggagctgaccaaccagatgaaccagatcgagatcagcatgcagcacgagcagctggaggagagcttccaggagctggtggaggactacagaagagtgatcgagagactggcccaggagtag

SEQ ID NO: 139749 - DNA, 1005 bp, Artificial Sequence
  derived and/or modified sequence
atgttcagagtggagtacgccagcaaggtggacgagaacttcgactgcgtggaggccgacgacgtggagggcaagatcagacagatcatcccccccggcttctgcaccaacaccaacgacttcctgagcctgctggagaaggaggtggacttcaagcccttcggcaccctgctgcacacctacagcgtgctgagccccaccggcggcgagaacttcaccttccagatctacaaggccgacatgacctgcagaggcttcagagagtaccacgagagactgcagaccttcctgatgtggttcatcgagaccgccagcttcatcgacgtggacgacgagagatggcactacttcctggtgttcgagaagtacaacaaggacggcgccaccctgttcgccaccgtgggctacatgaccgtgtacaactactacgtgtaccccgacaagaccagacccagagtgagccagatgctgatcctgacccccttccagggccagggccacggcgcccagctgctggagaccgtgcacagatactacaccgagttccccaccgtgctggacatcaccgccgaggaccccagcaagagctacgtgaagctgagagacttcgtgctggtgaagctgtgccaggacctgccctgcttcagcagagagaagctgatgcagggcttcaacgaggacatggccatcgaggcccagcagaagttcaagatcaacaagcagcacgccagaagagtgtacgagatcctgagactgctggtgaccgacatgagcgacgccgagcagtacagaagctacagactggacatcaagagaagactgatcagcccctacaagaagaagcagagagacctggccaagatgagaaagtgcctgagacccgaggagctgaccaaccagatgaaccagatcgagatcagcatgcagcacgagcagctggaggagagcttccaggagctggtggaggactacagaagagtgatcgagagactggcccaggagtag

SEQ ID NO: 139750 - DNA, 1260 bp, Artificial Sequence
  derived and/or modified sequence
atggctggcttcggagcgatggaaaagttcctcgtggaatacaagtctgccgtagaaaagaagttagccgagtacaaatgcaacactaacacagcaatagagcttaagctcgttagattccccgaagacctcgagaatgatatacgcacgttttttcccgaatacacgcatcaactcttcggggacgatgaaacggcatttggttacaagggattaaagattttgctgtactatatcgccggttccttgtcaacgatgttcagagtggagtatgccagcaaagtggatgagaatttcgactgcgtggaggccgacgacgtggaaggtaaaataaggcagatcattcccccaggcttctgtaccaataccaacgattttctgagcttgctcgaaaaggaggtcgattttaaaccattcgggacgctcttacacacgtattccgttctgtcacccacgggcggtgagaactttacctttcagatatacaaggcagacatgacatgccggggcttccgtgagtaccacgagaggctgcagactttcctgatgtggttcatagagactgcatcttttattgacgtggacgatgagcgatggcattacttcttggtgtttgaaaaatataataaagatggcgcgaccctcttcgccaccgttggatacatgaccgtctacaactattacgtttatcctgacaaaacacgaccaagggtttctcagatgctcatcctgacacccttccaagggcagggacacggagcccagctactggagactgttcatcgctactacaccgagttcccaactgtgctggacattaccgcagaggacccatccaaatcgtacgtgaagttacgagacttcgtgttggtcaagctttgccaggatctgccttgcttcagtagggagaagctgatgcagggctttaacgaggatatggctattgaggctcaacagaaattcaagattaataagcagcatgcccgacgggtgtacgaaatcttgcggctgctggttacagacatgtcagatgcagagcagtaccggtcctatagattagatataaagcgccgcttaattagcccatataagaagaagcagagggaccttgcaaaaatgaggaagtgcctcaggcccgaggaactgacaaatcagatgaaccaaatcgagattagtatgcagcacgagcagctggaggagtcttttcaggaactcgtggaggattaccgacgggtcatcgagaggctggcgcaagagtag

SEQ ID NO: 139751 - DNA, 1005 bp, Artificial Sequence
  derived and/or modified sequence
atgtttagagtcgaatacgcctcgaaagtggacgagaattttgattgtgtagaagcagacgatgtcgagggtaagatcaggcagatcattcctccaggcttctgtactaataccaatgactttctcagcttgttagagaaggaggttgattttaaacctttcggtacacttctgcacacatatagtgttctgagtcccactggaggcgagaatttcacctttcagatttataaagccgatatgacttgccgcggttttcgcgagtatcatgagcgcttgcagacttttctgatgtggtttatcgagaccgcttcctttattgatgtagacgatgagcgctggcattattttcttgtgtttgagaagtacaataaagacggggcgaccctttttgctaccgtgggatacatgactgtgtacaactactacgtgtatcccgacaaaactaggcctcgagtgagccaaatgcttatcttaactccttttcagggacaggggcacggcgctcagctgctagagaccgttcacagatactataccgagttccctaccgtgttggacataacggctgaggatccttccaagtcctatgttaagctgcgagatttcgtgctcgtgaagctctgccaggatcttccttgtttttctagggagaagcttatgcaagggttcaacgaggacatggcgatcgaggctcaacaaaagtttaagattaacaaacaacatgctcgccgagtgtatgaaattctgagattacttgtgacagacatgagtgatgccgagcagtaccgcagctatcgactggatattaagcgcaggctaatctccccgtacaaaaagaagcaaagagatttagctaagatgcgcaagtgcttgagaccagaggaactcacgaatcagatgaaccagatcgagatttccatgcagcatgagcagctggaggaaagcttccaagagctagtcgaggactaccgaagggtgatcgaacgccttgcacaggagtag

SEQ ID NO: 139752 - DNA, 1626 bp, Artificial Sequence
  derived and/or modified sequence
cgtccttcctcagccgcgggtgatcgtagctcggaaatggcgggatttggtgctatggagaaatttttggtagaatataagagtgcagtggagaagaaactggcagagtacaaatgtaacaccaacacagcaattgaactaaaattagttcgttttcctgaagatcttgaaaatgacattagaactttctttcctgagtatacccatcaactctttggggatgatgaaactgcttttggttacaagggtctaaagatcctgttatactatattgctggtagcctgtcaacaatgttccgtgttgaatatgcatctaaagttgatgagaactttgactgtgtagaggcagatgatgttgagggcaaaattagacaaatcattccacctggattttgcacaaacacgaatgatttcctttctttactggaaaaggaagttgatttcaagccattcggaaccttacttcatacctactcagttctcagtccaacaggaggagaaaactttacctttcagatatataaggctgacatgacatgtagaggctttcgagaatatcatgaaaggcttcagacctttttgatgtggtttattgaaactgctagctttattgacgtggatgatgaaagatggcactactttctagtatttgagaagtataataaggatggagctacgctctttgcgaccgtaggctacatgacagtctataattactatgtgtacccagacaaaacccggccacgtgtaagtcagatgctgattttgactccatttcaaggtcaaggccatggtgctcaacttcttgaaacagttcatagatactacactgaatttcctacagttcttgatattacagcggaagatccatccaaaagctatgtgaaattacgagactttgtgcttgtgaagctttgtcaagatttgccctgtttttcccgggaaaaattaatgcaaggattcaatgaagatatggcgatagaggcacaacagaagttcaaaataaataagcaacacgctagaagggtttatgaaattcttcgactactggtaactgacatgagtgatgccgaacaatacagaagctacagactggatattaaaagaagactaattagcccatataagaaaaagcagagagatcttgctaagatgagaaaatgtctcagaccagaagaactgacaaaccagatgaaccaaatagaaataagcatgcaacatgaacagctggaagagagttttcaggaactagtggaagattaccggcgtgttattgaacgacttgctcaagagtaaagattatactgctctgtacaggaagcttgcaaattttctgtacaatgtgctgtgaaaaatctgatgactttaattttaaaatcttgtgacattttgcttatactaaaagttatctatctttagttgaatattttcttttggagagattgtatattttaaaatactgtttagagtttatgagcatatattgcatttaaagaaagataaagcttctgaaatactactgcaattgcttcccttcttaaacagtataataaatgcttagttgtgatatgttaatgtgtgatgatatgattcttaaatacttacaataaacctcattcttaaata

SEQ ID NO: 139753 - DNA, 1570 bp, Artificial Sequence
  derived and/or modified sequence
gagcgcgcgggttgattcgtccttcctcagccgcgggtgatcgtagctcggaaatggcgggatttggtgctatggagaaatttttggtagaatataagagtgcagtggagaagaaactggcagagtacaaatgtaacaccaacacagcaattgaactaaaattagtgaaactgcttttggttacaagggtctaaagatcctgttatactatattgctggtagcctgtcaacaatgttccgtgttgaatatgcatctaaagttgatgagaactttgactgtgtagaggcagatgatgttgagggcaaaattagacaaatcattccacctggattttgcacaaacacgaatgatttcctttctttactggaaaaggaagttgatttcaagccattcggaaccttacttcatacctactcagttctcagtccaacaggaggagaaaactttacctttcagatatataaggctgacatgacatgtagaggctttcgagaatatcatgaaaggcttcagacctttttgatgtggtttattgaaactgctagctttattgacgtggatgatgaaagatggcactactttctagtatttgagaagtataataaggatggagctacgctctttgcgaccgtaggctacatgacagtctataattactatgtgtacccagacaaaacccggccacgtgtaagtcagatgctgattttgactccatttcaaggtcaaggccatggtgctcaacttcttgaaacagttcatagatactacactgaatttcctacagttcttgatattacagcggaagatccatccaaaagctatgtgaaattacgagactttgtgcttgtgaagctttgtcaagatttgccctgtttttcccgggaaaaattaatgcaaggattcaatgaagatatggcgatagaggcacaacagaagttcaaaataaataagcaacacgctagaagggtttatgaaattcttcgactactggtaactgacatgagtgatgccgaacaatacagaagctacagactggatattaaaagaagactaattagcccatataagaaaaagcagagagatcttgctaagatgagaaaatgtctcagaccagaagaactgacaaaccagatgaaccaaatagaaataagcatgcaacatgaacagctggaagagagttttcaggaactagtggaagattaccggcgtgttattgaacgacttgctcaagagtaaagattatactgctctgtacaggaagcttgcaaattttctgtacaatgtgctgtgaaaaatctgatgactttaattttaaaatcttgtgacattttgcttatactaaaagttatctatctttagttgaatattttcttttggagagattgtatattttaaaatactgtttagagtttatgagcatatattgcatttaaagaaagataaagcttctgaaatactactgcaattgcttcccttcttaaacagtataataaatgcttagttgtgatatgttaatgtgtgatgatatgattcttaaatacttacaataaacctcattcttaaatactt

SEQ ID NO: 139754 - DNA, 1260 bp, Artificial Sequence
  derived and/or modified sequence
atggccggctttggagccatggagaagttcctggtggagtacaagtctgctgtggagaagaagctggccgagtacaagtgcaacaccaacacagccatcgagctgaagctggtgcgcttccctgaggacctggagaatgacatccgcaccttcttccctgagtacacccaccagctgtttggagatgatgaaacagccttcggctacaagggcctgaagatcctgctgtactacatcgccggcagcctgagcaccatgttccgggtggagtatgccagcaaggtggatgaaaattttgactgtgtggaggctgatgatgtggagggcaagatccggcagatcatccccccaggcttctgcaccaacaccaatgacttcctgagcctgctggagaaggaggtggacttcaagcccttcggcaccctgctgcacacctacagcgtgctgagccccactggaggagagaacttcaccttccagatctacaaggctgacatgacctgccggggcttccgggagtaccacgagcggctgcagaccttcctgatgtggttcatcgagacagccagcttcattgatgtggatgatgagcgctggcactacttcctggtgtttgagaagtacaacaaggatggagccaccctgtttgccaccgtgggctacatgacagtgtacaactactacgtgtacccagacaagacccggccccgggtgtcccagatgctgatcctgacccccttccagggccagggccacggggcccagctgctggagaccgtgcaccgctactacacagagttccccaccgtgctggacatcacagctgaggaccccagcaagagctatgtgaagctgcgggactttgtgctggtgaagctgtgccaggacctgccctgcttcagccgggagaagctgatgcagggcttcaatgaagacatggccatcgaggcccagcagaagttcaagatcaacaagcagcacgccaggagagtgtatgagatcctgcggctgctggtgacagacatgtctgatgctgagcagtaccgcagctaccgcctggacatcaagagaagactcatcagcccctacaagaagaagcagagggacctggccaagatgaggaagtgcctgcggcctgaggagctgaccaaccagatgaaccagatcgagatctccatgcagcacgagcagctggaggagagcttccaggagctggtggaggactaccgccgggtgattgagcggctggcccaggagtag

SEQ ID NO: 139755 - DNA, 1005 bp, Artificial Sequence
  derived and/or modified sequence
atgttccgggtggagtatgccagcaaggtggatgagaactttgactgtgtggaggctgatgatgtggagggcaagatccggcagatcatccccccaggcttctgcaccaacaccaatgacttcctgagcctgctggagaaggaggtggacttcaagcccttcggcaccctgctgcacacctacagcgtgctgagccccactggaggagagaacttcaccttccagatctacaaggctgacatgacctgccggggcttccgggagtaccacgagcggctgcagaccttcctgatgtggttcattgaaacagccagcttcattgatgtggatgatgagcgctggcactacttcctggtgtttgagaagtacaacaaggatggagccaccctgtttgccaccgtgggctacatgacagtgtacaactactacgtgtacccagacaagacccggccccgggtgtcccagatgctgatcctgacccccttccagggccagggccatggagcccagctgctggagaccgtgcaccgctactacacagagttccccaccgtgctggacatcacagctgaggaccccagcaagagctatgtgaagctgcgggactttgtgctggtgaagctgtgccaggacctgccctgcttcagccgggagaagctgatgcagggcttcaatgaagacatggccatcgaggcccagcagaagttcaagatcaacaagcagcacgcccggcgggtgtatgagatcctgcggctgctggtgacagacatgtctgatgctgagcagtaccgcagctaccgcctggacatcaagaggaggctcatcagcccctacaagaagaagcagagggacctggccaagatgaggaagtgcctgcggcctgaggagctgaccaaccagatgaaccagatcgagatctccatgcagcacgagcagctggaggagagcttccaggagctggtggaggactacagaagagtcatcgagcggctggcccaggagtag

SEQ ID NO: 139756 - DNA, 1260 bp, Artificial Sequence
  derived and/or modified sequence
atggccggcttcggcgccatggagaagttcctggtggagtacaagtccgccgtggaaaagaaactggctgagtataagtgcaatacgaacactgcaatcgaattaaaacttgtgagattccccgaggacctggaaaacgacatccgcacattcttcccggaatatacccaccaactgttcggcgatgatgagactgctttcgggtataaagggctcaagatattgctgtactacatcgcaggtagcctgagcaccatgttccgggtggagtacgccagcaaagtggatgaaaatttcgattgtgtggaagcagatgacgtggaggggaagattcggcagatcatacctccaggattctgtaccaacacgaatgactttctgtccctgttggaaaaagaggtggattttaagccctttgggaccctgcttcacacctattctgttctctcccccaccggcggagagaattttacgttccaaatctacaaggcggacatgacatgccgaggctttagggagtaccatgagaggcttcagaccttcttgatgtggtttattgagactgcgtcattcattgacgtggacgacgaaagatggcattactttctggtctttgaaaaatataataaggatggtgccaccctatttgcaactgtgggctacatgacagtatacaactactacgtttatcccgacaaaacccggcctcgtgtctctcaaatgctgatcttgaccccctttcagggtcagggccacggagcacagctattagagaccgtgcatagatattacaccgaatttcccactgtgttggacatcaccgcagaagaccctagcaaatcctacgtcaaactgcgggacttcgtgctggtgaagctatgccaagatcttccctgtttctcacgtgaaaagttaatgcaggggtttaacgaggacatggcaatcgaagcccaacaaaagtttaagatcaataaacaacacgcgcggagagtatacgagatcctgagactgctagttaccgatatgtcggacgccgaacagtacagatcatacagactggacatcaagcgacggctcatttctccatacaagaagaaacagagagatcttgctaaaatgcgtaagtgtctgcgacccgaggaattgacgaaccagatgaaccagatcgaaattagcatgcagcacgagcaactcgaggagtccttccaggaactggtcgaagactacaggcgagtgatagaacgcttagcgcaggagtag

SEQ ID NO: 139757 - DNA, 1005 bp, Artificial Sequence
  derived and/or modified sequence
atgttccgggtggagtacgccagcaaggtggacgagaacttcgactgcgtggaggcagacgacgtggaaggcaagataagacagattattcctcccgggttttgtactaacaccaacgattttctcagtctcctggagaaagaggtcgatttcaagcccttcggaactctgttgcacacttacagtgtgctgtcacctacagggggcgaaaatttcactttccagatttacaaagcagacatgacatgccggggtttccgtgagtaccacgaacgattgcaaacgttccttatgtggtttatagagactgccagcttcattgatgtggatgacgaacgttggcattactttctggtgtttgagaaatacaacaaggatggagctacacttttcgcaacagtcgggtacatgacggtatacaattactacgtgtatcctgacaaaacgcggccgcgggtgtcccagatgttaattcttaccccctttcaaggccagggacacggcgcccaacttctggagaccgtgcaccgttattacacagagtttcctacggtcctagacattactgcagaagacccttctaagtcttacgtgaaactgcgtgatttcgtgctagtcaaactctgtcaggacctgccctgcttttcccgagagaaactaatgcaaggattcaatgaggacatggccattgaagctcagcagaaatttaagattaacaaacagcacgcacgccgggtgtacgaaatcctcagactgctagttacagacatgtcagacgctgagcagtataggtcatataggctagacatcaagagacgcctgatttccccctataaaaaaaagcagcgcgacctggcaaaaatgagaaagtgccttaggcccgaagagctgactaaccaaatgaaccagatcgagatttcgatgcagcatgagcagctcgaagagtccttccaagagttggtggaagattataggagagttatagagcgcctggcgcaggagtag

SEQ ID NO: 139758 - DNA, 1260 bp, Artificial Sequence
  derived and/or modified sequence
atggcaggctttggagccatggaaaagtttttggtcgagtataagtctgctgtggagaagaagctggctgagtacaagtgcaatactaacaccgcaatcgagcttaagctcgtgcgctttcccgaagatctagagaacgatatccgaacctttttcccagagtacactcaccagttattcggcgacgacgaaacggccttcggctataaaggcctgaagattctgctctactacatcgctggttctctgtcaaccatgttcagagtggagtacgcaagcaaggtagacgagaattttgactgtgtagaggccgacgatgtggagggcaagattaggcagattatcccccctggcttttgtaccaacaccaatgacttccttagccttctggaaaaggaggttgactttaaaccattcggaactttgctgcacacctattcggtactttccccaaccggcggtgagaatttcacattccagatttacaaggctgacatgacatgtagggggtttcgcgagtaccacgagcgcttgcagaccttcctcatgtggttcatcgagacagccagcttcattgatgtggatgatgagaggtggcactatttcttggtcttcgagaagtataacaaagacggggcaaccctcttcgccaccgttggatatatgaccgtttacaactattacgtttaccccgacaaaactcgcccaagggtaagtcagatgctcattctgacgccgtttcagggtcaaggccatggggcacagctgctcgagacagtccaccgctactacaccgaatttcctacagtgctggacattacagcggaggatcctagtaagagttatgtgaagttaagagatttcgtccttgttaagctctgtcaggacctcccatgcttctcccgagaaaagctaatgcagggtttcaacgaagacatggccatcgaggcacagcagaagtttaagatcaataagcagcacgcgagacgcgtgtatgaaattcttagattactcgtgaccgacatgagtgacgcagaacagtaccggagctatcggctggacatcaaaaggcgtttgatctctccttacaaaaagaaacagcgggatttggccaaaatgcgcaaatgcctccgtccggaggagctgactaatcagatgaatcagattgagatctctatgcagcacgagcagttggaggaatcttttcaggaactggtggaggattaccgcagagtcatagagagactcgcacaggagtag

SEQ ID NO: 139759 - DNA, 1005 bp, Artificial Sequence
  derived and/or modified sequence
atgttccgagtcgagtacgccagcaaggttgatgagaactttgattgcgtggaggccgacgacgtggagggtaaaattaggcaaattataccacccggattctgcactaacaccaatgatttcctttctctcctcgagaaggaggtggatttcaagcccttcggtacactgctgcatacatatagcgtactgtctcccaccgggggagaaaatttcaccttccagatatacaaggccgacatgacctgtcggggattccgtgagtaccacgagagactgcagaccttcctgatgtggtttatcgaaaccgcgtcttttatagacgttgacgacgaaagatggcattacttcctggtgtttgaaaaatacaataaggatggtgcaaccttgtttgccacagtaggctacatgactgtgtataactactacgtgtaccctgacaaaactagacccagggtgagccaaatgcttattctgaccccctttcagggtcaggggcacggagcacaattactggagaccgtccatcgctattacaccgaattcccaacggtgcttgacatcactgccgaggatcccagtaaatcctacgtgaaactccgtgattttgtactggtgaagctctgccaggatctgccatgcttttcccgcgaaaagctaatgcagggattcaatgaagatatggccatcgaagcacagcagaaattcaaaattaacaaacagcatgcgaggcgcgtgtacgagatcctgcgcctgctagttaccgatatgtcagatgccgagcagtaccggtcataccgactggacatcaaacggaggttgatatccccatacaagaaaaagcagagagatctggctaagatgaggaagtgccttagaccagaggaactcacgaaccagatgaatcaaatcgaaattagcatgcaacatgagcagctcgaagagtccttccaggaactggtggaggactatcgcagggtaatagaacgtctcgcacaggagtag

SEQ ID NO: 139760 - protein, 436 aa, Artificial Sequence
  derived and/or modified sequence
MEPDDFDSEDKEILSWDINDVKLPQNVKKTDWFQEWPDSYAKHIYSSEDKNAQRHLSSWAMRNTNNHNSRILKKSCLGVVVCGRDCLAEEGRKIYLRPAICDKARQKQQRKRCPNCDGPLKLIPCRGHGGFPVTNFWRHDGRFIFFQSKGEHDHPKPETKLEAEARRAMKKVNTAPSSVSLSLKGSTETRSLPGETQSQGSLPLTWSFQEGVQLPGSYSGHLIANTPQQNSLNDCFSFSKSYGLGGITDLTDQTSTVDPMKLYEKRKLSSSRTYSSGDLLPPSASGVYSDHGDLQAWSKNAALGRNHLADNCYSNYPFPLTSWPCSFSPSQNSSEPFYQQLPLEPPAAKTGCPPLWPNPAGNLYEEKVHVDFNSYVQSPAYHSPQEDPFLFTYASHPHQQYSLPSKSSKWDFEEEMTYLGLDHCNNDMLLNLCPLR

SEQ ID NO: 139761 - DNA, 583 bp, Artificial Sequence
  derived and/or modified sequence
accatcggccatcagcgccagtgccactcgcgccctcaagaagccgcacggagttcgggccggcagcagcggctgcagtcgtatggcagtgagccgctgtctacccagcgagacggagagctcaggacgcaaccctatgagttggaagccgcaggaggcggaaccgggttgcgggatacgcgttgacgtcacatcctctgggcggggccgcaaggaacccgcgcaaattgaaaggcctaaggaaacgtgtcgtctggaatgggcttgggggccacgcctgcacatctccgcgagacagagggataaagtgaagatggtgctgttattgttacctcgagtgccacatgcgacctctgagatatgtacacagtcattcttactatcgcactcagccattcttactacgctaaagaagaaataattattcgaggatatttgcctggcccagaagaaacttatgtaaatttcatgaactattatatccgttttcctcggagtgagagaaaactctttttagatatcatctgagaggtagttaatttggcaccatggggatacagggattgctacaatttatcaaaga

SEQ ID NO: 139762 - DNA, 1311 bp, Artificial Sequence
  derived and/or modified sequence
atggagcccgatgacttcgactctgaagataaggagattctatcctgggatatcaatgacgtcaagttacctcagaacgtcaagaagacggactggttccaggagtggcctgatagctacgctaaacacatctacagcagtgaggacaagaatgctcaacgccacctttcttcttgggctatgaggaacactaacaatcataatagccgtatattaaagaaatcctgcctcggtgtggtagtgtgcggccgtgattgcttagccgaagagggcaggaaaatatatcttcgcccagcaatatgcgacaaagcgagacagaaacagcagaggaaacgatgtcccaactgcgatggcccgctcaagctgattccctgccgtgggcacgggggttttccagtaacgaacttctggcgacacgacggccgattcatttttttccaaagcaaaggggaacacgatcacccaaaaccagagaccaagcttgaggccgaagccagacgcgccatgaagaaagtgaataccgctccatctagcgtctccttgtcccttaaagggagcacagagacccgctccttgcccggcgagacccaaagtcaggggtcccttcccctgacttggtcattccaggagggggtgcagctgcccggcagttatagtggccatttgattgcaaacaccccacagcagaactctctcaacgattgcttcagtttctctaagtcgtacggcctggggggtatcaccgatctcacggaccagacatccacagtcgacccaatgaagctttatgagaaacgcaaactgagcagctctcggacatacagctccggtgacctcttgcccccctccgccagtggcgtttacagtgaccatggcgacctgcaagcctggagcaagaacgcagcgctgggccggaaccacctagcggacaattgttattcgaattaccctttcccactaacttcctggccatgtagttttagtccatcacagaactcgagtgagcctttctaccagcagctgcctttggaaccaccggccgccaaaactggatgccccccactgtggcctaatcccgctggcaatctgtatgaggaaaaggtccacgtcgactttaattcttatgttcagagtcctgcttatcactccccccaggaagatcccttcctctttacgtatgcaagccatccgcatcaacaatacagcctgccgagcaagagtagtaagtgggacttcgaggaggagatgacctatctgggcctcgaccattgcaacaatgacatgcttctgaacctgtgccctctgaggtag

SEQ ID NO: 139763 - DNA, 1311 bp, Artificial Sequence
  derived and/or modified sequence
atggagccagatgactttgacagcgaggacaaggagatcctgtcctgggacatcaatgatgtgaagctgccccagaatgtgaagaagacagactggttccaggagtggccagacagctatgccaagcacatctacagcagcgaggacaagaatgcccagaggcacctgagctcctgggccatgaggaacaccaacaaccacaacagccgcatcctgaagaagagctgcctgggcgtggtggtgtgtggccgggactgcctggccgaggagggcaggaagatctacctgcggcctgccatctgtgacaaggcccggcagaagcagcagaggaagcgctgccccaactgtgatggccccctgaagctgatcccctgccggggccacggcggcttccctgtgaccaacttctggaggcatgatggccgcttcatcttcttccagagcaaaggagaacatgaccaccccaagccagagaccaagctggaggccgaggcccggcgggccatgaagaaggtgaacacagcccccagctctgtgtccctgagcctgaagggcagcacagagaccaggagcctgcctggagagacccagagccagggcagcctgcccctgacctggagcttccaggagggcgtgcagctgcccggcagctacagcggccacctgattgccaacaccccccagcagaacagcctgaatgactgcttctccttcagcaagagctatggcctgggcggcatcacagacctgacagaccagaccagcacagtggaccccatgaagctgtatgagaagaggaagctgagcagcagcaggacctacagcagcggggacctgctgcccccatctgccagcggcgtgtacagcgaccatggagacctgcaggcctggagcaagaatgctgccctgggcaggaaccacctggccgacaactgctacagcaactaccccttccccctgacctcctggccctgcagcttcagccccagccagaacagcagcgagcccttctaccagcagctgcccctggagcccccagctgccaagacaggctgcccccccctgtggcccaacccagctggcaacctgtatgaggagaaggtgcacgtggacttcaacagctatgtgcagagccctgcctaccacagcccccaggaggaccccttcctgttcacctacgccagccacccccaccagcagtacagcctgcccagcaagagcagcaagtgggactttgaggaggagatgacctacctgggcctggaccactgcaacaatgacatgctgctgaacctgtgccccctgaggtag

SEQ ID NO: 139764 - DNA, 1311 bp, Artificial Sequence
  derived and/or modified sequence
atggagcccgacgacttcgacagcgaggacaaggagatcctgagctgggatattaacgacgtgaagctacctcaaaacgtgaagaagaccgactggtttcaagaatggcctgacagttacgcaaaacacatttatagctccgaggataaaaatgcccagcgccacttaagctcatgggccatgcgaaataccaacaaccacaactcccgcatcctaaagaagtcatgtctcggcgtggtagtgtgcggcagggactgtctggcagaggagggaaggaaaatctacctcaggccagctatttgcgacaaggcgagacagaaacagcagagaaaacgttgccctaactgcgatggacccctcaaactcattccttgccgcggtcacggcggcttccctgtcaccaatttctggagacatgatgggagattcatttttttccagagtaaaggagagcatgaccatcccaaacccgaaacaaagctcgaggcagaggcccggcgggccatgaagaaggtgaatactgcccctagctcagtgagtctcagtctaaagggatctactgagacccgtagcctgcccggtgagacacagagtcaggggagtttacccctaacttggtcttttcaagaaggagtgcagctgcccgggtcctacagcgggcatctgatcgccaacactccccagcagaatagtcttaatgattgcttcagcttcagcaaatcatatggcctggggggtatcacggacctaactgaccaaacctcgactgtggacccaatgaagctatatgagaaaagaaagctctcctcctcgcggacatattcttctggagatcttcttccccctagtgccagcggggtgtactccgatcatggtgacctgcaggcttggtcaaagaatgccgccctgggaagaaaccacctcgcagataactgttacagcaactatccattccctctgacaagttggccgtgctctttcagcccttcacagaactcgagtgagccattctaccaacaactgcctctggaacccccagccgcaaagacaggatgtcctccgctctggccaaatcccgcaggtaatctctacgaagagaaagtgcacgtggatttcaactcatatgtgcagtcacctgcataccactcccctcaggaggacccattcttattcacatatgctagccaccctcatcagcaatacagtctgccttcaaagtcctctaaatgggatttcgaggaagagatgacctaccttggattggaccattgcaacaacgatatgctgctgaatctgtgtccactgaggtag

SEQ ID NO: 139765 - DNA, 1311 bp, Artificial Sequence
  derived and/or modified sequence
atggagccagatgattttgactctgaggacaaggaaatactaagctgggacataaatgatgttaagttgccgcagaatgtgaagaagacagattggtttcaggagtggccagactcttacgctaaacatatctattcctctgaggacaagaatgcacaaaggcatctttcatcctgggccatgaggaatacaaacaatcataactcgcgtattttaaagaagtcatgtttgggagtggtggtgtgcggtagggactgccttgccgaagagggccgaaagatttatttacggccagcgatttgcgataaggccaggcaaaaacagcagagaaaacgctgccctaattgcgatggcccactcaagctgataccatgtcggggacacggtggattcccggtgaccaatttttggcgacacgacggacggtttatcttttttcaaagcaagggcgaacatgatcatcccaagcccgagactaagctggaagccgaagctcgtcgtgccatgaagaaagtcaacacagctccatccagcgtctcattgtccctaaaggggagtacagaaacgagaagcttgcccggagagacacagtctcagggatccctacctttgacctggtctttccaggagggggtgcagctgcccggatcttacagtggtcacttaattgccaatacgccccagcagaattctctgaacgattgtttcagcttctccaagagctatggactggggggtattaccgacctgaccgaccaaaccagtactgtcgatcccatgaaactgtacgagaagagaaaactgtcctcctcgcggacgtacagttcaggagacttgctgcccccaagcgcctccggggtctacagcgatcacggagacctccaggcatggagcaaaaatgcggctctggggaggaaccacttagccgataattgctattcgaactatccttttcctctcaccagttggccatgttcctttagcccatctcaaaattcgtcagaacccttctaccagcaactgcctctcgaaccgcctgccgctaaaaccggctgcccacctctttggcctaaccccgctgggaacctctacgaagagaaagttcatgttgacttcaatagttacgtacaaagtccagcttatcactcaccacaagaggacccctttctgtttacctacgcttcgcacccacatcagcagtacagtttgccctctaaatcaagcaaatgggatttcgaggaagaaatgacttacctaggtctggaccactgcaataatgatatgctgctgaatctgtgtcctctccggtag

SEQ ID NO: 139766 - DNA, 2765 bp, Artificial Sequence
  derived and/or modified sequence
gagcctgctgggacttgaaccagcagtaagattttcacgacacagtgctgtctgcttctccgtaagaagttagaagccctagaaaacaatctcctggtccaaggtgcttgagtgggccgatccagctatatcaagaacctttgagaacaaaattctcaagcatttctgaggggagtcgaataggtgaaaaccttggctggcctgaccttatcatggaacctgacgactttgattctgaagacaaagagatattaagctgggatattaatgatgtgaaactgccacagaacgtgaaaaaaaccgactggttccaggagtggccagattcctatgccaaacacatctacagctcggaggacaagaatgcgcagcggcacctgagcagctgggccatgcgcaataccaacaaccacaactcccgcatcctcaagaagtcctgcctgggtgtggtggtgtgcggccgcgactgtctcgcagaggaggggcgcaagatctacctgagacctgccatctgtgacaaggcccggcagaagcagcagcggaaacgctgtcccaactgtgacgggcctctgaagctcatcccttgccgaggtcatgggggcttcccggtcaccaacttctggaggcacgacggacgctttatatttttccagtcaaagggagagcatgatcatccaaaaccagaaaccaagttagaagctgaggcaagaagagccatgaagaaagtgaacacagcaccttcctccgtctcattgagcctgaaggggagcacagagaccaggtctcttccaggtgaaacacaaagtcaggggagtttacctttaacttggtctttccaggaaggcgtccaattgcctggtagttacagtggacatttaatagctaacactcctcagcagaactcactaaatgattgcttttccttctccaagagttatggtctgggaggaatcacagatctgactgaccagacttccactgtggaccccatgaagctctatgaaaagcgcaaattgtccagtagcagaacctacagtagtggagacctgcttcctccttctgcctccggagtctactctgatcatggcgatctacaagcgtggagtaaaaatgctgctttggggagaaatcatcttgctgacaactgttattccaattatccttttcctctgaccagctggccttgcagcttctctccttcccaaaactcttcagaacccttttaccagcagcttccattggagccacctgcagccaaaactggctgtcccccattatggccaaatccagcgggtaatctttatgaagagaaagtacatgtggattttaacagctacgtccagtctcctgcataccattcacctcaagaagacccctttctcttcacctacgcctctcatcctcatcagcaatattcactgccaagcaagagcagcaaatgggattttgaggaagaaatgacatacttgggtttggatcactgcaacaatgatatgcttctgaacctgtgtcctttgagatgacccaaatctttcactatgtgcaccccagcccctcaaaaatggggaagggctgaaagaatttccttaggaaataatttttaaaacataaccacagataaatgagaatcatgataagcagtagacaaggcttttttctttttcttttttccttctttttttttttttttttttttttttgagacagagtcttgctcttttgcccaggcaggaatgcagtggcgccatctcggctcactgcaacctctgcctcccgggtttgagtgattctcctgcgtcagcctcccgagtagctgggattacaggcacctgccactgcgcctggctaatttttctatttttagtagagacagggttttgccatgttggtcaggctgctctcaaactcctgatctcaagtgatctgcccacctcaccatcccaaagtgctgggattacaggcgtgagccattgtgcccggctgacaaggcttttttcttcacatgagtaatttttttggcttcttctcctccactctagtatttccaccctcagtaaggaatggaaacctgtcccgtctggggtgtgaagtgccctctgctttttcccccacattgtttggggttcccagcacctcagccacattgcatgctgggttttcattgtcattgttgcaaatgaaatggagtagacatgtgaaatgctaacctatctaggacctgatctatgccttcttgggaactgagaatgaagaaacagaaatagatggtggaagaactgcctaaggtgtgaaaagctgaagattctaccactgaagtactgaatatgttgtctagttgtgagactagtgtgtaaaatatatgttttctagatgatttctgagacttgtgatgacaaggaacctgacctaaccccatttttcataaagacaaagaacagcaatgttaaattgccatatgaagagaaacactagtgatgtgcgtggtctccttgcctcttgtttccttccctcttcctcactgacttccccttgcacaggggcttctgttttatcccatttattatttgtggcacctatatcaatgtggggtttgtaataggtgagaaatatttgcttggagaagctcttgtgcaattagcctggcaatgattggccggccatgtttgaatgccagtttctcttctttgctgaagtactttatgataaaagtaagcctagacataaaatctggagagaaccatgcaataaacaagtatttttgaaat

SEQ ID NO: 139767 - DNA, 1311 bp, Artificial Sequence
  derived and/or modified sequence
atggagcccgacgacttcgacagcgaggacaaggagatcctgagctgggacatcaacgacgtgaagctgccccagaacgtgaagaagaccgactggttccaggagtggcccgacagctacgccaagcacatctacagcagcgaggacaagaacgcccagagacacctgagcagctgggccatgagaaacaccaacaaccacaacagcagaatcctgaagaagagctgcctgggcgtggtggtgtgcggcagagactgcctggccgaggagggcagaaagatctacctgagacccgccatctgcgacaaggccagacagaagcagcagagaaagagatgccccaactgcgacggccccctgaagctgatcccctgcagaggccacggcggcttccccgtgaccaacttctggagacacgacggcagattcatcttcttccagagcaagggcgagcacgaccaccccaagcccgagaccaagctggaggccgaggccagaagagccatgaagaaggtgaacaccgcccccagcagcgtgagcctgagcctgaagggcagcaccgagaccagaagcctgcccggcgagacccagagccagggcagcctgcccctgacctggagcttccaggagggcgtgcagctgcccggcagctacagcggccacctgatcgccaacaccccccagcagaacagcctgaacgactgcttcagcttcagcaagagctacggcctgggcggcatcaccgacctgaccgaccagaccagcaccgtggaccccatgaagctgtacgagaagagaaagctgagcagcagcagaacctacagcagcggcgacctgctgccccccagcgccagcggcgtgtacagcgaccacggcgacctgcaggcctggagcaagaacgccgccctgggcagaaaccacctggccgacaactgctacagcaactaccccttccccctgaccagctggccctgcagcttcagccccagccagaacagcagcgagcccttctaccagcagctgcccctggagccccccgccgccaagaccggctgcccccccctgtggcccaaccccgccggcaacctgtacgaggagaaggtgcacgtggacttcaacagctacgtgcagagccccgcctaccacagcccccaggaggaccccttcctgttcacctacgccagccacccccaccagcagtacagcctgcccagcaagagcagcaagtgggacttcgaggaggagatgacctacctgggcctggaccactgcaacaacgacatgctgctgaacctgtgccccctgagatag

SEQ ID NO: 139768 - protein, 336 aa, Artificial Sequence
  derived and/or modified sequence
MSNMENSFDDVSCLSPQNLGSSSPSKKQSKENTITINCVTFPHPDTMPEQQLLKPTEWSYCDYFWADKKDPQGNGTVAGFELLLQKQLKGKQMQKEMSEFIRERIKIEEDYAKNLAKLSQNSLASQEEGSLGEAWAQVKKSLADEAEVHLKFSAKLHSEVEKPLMNFRENFKKDMKKCDHHIADLRKQLASRYASVEKARKALTERQRDLEMKTQQLEIKLSNKTEEDIKKARRKSTQAGDDLMRCVDLYNQAQSKWFEEMVTTTLELERLEVERVEMIRQHLCQYTQLRHETDMFNQSTVEPVDQLLRKVDPAKDRELWVREHKTGNIRPVDMEI

SEQ ID NO: 139769 - DNA, 1011 bp, Artificial Sequence
  derived and/or modified sequence
atgtccaatatggagaattcgtttgacgatgtgtcatgccttagcccacagaacctgggctcctcatcgccctctaagaagcaaagcaaagagaacacaatcactatcaattgtgtgacattcccccatccagacacgatgccagagcagcagctactgaaacccacagagtggtcttattgcgattacttttgggcggacaaaaaggatccccagggcaatggaacagtggcaggcttcgagctgctgcttcaaaagcagcttaaaggaaaacagatgcagaaggagatgtccgagtttattagagagaggatcaaaattgaagaagactacgccaagaatctggccaagctctcacagaactctctcgccagccaggaggaaggaagcctaggagaggcgtgggcgcaagtgaaaaagtccctggccgacgaagccgaagtgcacctgaaattctcagctaagctgcatagcgaagtggagaaacctctgatgaacttccgggaaaattttaaaaaggacatgaagaaatgtgaccatcatattgcagacctgcgcaagcagctggccagcaggtacgcatccgttgagaaagcgaggaaggccctgacagaacgacaaagagacctcgaaatgaagacccaacagctggagatcaaacttagcaacaaaacagaggaggacatcaagaaagcacgccgcaaaagcactcaagccggcgatgacttgatgaggtgcgtggatctatataaccaggcgcagtctaaatggttcgaagagatggtaacaaccacactagaactcgagaggctggaggtagagagagtcgagatgatccggcagcacctttgtcagtatacacaactgagacatgagacagatatgtttaatcagtccaccgtggaacctgtcgatcaactcttacggaaagtcgacccggcaaaagatagggaactttgggttcgggagcacaaaaccgggaatattaggccagtggacatggagatctag

SEQ ID NO: 139770 - DNA, 873 bp, Artificial Sequence
  derived and/or modified sequence
atgccagaacagcagctgctgaaacctacagaatggtcgtattgcgattatttctgggcggacaaaaaagaccctcaggggaatggtacagtggccggattcgagctgctgctccagaagcagctgaaaggaaaacagatgcagaaggagatgagcgaatttattagagagagaattaagatcgaagaagattatgccaaaaatctggctaaactgagccaaaacagcctggccagccaggaggagggctcactgggagaggcttgggcccaagtgaaaaaatctctggccgacgaggcagaggtccacctgaagttcagtgctaaacttcacagtgaagtcgaaaagccgctgatgaacttccgggagaacttcaaaaaggacatgaaaaagtgcgaccatcacattgctgatctgaggaagcagctcgcaagcagatacgccagcgtggaaaaagcacggaaagcattaacagagaggcagagagacctagaaatgaaaacccagcagctggagattaagcttagtaataagaccgaagaagacatcaaaaaggcacggcgcaaatctacccaggccggagacgatttaatgcgatgcgtagatttatataaccaggcccagtccaagtggttcgaggaaatggtgaccaccaccttagagctcgaacggttagaggttgaacgtgtagagatgattcggcagcacctctgccagtatacacagttgcgtcatgagacagatatgtttaatcaatctactgtggaacccgtagatcagctgttaagaaaggtggatccagcaaaggatcgcgaactttgggtgcgcgagcataaaactggaaacattagacccgtggacatggagatatag

SEQ ID NO: 139771 - DNA, 378 bp, Artificial Sequence
  derived and/or modified sequence
atgaagactcaacagctggaaataaaattgtccaacaaaactgaagaagacatcaagaaggctaggcgcaaaagcacacaagcaggcgatgatcttatgcggtgcgtggatttatacaatcaggcgcaatctaaatggttcgaggagatggttaccaccacactggagctcgagagattggaggtggagcgggtagagatgatcagacaacacctctgccaatatacacaactgcgacatgagactgatatgttcaatcagtccacagttgaacccgtcgatcagttactgcgaaaagtggaccctgccaaggaccgggagttgtgggtaagagaacataagaccggaaacattcgcccagtagatatggagatttag

SEQ ID NO: 139772 - DNA, 1011 bp, Artificial Sequence
  derived and/or modified sequence
atgagtaacatggagaactctttcgacgatgtttcttgcttgagtcctcagaatttaggcagttcttcaccatcaaaaaaacagagcaaagaaaatactatcactatcaattgcgtgacgttcccccatcccgacaccatgccggagcaacagcttctgaagcctacagaatggtcctactgcgattatttttgggctgacaagaaagatccccagggtaatggcaccgtagccgggtttgagcttttgctccagaagcagctcaaggggaaacaaatgcaaaaagaaatgtccgagttcatccgcgagagaattaagattgaagaggattacgctaagaacctggctaagttatcacagaacagtctcgcaagccaggaagagggttcacttggtgaggcttgggcccaagtgaaaaagtcactggctgatgaggcagaagtacatcttaagtttagtgccaaactgcactctgaggtggagaaaccgttaatgaattttagggaaaactttaagaaagatatgaaaaagtgtgaccaccatattgctgatctccgtaaacaattggcctcccgttatgcaagcgtggagaaggccaggaaggcactgacagaaagacaacgtgatctggagatgaaaacccagcagctcgaaatcaaactgagcaataagacagaggaggacatcaagaaggcgaggcgtaagagtactcaagccggcgacgatctgatgcggtgcgtagatttgtataaccaggctcagtccaagtggtttgaagagatggttaccaccaccttagagttggagaggttagaagtggaaagggtggaaatgatccgccagcacctctgtcaatatactcagctgaggcacgagaccgacatgttcaaccaaagtacggtagagcccgtcgatcagctgctgagaaaagtggatcctgccaaggatagagaactgtgggtcagggagcataagactgggaatatccgccctgtcgacatggaaatctag

SEQ ID NO: 139773 - DNA, 7773 bp, Artificial Sequence
  derived and/or modified sequence
cccgagagctgggcgtgggaacagcgtggggtcagggagacccctgcttgccctggcccagaatatggtgacttaggattcagactgagcatccctgattccccagcgcctccaccctcagggaacctgaatggggggaaaaaatgtccaatatggagaacagctttgacgatgtttcttgcctctctccccagaacctgggatcctcatcgccaagcaaaaagcagagcaaggaaaacaccatcacaataaactgtgtgacgttccctcacccagacacgatgccggaacagcagctgctgaaaccaaccgagtggagctactgcgactacttctgggctgataagaaggacccccaaggcaacggcaccgtggctgggtttgaactactgctccagaaacagctgaagggcaaacaaatgcagaaggaaatgtcagaattcatccgggaaaggataaagattgaagaagactatgcgaagaacttagctaagctctctcagaactccttggcttcacaggaggaaggctccttgggagaggcgtgggcccaggtgaagaagagcctggcggacgaagcagaagttcacctcaagttctctgccaagcttcacagcgaggtggagaagcccctgatgaacttccgtgagaacttcaagaaagacatgaagaagtgcgaccaccacattgccgaccttcgcaagcagctcgccagccgctatgcctcggtggagaaggcccggaaagccctcacagagcggcagagagacctggagatgaagacccagcagctggagatcaagctgagcaacaagacagaggaggacatcaagaaggcgcggagaaagtccacacaggctggagacgacctcatgcgctgtgtggatctctacaaccaggcccagtccaaatggtttgaagagatggtgaccaccacattggagctagagcggctggaggtggagagggtagagatgatccggcagcacctgtgccagtacacgcagctgcggcatgaaacagacatgttcaaccaaagcacagtcgagcccgtggatcagctgcttcgaaaagtggacccggccaaagacagggagctgtgggtcagagagcacaagacgggcaacatccgccctgtggacatggagatctagatgggcctgtgcagcttcggggggtcctgctggggaggggggctgggctcccaccatggggcccatgccgagtggatgccccccaccctctctcctgggccactgaggagaggggagagagctggtgattccagaagggtgacccggacagcctagctgggggctcccccatattcccaggcccagaagacagacccacagccctgcccttgtctctgaggctgaagaccccctgactcccatgctgtgcttgccgctctgaaacaaacagaggctggaactttgtggtccttgccgagttttgtaggggtcactgtcacatgcttgtgccctggaagccccaaggctcttcctccagctggctcccttgtctccagggctttggaggatcagggtagggagggctctgtctctaagccaggtgtcaggatcagaatcatgggtagaaggtgccattcagctcacagccgcacccagaatcctttgcagccctccttctttatttttttcccattgcattctgggagtccacatctggctttctcagccactgttcatcaccaggggttttaggaggaaggcttggctcctgtcttcccagacccaccatgcctggagaggtcaggatggaactacctcattcggcaaattagccccaaattgagcgctgaatcgtgtcccatgagatcaggcgccatctgtaaagtctcctctggaaatgccaatccatccttcccccagctgcttcctcggggaggcccctgcccccaccctgccagcccttcccagtctcattagaggaagctttccaaagttctcagttatcaagacctcatccagctcgtccaaaggcttcagggatggaaacaaaccagctcgtctcagaggccagcaagctggggcctgtccgccacggtgccctgtgcacctttgggctgccctggcccccactctcccgggccgcccaccacaggctcttaatggggccgggtcagtcctacatgtgagatgggttagggcaagtctttgccatcccccagatggctctgtcttcttgtgtatggcagggctgggactgctgtcccttgtacagttttctgtcactggtgggcactggacaggcatagcagactctcttgtggccacactaggttgtcgcctttcaggcagtgtcccgccacctttgcttcccgctccttctggacattccagagccctgcaccaaacccttacttggtgtctgcacctcctttccctctctccatcttccaatccctggaaaagtctggtctgagtgtgacttgggaagctttcagtgctgctgtttggcccagctcattactttctccctttctctaccacagcaaacacattctccaccatgtcagtctaaagagtctaaaggggccgggagaagcatgagcgaggggcagattctagtcgggagcccatgccctggaaatccatctttcttcatctttcccattgaccactttgggtttgacctgcacatctgcagtgagggcagaattcaacaagcacaactcactggtctttcagtcaacgtgctagaaaccgatgacttattaatctctaattttttggcgcctctttcattgaatgagaattgctttcgtatagttcacattagaaaaatgcctaatatactaaagtaaaccaaacgttgtcacttttctcttgttcttgaaacattgcaaccaaaaaggtcagcacaaaggccttcacctacgtgaagacctcctggtaggatctgtccatgggatggagaaccactctgtccagatctggggttgggtcatgacaccagctaccaattttagaatattatttcttggtttctttatgaaaaatgggtgctagtggtaattgctttgtggcttagtaaactactctgtggatgatttccaaacattcaaagccaatagccttgttattaacaagatattttgagtacaatatggctcattgacttttccattacatctgaggattccagagtcctctgttcatccctgggatagagtgagccctcttgcgtcttccagggtagctcaggttggcccagtttgggccagtccatttttggaggtcactctttcccccctcatcccctcacctccttctctttacccccttcacgtacttcctttctttcttccctctgttattcattcatcaagcaggttaaagccattgtgctaagatctaatctgaggacactataatggccctgtcgtcagggaagcccgtgatcgctcgttttcaggggtcttaccggtcagcaaccttggcattgatacataggcactctacagaatttaagttttcagaggtaagtctgttgttctgattaatctgcattcattcagcgaatgctcaagacaagccaggcatgctgagaagcggcgctctagttgtatgtaagatgggcattcctctgctctcctctattctccatgtcgactgagaagagtataataagaacattgtaccctctccacacttaaccctctgggattctttattataatataaaccaccgtcgtgaggcatttacctgttggatggaaggtagacagcaacaagattttaatcacctggtcaccagaccctcacggcccatatccaattcgaatttcagaaatttctctgtttgctttaaataactctttacaaataagggtcgggcacggtggctcacgcctgtaatcccagctctttgggaggccgaggtgggcagatcacgaggtcaggagatcgagaccatcctggctaacatggtgaaaccccgtctctgctaaaaatacaaaaaattagccagatgtggtggtgcacacctgtagtcccaactattcggcaggctgaggcagtagaatcgcttgaacctgggaggcggagattgcagtgaaccaagatcgggccactgcactccagcttgggtgacagagcaagactccatctcaaaaaaattataaataactctttgcaaataggaaagtgaagctcaagggtaaccagtgaggctatgaaattgccagtgaattaagaccagggctagagtcaacagtccagaacccctatccgtatgaacaggggcccgtttctggttgaaatcaaggttaggatgcaactgagaaaataaaagactgcactttggagaggcaagcacgctatccgggttgttgttttgttttatgtcttggtgcttaggtgaggacttagctgggtttattcaaagtgggcgggtctgggctattcttgagaatgtcccttccatttctgagaacaagtcagccccttctacctgcctccacccaggagactgatgcacaagatctgtttgtgaaagcctgatttaaaaagaaaaaaaaaattccttaagccaaatggtgttccaagttggttgctgtgacaacctccaggaagagccacttgttaccctctattctttctagtgctttcagtcagtggcaacacataggccccttggaccgtggggatggcggccctgagattctgtcagtgggaccaccctgggcctcctttctacctccactcagcaccctgttggccaaggagaatttctgcggtgggaggcagtgctctgctagtcaggattgataaacagctgggcacaccgaaacagtgtaccaacgaattcaccaaccaggggtttctttccctaccctttgtgaaaaccaatcaattactagatgagtggatggatgcagaaaaatctgggctgagccaaagtcccttttggaaatacaagccataacattcgaaggacatcagcgaccttggcttgtttaggtgattttacttccagctgcaggtagtcttgacaaggagtgtttaaacagaaggctcaagatgcattccttgtgtaggtcggagagagcacttctaatgttaagtggggtacagatcagctgcccccccacgtagcctggacatcgtcttatccccataatccttgccatccctacaaggcccatcgccaccaccttttcccaggtttattgaggtatgattgacatccagtaaaattcaccctttggaaatatacagctctgtgaattttgacaaatttagtgtcttgtgaccatcaccaagatcaacctgtttttaaccctccaaaaaattcccttctcctgccctctttccctggcaaccctgattgattatctgatcctataattttgccttttctagaatgtcatataaatggagtcacactgatgtcgccttttgagtctggcatctttccctcagcttaatgcttttgagtcattcatgatgtgtgcgtgtggtttgttccttctccttgccgggaagtatttcattgcatgggcgtactactctgcttctttatttttacactgagcctttcgccctggaagttcttggcccagggtcttcaacttgtttgcacgaccacttccagcttgctgcttccttcagttccccaggctcctcctccaaatgccagctgtgcccacaagctgttcttagggctcacactcgccttttggcgcgtggtgggtttttggtagtgcagaaagaatccagggatgggaggggaagggacggatgggtgctcaattgctgctcacgtctgctgcaacctgaagcttgcatctcagccagcagatctgctcccttctgggacccaggcttcagtgtcacacggtccttggctatgtattgggcgttggaggctttgaaaggcgagcagaagcagcatggacaagaaggctggggctggccctggggctcatcatgatgctttcctggatctgttgcttcatctgcaagctgagggtgtttgttctagatgagtgtctcaggccaccggcaactgcatgtacctcctccctttctcatttccaatgatgtaccctgtacacgtgttcatgctgtgtctggctctcatctgcacaatcgtgcatagaattgcctcaagtcctggtgagagagatgccgtggtacttttccatttagattcaaatggagctaaaattaagagttttatgagctgttaagaatgaggtagtttctcctaggaccccccaaagacagtgcaagtaatgaccgtttggatctcattcgtcgatctttgatagtatgttctggagtctactccccaggagccaggacaggcgtgaagatggagtccttgtcgcagctggagccttgcctagctggtgatcacacagcctggcctgtacctgcaccccactggatggtggtacatggtggcagggacaggaccacacccagttaaggccagaccaggctgagtgtgacccctgaggtaaacactccactaagctgtgtcttgttcatgccccctgctcagtgaaaggtgagtcccgagaccagttgggtacctctctatgcgaaccagagacatttctggatccaggccaggtgaagattagggccaggaagcctgagcccccggggcctcaaggtagggagccgaagaggctgccaggactctgctgggttgaaatttgccggggaggactcttgtctccccctcaggagtatttttgttgaggctttcctggaggtgaagaagcaattcccattgcagcaggttagagcgagaatcagacagagggcaaaaaccaattcgcttctccccacgttctaaatgctggggcatggctgtcaggagggcttcctgggaggtgtctctgggggtggggtgaggttggggcgatggcctttggagattgcgtgtggtgttcaggactgttccttggtgtttgagggaaactttagtgggattgcagtggaatgtaaggtcagggcacgtgggtgctctctcggggtggggtgactgggagacctagagggaaagcctgctatgcagggggagagcacaggactggccctgctctgcggcctcctttgtcccataacctgaagttaagtcacatcccctgtcgggacctccgtgcactcatctgtcaagtgggggcgcttcccttccagcatcacctgcagcagacgggctctcgggagtcgtgggttccaggcagctgtgtggacccagggacagacattcaaagggacgccagccatccttagtgacaggggccccaacttagcatcccttcccttccgttaggaaggagatgaccggaagcaaccccttcacagacacgagcacatcggcaaaccctatgaaagtggaattttctaacaaaataaacttgcttgtttgatctgttttctgtaacttttgctaaatactttatacatttttcatgttaaagagccgtgtctcccgccagcactcctcaccccggtatgaatgtgtttcctccacattgtatatccttccaccctctggctgcctagatcagtaaataaaattgatgtaatataatttataagtaacactgttgaaaccctgatcccagtggaggctgtaacccacctgcccccgcaccacccccctgacccctgttaccgcatttgtgtgtattaatgctgaagaattaaatgtttaaagagtttaaattttgaaggcgtttgctatatacagttgtcctgcattattataaagagttttcaggaagtt

SEQ ID NO: 139774 - DNA, 1010 bp, Artificial Sequence
  derived and/or modified sequence
cacttctctcctggtgaacaagtggaaggaggatggctgggatgatgcagaagccgttttttcagggcaggaggggaagataaactgtgtgacgttccctcacccagacacgatgccggaacagcagctgctgaaaccaaccgagtggagctactgcgactacttctgggctgataagaaggacccccaaggcaacggcaccgtggctgggtttgaactactgctccagaaacagctgaagggcaaacaaatgcagaaggaaatgtcagaattcatccgggaaaggataaagattgaagaagactatgcgaagaacttagctaagctctctcagaactccttggcttcacaggaggaaggctccttgggagaggcgtgggcccaggtgaagaagagcctggcggacgaagcagaagttcacctcaagttctctgccaagcttcacagcgaggtggagaagcccctgatgaacttccgtgagaacttcaagaaagacatgaagaagtgcgaccaccacattgccgaccttcgcaagcagctcgccagccgctatgcctcggtggagaaggcccggaaagccctcacagagcggcagagagacctggagatgaagacccagcagctggagatcaagctgagcaacaagacagaggaggacatcaagaaggcgcggagaaagtccacacaggctggagacgacctcatgcgctgtgtggatctctacaaccaggcccagtccaaatggtttgaagagatggtgaccaccacattggagctagagcggctggaggtggagagggtagagatgatccggcagcacctgtgccagtacacgcagctgcggcatgaaacagacatgttcaaccaaagcacagtcgagcccgtggatcagctgcttcgaaaagtggacccggccaaagacagggagctgtgggtcagagagcacaagacgggcaacatccgccctgtggacatggagatctagatgggcctgtgcagcttcggggggt

SEQ ID NO: 139775 - DNA, 2417 bp, Artificial Sequence
  derived and/or modified sequence
aattcgccttcagcccgagagctgggcgtgggaacagcgtggggtcagggagacccctgcttgccctggcccagaatatggtgacttaggattcagactgagcatccctgattccccagcgcctccaccctcagggaacctgaatggggggaaaaaatgtccaatatggagaacagctttgacgatgtttcttgcctctctccccagaacctgggatcctcatcgccaagcaaaaagcagagcaaggaaaacaccatcacaataaactgtgtgacgttccctcacccagacacgatgccggaacagcagctgctgaaaccaaccgagtggagctactgcgactacttctgggctgataagaaggacccccaaggcaacggcaccgtggctgggtttgaactactgctccagaaacagctgaagggcaaacaaatgcagaaggaaatgtcagaattcatccgggaaaggataaagattgaagaagactatgcgaagaacttagctaagctctctcagaactccttggcttcacaggaggaaggctccttgggagaggcgtgggcccaggtgaagaagagcctggcggacgaagcagaagttcacctcaagttctctgccaagcttcacagcgaggtggagaagcccctgatgaacttccgtgagaacttcaagaaagacatgaagaagtgcgaccaccacattgccgaccttcgcaagcagctcgccagccgctatgcctcggtggagaaggcccggaaagccctcacagagcggcagagagacctggagatgaagacccagcagctggagatcaagctgagcaacaagacagaggaggacatcaagaaggcgcggagaaagtccacacaggctggagacgacctcatgcgctgtgtggatctctacaaccaggcccagtccaaatggtttgaagagatggtgaccaccacattggagctagagcggctggaggtggagagggtagagatgatccggcagcacctgtgccagtacacgcagctgcggcatgaaacagacatgttcaaccaaagcacagtcgagcccgtggatcagctgcttcgaaaagtggacccggccaaagacagggagctgtgggtcagagagcacaagacgggcaacatccgccctgtggacatggagatctagatgggcctgtgcagcttcggggggtcctgctggggaggggggctgggctcccaccatggggcccatgccgagtggatgccccccaccctctctcctgggccactgaggagaggggagagagctggtgattccagaagggtgacccggacagcctagctgggggctcccccatattcccaggcccagaagacagacccacagccctgcccttgtctctgaggctgaagaccccctgactcccatgctgtgcttgccgctctgaaacaaacagaggctggaactttgtggtccttgccgagttttgtaggggtcactgtcacatgcttgtgccctggaagccccaaggctcttcctccagctggctcccttgtctccagggctttggaggatcagggtagggagggctctgtctctaagccaggtgtcaggatcagaatcatgggtagaaggtgccattcagctcacagccgcacccagaatcctttgcagccctccttctttatttttttcccattgcattctgggagtccacatctggctttctcagccactgttcatcaccaggggttttaggaggaaggcttggctcctgtcttcccagacccaccatgcctggagaggtcaggatggaactacctcattcggcaaattagccccaaattgagcgctgaatcgtgtcccatgagatcaggcgccatctgtaaagtctcctctggaaatgccaatccatccttcccccagctgcttcctcggggaggcccctgcccccaccctgccagcccttcccagtctcattagaggaagctttccaaagttctcagttatcaagacctcatccagctcgtccaaaggcttcagggatggaaacaaaccagctcgtctcagaggccagcaagctggggcctgtccgccacggtgccctgtgcacctttgggctgccctggcccccactctcccgggccgcccaccacaggctcttaatggggccgggtcagtcctacatgtgagatgggttagggcaagtctttgccatcccccagatggctctgtcttcttgtgtatggcagggctgggactgctgtcccttgtacagttttctgtcactggtgggcactggacaggcatagcagactctcttgtggccacactaggttgtcgcctttcaggcagtgtcccgccacctttgcttcccgctccttctggacattccagagccctgcaccaaacccttacttggtgtctgcacctcc

SEQ ID NO: 139776 - DNA, 1011 bp, Artificial Sequence
  derived and/or modified sequence
atgagcaacatggagaacagctttgatgatgtgtcctgcctgagcccccagaacctgggcagcagcagccccagcaagaagcagagcaaagaaaacaccatcaccatcaactgtgtgaccttcccccacccagacaccatgcctgagcagcagctgctgaagcccacagagtggagctactgtgactacttctgggccgacaagaaggacccccagggcaatggcaccgtggccggctttgagctgctgctgcagaagcagctgaagggcaagcagatgcagaaggagatgtctgagttcatccgggagcgcatcaagattgaagaagattatgccaagaacctggccaagctgagccagaacagcctggccagccaggaggagggcagcctgggggaggcctgggcccaggtgaagaagagcctggctgatgaggccgaggtgcacctgaagttcagcgccaagctgcacagcgaggtggagaagcccctgatgaacttccgggagaacttcaagaaggacatgaagaagtgtgaccaccacatcgctgacctgaggaagcagctggccagccgctatgcctctgtggagaaggccaggaaggccctgacagagcggcagagggacctggagatgaagacccagcagctggagatcaagctgagcaacaagacagaggaggacatcaagaaggcccggaggaagagcacccaggccggagatgacctgatgagatgtgtggacctgtacaaccaggcccagagcaagtggtttgaggagatggtgaccaccaccctggagctggagcggctggaggtggagcgggtggagatgatccggcagcacctgtgccagtacacccagctgcggcatgaaacagacatgttcaaccagagcacagtggagcctgtggaccagctgctgaggaaggtggaccctgccaaggaccgggagctgtgggtgcgggagcacaagacaggcaacatccggcctgtggacatggagatctag

SEQ ID NO: 139777 - DNA, 873 bp, Artificial Sequence
  derived and/or modified sequence
atgcctgagcagcagctgctgaagcccacagagtggagctactgtgactacttctgggccgacaagaaggacccccagggcaatggcaccgtggccggctttgagctgctgctgcagaagcagctgaagggcaagcagatgcagaaggagatgtctgagttcatccgggagcgcatcaagattgaagaagattatgccaagaacctggccaagctgagccagaacagcctggccagccaggaggagggcagcctgggggaggcctgggcccaggtgaagaagagcctggctgatgaggccgaggtgcacctgaagttcagcgccaagctgcacagcgaggtggagaagcccctgatgaacttccgggagaacttcaagaaggacatgaagaagtgtgaccaccacatcgctgacctgaggaagcagctggccagccgctatgcctctgtggagaaggccaggaaggccctgacagagcggcagagggacctggagatgaagacccagcagctggagatcaagctgagcaacaagacagaggaggacatcaagaaggcccggaggaagagcacccaggccggagatgacctgatgagatgtgtggacctgtacaaccaggcccagagcaagtggtttgaggagatggtgaccaccaccctggagctggagcggctggaggtggagcgggtggagatgatccggcagcacctgtgccagtacacccagctgcggcatgaaacagacatgttcaaccagagcacagtggagcctgtggaccagctgctgaggaaggtggaccctgccaaggaccgggagctgtgggtgcgggagcacaagacaggcaacatccggcctgtggacatggagatctag

SEQ ID NO: 139778 - DNA, 378 bp, Artificial Sequence
  derived and/or modified sequence
atgaagacccagcagctggagatcaagctgagcaacaagacagaggaggacatcaagaaggcccggaggaagagcacccaggccggagatgacctgatgagatgtgtggacctgtacaaccaggcccagagcaagtggtttgaggagatggtgaccaccaccctggagctggagcggctggaggtggagcgggtggagatgatccggcagcacctgtgccagtacacccagctgcggcatgaaacagacatgttcaaccagagcacagtggagcctgtggaccagctgctgaggaaggtggaccctgccaaggaccgggagctgtgggtgcgggagcacaagacaggcaacatccggcctgtggacatggagatctag

SEQ ID NO: 139779 - DNA, 1011 bp, Artificial Sequence
  derived and/or modified sequence
atgagcaacatggagaacagcttcgacgacgtgagctgcctgagccctcaaaacctgggatcctcatcacccagcaaaaaacaatctaaggagaacacgataaccatcaattgtgtaacattcccccacccagacaccatgcccgagcagcagctgttaaagccgacagaatggagttattgtgattacttttgggcagataaaaaggacccccaagggaacggcacggtggccggatttgaactgctgcttcagaagcaactcaaagggaagcagatgcaaaaggagatgtctgagttcattcgggaaagaattaagatcgaagaggactacgctaagaatctcgcaaagctttcacagaactccttagcttcccaggaggaagggtctctcggagaagcctgggcacaggtaaagaaatccctggcagatgaggcagaggtccacctcaagttttctgctaagctgcattccgaagtggaaaagccgctgatgaactttagggaaaacttcaaaaaagatatgaagaaatgcgaccatcacatagccgacctcaggaagcaactcgcatcgaggtacgccagcgtcgaaaaggcaaggaaagccttgacggagaggcagcgagatctggaaatgaaaacccagcagctggaaattaagctctctaataaaacggaagaggatatcaaaaaggctaggcggaaatctacacaggccggggacgacctgatgaggtgtgtggatttatataaccaagctcagagcaaatggtttgaagagatggtgacaacaacccttgagctggagagacttgaagtggaaagagtcgagatgatacgccagcacttatgtcaatacactcagttacgccacgagacagacatgttcaatcagtctaccgtagaacccgtcgatcaattattgaggaaggtggatcccgctaaggacagagagctctgggtccgagagcataagacgggaaacattcggccggttgacatggagatatag

SEQ ID NO: 139780 - DNA, 873 bp, Artificial Sequence
  derived and/or modified sequence
atgcccgagcagcagctgctgaagcccaccgagtggagctactgcgattatttctgggccgataaaaaggacccacagggaaatggcacagtcgccggcttcgagctgctcttgcagaagcagcttaaaggcaagcagatgcagaaagagatgtctgagttcattagggagcgtattaagatagaggaagactatgccaaaaacttggcaaaattgagccagaatagcttggcttctcaggaggaaggctctctcggcgaggcatgggcccaggttaagaaaagtctagctgacgaggccgaggtccacttaaaatttagcgcaaaactccattcagaggtcgagaagccactgatgaattttcgggagaatttcaagaaagacatgaagaaatgcgatcaccacattgctgatctaagaaaacagcttgcctcacggtatgcgagtgtggaaaaagcgcggaaggcattgaccgagaggcagcgagatctcgagatgaaaactcagcaactggagattaagctgagcaacaagacagaagaagatattaagaaagcgaggcggaaaagcacccaggccggcgacgatctgatgagatgtgtcgacttgtataatcaggctcaaagcaaatggtttgaagagatggtaactaccacccttgaattagaacgcctcgaggtcgagcgggtggaaatgatccgccagcacctctgtcaatatacccagttgcgacatgaaacagacatgtttaatcaaagcacagtcgaacctgtggaccagttgttgaggaaagtggatccagccaaggatcgggaactgtgggtccgggaacacaagacaggaaatatcagaccagttgatatggagatctag

SEQ ID NO: 139781 - DNA, 378 bp, Artificial Sequence
  derived and/or modified sequence
atgaagacccagcagctggagatcaagctgagcaacaagaccgaggaagatatcaaaaaggcccggcgaaagagcactcaggcaggtgacgatctgatgcgctgcgtcgacctctacaatcaggcacagtcaaaatggtttgaggagatggttactacaacacttgagttggaacgtctggaagtggaacgtgtagaaatgattaggcagcatctgtgtcagtatacacagctacgccacgagaccgacatgttcaaccagtcaactgtcgaaccagtcgatcagcttctacgaaaggtcgaccccgcgaaggaccgcgaactgtgggttcgtgaacacaagactggtaatattcggccagtagacatggagatctag

SEQ ID NO: 139782 - DNA, 1011 bp, Artificial Sequence
  derived and/or modified sequence
atgagcaacatggagaacagcttcgacgacgtgagctgcctgagccctcagaacttgggttcaagttctccttccaagaaacagtccaaagagaacactatcaccataaattgcgtcacctttccccaccccgataccatgcctgagcagcagctactgaagcccactgagtggagctactgcgactatttctgggctgataaaaaagatccgcaggggaacggaacagttgctggattcgaactactgcttcagaagcagctcaaaggcaaacagatgcaaaaagaaatgagtgagttcataagagaacgcattaagatcgaagaggactatgcaaagaaccttgcaaagttgagccagaacagtttggcctcacaggaggagggctccctcggcgaggcctgggcacaagttaagaagtcattggcagacgaggcggaagtgcaccttaaattttctgcgaaactgcacagcgaagtggagaagcctctaatgaatttcagagagaatttcaagaaagatatgaagaaatgtgatcaccatatagccgatcttaggaagcagctcgcttcccgctatgcatccgtggagaaagccaggaaggcccttaccgaacggcaacgggatttagagatgaagactcagcaactcgagatcaaactatcaaataagacagaagaggacattaagaaagctagacgtaagtccacacaggcaggcgatgaccttatgcgctgtgtggacctctacaaccaagcccagtcaaagtggttcgaggaaatggtcaccactaccttggagttagagcggctggaagtggaaagagtagaaatgatccgccagcacctctgccagtacacgcagctgcgacatgaaaccgatatgttcaatcagtcgacagtcgaacctgtggaccagctgctgcgcaaagtggatcccgccaaagaccgggagctttgggttcgggagcacaaaactggcaacattcgccccgtagacatggaaatctag

SEQ ID NO: 139783 - DNA, 1011 bp, Artificial Sequence
  derived and/or modified sequence
atgtctaatatggagaattccttcgacgacgtatcctgcctgtctccccagaacctgggctcctcgtccccgtcaaagaagcagagcaaggagaacaccattacgatcaattgtgtgacatttccacatcctgacacgatgcccgaacagcagctgttaaaaccaaccgagtggtcctattgcgactatttctgggccgacaaaaaggatccacagggtaacggcacagtggcaggcttcgagctgttgctccagaagcagctcaaagggaagcagatgcagaaagagatgtcagaattcattagggaacggatcaagattgaggaggactacgccaagaacctcgctaaactctctcagaattccctagccagccaagaggagggttccttgggcgaggcgtgggcccaggtaaagaaaagccttgcagatgaggccgaggtgcacttgaaattttccgcgaagctccattcagaggtagagaaaccactcatgaattttagggagaactttaaaaaggatatgaaaaagtgcgatcaccatatcgctgaccttcggaaacagttagcgagcaggtacgcctcagttgaaaaggcacgcaaagccctgaccgagaggcagcgagatttggaaatgaagacacaacagctcgaaatcaagctgagcaacaaaactgaggaagacattaagaaggcacgccgtaagagcacacaagccggtgacgacctgatgcgatgcgtcgacctttataaccaggcgcagagtaagtggtttgaggagatggtcactacaaccctcgagttggaacgcctagaggtcgagcgggtcgaaatgattaggcagcatctctgtcagtacacacagctacgccatgaaaccgatatgttcaatcaatctactgtagaacctgtcgatcagctgctgagaaaggtggacccagccaaagaccgcgaactatgggtgcgagaacacaagaccggtaacattagacctgttgatatggagatctag

SEQ ID NO: 139784 - DNA, 873 bp, Artificial Sequence
  derived and/or modified sequence
atgcccgagcaacagcttctgaagcctaccgaatggagttattgcgattacttctgggccgataagaaagaccctcagggaaatggcacggtcgcaggattcgaattgctccttcagaagcagctgaaaggaaaacagatgcagaaggaaatgtcggaattcatcagggagaggatcaagattgaggaggattatgccaagaacctggccaagctgtcccaaaattctctcgcttctcaggaagagggaagtctgggggaagcctgggcacaggtgaaaaagtctctggcagacgaggctgaagtgcatctgaagttttccgcaaaacttcactctgaggttgaaaagcccttgatgaatttccgggaaaatttcaagaaagatatgaaaaagtgcgaccaccatatcgccgacttacgcaagcagctggcgtccaggtatgcctccgtggagaaggccagaaaagcccttactgaaaggcagagggatctggagatgaaaacccagcagctcgaaattaagctgagcaacaagacagaggaagatattaaaaaagccaggcgtaaatctacacaagccggagatgacctgatgcgctgcgtggacctgtacaaccaggcacaaagcaaatggttcgaagagatggttaccaccaccctcgagctcgagcggttggaggtcgagcgcgtggaaatgatccgccaacatctgtgccagtacacacagttgagacacgagaccgacatgttcaatcagtccaccgttgagcccgtggatcagctgttgagaaaggtggatcccgcaaaggatcgagagctgtgggtgcgcgagcacaaaacagggaacataagacccgtggatatggaaatttag

SEQ ID NO: 139785 - DNA, 378 bp, Artificial Sequence
  derived and/or modified sequence
atgaagacacagcaactggagattaagctaagcaacaagaccgaagaggacatcaaaaaagcacgtagaaagtcaacacaagcgggtgacgatcttatgcgttgtgtagacctttacaatcaagctcagtccaaatggttcgaagagatggtaaccacaacattggagcttgaaagacttgaggttgaacgggttgaaatgataagacagcatttgtgccagtacactcagctgcgccacgaaacggacatgttcaaccaaagcaccgtagagcccgttgatcaattgcttcgaaaagtcgatccagcgaaggaccgagagttgtgggttagggagcataagacaggaaacattcgcccagtggacatggaaatctag

SEQ ID NO: 139786 - DNA, 1011 bp, Artificial Sequence
  derived and/or modified sequence
atgtcgaatatggagaattcttttgatgatgtgagttgtctgtctccccagaatctcggaagcagtagtcctagcaagaaacaaagcaaagagaacacaatcacaatcaactgcgtgacatttccacaccctgacaccatgcctgagcagcaattacttaaaccaaccgaatggtcatactgcgactacttttgggccgataagaaagacccacaggggaatggcaccgtggcgggtttcgaactgctcctgcagaagcagctcaagggcaagcagatgcaaaaagagatgagcgaattcattagagaacgtattaagattgaagaggactacgctaagaaccttgcaaagctgtcccagaacagtctggccagccaggaggagggctccctgggagaggcctgggctcaggttaagaaaagtctcgccgatgaggctgaggtccatctgaagttcagtgcaaaactgcatagtgaagtggagaagccattgatgaacttccgcgagaacttcaagaaggacatgaagaaatgcgaccaccatatcgcggacctgagaaaacaattggcctcccggtacgctagcgtagagaaggcacgaaaagcgttgaccgaaagacagagagatctcgagatgaaaacccaacagctcgaaatcaagttgagcaataaaacagaagaagacattaagaaagccaggcgcaaatcgacccaggctggcgacgacctcatgcgctgcgtcgatttatacaaccaagcccagagcaaatggttcgaggagatggtaacaacaacactagagctagaaagactagaagttgagagagtagagatgatcagacagcacctgtgccagtatactcagttacgacacgagactgacatgtttaaccaatccaccgttgagcctgtggatcagttgcttaggaaggtggatcctgccaaagacagagaattgtgggtgcgcgagcacaagacaggtaacataagaccagtcgatatggaaatttag

SEQ ID NO: 139787 - DNA, 1011 bp, Artificial Sequence
  derived and/or modified sequence
atgagcaacatggagaacagcttcgacgacgtgagctgcctgagcccccagaacctgggcagcagcagccccagcaagaagcagagcaaggagaacaccatcaccatcaactgcgtgaccttcccccaccccgacaccatgcccgagcagcagctgctgaagcccaccgagtggagctactgcgactacttctgggccgacaagaaggacccccagggcaacggcaccgtggccggcttcgagctgctgctgcagaagcagctgaagggcaagcagatgcagaaggagatgagcgagttcatcagagagagaatcaagatcgaggaggactacgccaagaacctggccaagctgagccagaacagcctggccagccaggaggagggcagcctgggcgaggcctgggcccaggtgaagaagagcctggccgacgaggccgaggtgcacctgaagttcagcgccaagctgcacagcgaggtggagaagcccctgatgaacttcagagagaacttcaagaaggacatgaagaagtgcgaccaccacatcgccgacctgagaaagcagctggccagcagatacgccagcgtggagaaggccagaaaggccctgaccgagagacagagagacctggagatgaagacccagcagctggagatcaagctgagcaacaagaccgaggaggacatcaagaaggccagaagaaagagcacccaggccggcgacgacctgatgagatgcgtggacctgtacaaccaggcccagagcaagtggttcgaggagatggtgaccaccaccctggagctggagagactggaggtggagagagtggagatgatcagacagcacctgtgccagtacacccagctgagacacgagaccgacatgttcaaccagagcaccgtggagcccgtggaccagctgctgagaaaggtggaccccgccaaggacagagagctgtgggtgagagagcacaagaccggcaacatcagacccgtggacatggagatctag

SEQ ID NO: 139788 - DNA, 873 bp, Artificial Sequence
  derived and/or modified sequence
atgcccgagcagcagctgctgaagcccaccgagtggagctactgcgactacttctgggccgacaagaaggacccccagggcaacggcaccgtggccggcttcgagctgctgctgcagaagcagctgaagggcaagcagatgcagaaggagatgagcgagttcatcagagagagaatcaagatcgaggaggactacgccaagaacctggccaagctgagccagaacagcctggccagccaggaggagggcagcctgggcgaggcctgggcccaggtgaagaagagcctggccgacgaggccgaggtgcacctgaagttcagcgccaagctgcacagcgaggtggagaagcccctgatgaacttcagagagaacttcaagaaggacatgaagaagtgcgaccaccacatcgccgacctgagaaagcagctggccagcagatacgccagcgtggagaaggccagaaaggccctgaccgagagacagagagacctggagatgaagacccagcagctggagatcaagctgagcaacaagaccgaggaggacatcaagaaggccagaagaaagagcacccaggccggcgacgacctgatgagatgcgtggacctgtacaaccaggcccagagcaagtggttcgaggagatggtgaccaccaccctggagctggagagactggaggtggagagagtggagatgatcagacagcacctgtgccagtacacccagctgagacacgagaccgacatgttcaaccagagcaccgtggagcccgtggaccagctgctgagaaaggtggaccccgccaaggacagagagctgtgggtgagagagcacaagaccggcaacatcagacccgtggacatggagatctag

SEQ ID NO: 139789 - DNA, 378 bp, Artificial Sequence
  derived and/or modified sequence
atgaagacccagcagctggagatcaagctgagcaacaagaccgaggaggacatcaagaaggccagaagaaagagcacccaggccggcgacgacctgatgagatgcgtggacctgtacaaccaggcccagagcaagtggttcgaggagatggtgaccaccaccctggagctggagagactggaggtggagagagtggagatgatcagacagcacctgtgccagtacacccagctgagacacgagaccgacatgttcaaccagagcaccgtggagcccgtggaccagctgctgagaaaggtggaccccgccaaggacagagagctgtgggtgagagagcacaagaccggcaacatcagacccgtggacatggagatctag

SEQ ID NO: 139790 - protein, 620 aa, Artificial Sequence
  derived and/or modified sequence
MLSAIYTVLAGLLFLPLLVNLCCPYFFQDIGYFLKVAAVGRRVRSYGKRRPARTILRAFLEKARQTPHKPFLLFRDETLTYAQVDRRSNQVARALHDHLGLRQGDCVALLMGNEPAYVWLWLGLVKLGCAMACLNYNIRAKSLLHCFQCCGAKVLLVSPELQAAVEEILPSLKKDDVSIYYVSRTSNTDGIDSFLDKVDEVSTEPIPESWRSEVTFSTPALYIYTSGTTGLPKAAMITHQRIWYGTGLTFVSGLKADDVIYITLPFYHSAALLIGIHGCIVAGATLALRTKFSASQFWDDCRKYNVTVIQYIGELLRYLCNSPQKPNDRDHKVRLALGNGLRGDVWRQFVKRFGDICIYEFYAATEGNIGFMNYARKVGAVGRVNYLQKKIITYDLIKYDVEKDEPVRDENGYCVRVPKGEVGLLVCKITQLTPFNGYAGAKAQTEKKKLRDVFKKGDLYFNSGDLLMVDHENFIYFHDRVGDTFRWKGENVATTEVADTVGLVDFVQEVNVYGVHVPDHEGRIGMASIKMKENHEFDGKKLFQHIADYLPSYARPRFLRIQDTIEITGTFKHRKMTLVEEGFNPAVIKDALYFLDDTAKMYVPMTEDIYNAISAKTLKL

SEQ ID NO: 139791 - DNA, 1863 bp, Artificial Sequence
  derived and/or modified sequence
atgttaagtgccatttataccgttttggccggtttgctgtttctgccgctgctggtaaatctatgttgtccctatttcttccaagacataggctatttcctcaaagtggccgcagtgggacggcgtgtccgaagttacggcaagcgtcgacctgccagaaccattctgcgggcctttcttgaaaaagcccggcagacccctcacaaacctttcctcctgttcagggatgagacactcacctatgcccaggtcgatcggcgtagcaaccaggtggctagggctctacacgaccatctgggcctgagacaaggcgattgcgtggctttgcttatgggaaatgagcctgcgtacgtgtggctgtggctggggctggttaaactgggatgcgccatggcctgtcttaactacaacatccgcgccaagtcactgctgcactgttttcagtgctgcggagccaaagtcctgttggtgtctcctgagttgcaggccgccgttgaggagatactcccctcactcaaaaaggacgatgtgtccatttactacgtaagtcggacatccaacactgacggaatagactccttcttggacaaggtggatgaagtgtccaccgagcccatccctgaatcttggcggtccgaggtgaccttctctacacccgccctgtacatctataccagcgggacaactggactgcctaaggctgccatgatcacacaccagagaatctggtatggaactgggctgactttcgtcagtggcctaaaagccgacgacgttatttatattacactgcccttttaccattccgccgccctgctcatcggcatccatgggtgtattgtcgctggcgctactctggcgctaagaactaaattctccgccagtcagttttgggacgactgtcggaagtataacgtaacagtcatacaatacattggggaattgctgcgatatctgtgcaactctccccagaagcccaacgatcgagatcacaaggtcaggcttgcactggggaacgggctgcgaggcgacgtgtggcgccagttcgtgaaacgctttggcgatatctgcatttatgaattttatgcagccaccgagggtaatatcggattcatgaattatgccagaaaagtgggggctgtgggcagagttaactacttacaaaagaagatcatcacgtatgatctgattaaatatgacgtggagaaagacgagcctgtcagagatgaaaacggctattgcgtgcgtgttccaaaaggggaagtggggttattggtgtgtaagatcacacagctcacacctttcaatggatatgcaggagccaaggcccagaccgagaaaaagaagctacgcgacgttttcaagaagggtgacctctactttaattctggagatctcctgatggtcgaccatgagaactttatttacttccacgatcgtgtgggcgacacatttaggtggaagggtgagaatgtagccactacagaggtggccgatacagtgggcctggtggactttgttcaagaagttaatgtttatggcgtccacgtgcctgaccacgaaggtaggatcggcatggctagtatcaagatgaaggagaatcatgagttcgatggaaagaaattattccagcacatcgcagactaccttccaagttacgcaagaccgcgctttctgaggattcaggacacaatagagataacggggacatttaaacaccgcaagatgacactcgtggaagagggcttcaatcccgccgtcatcaaagacgccctctacttcctcgacgacacggctaagatgtacgtgcctatgacagaagatatatataacgcgattagcgctaagaccctcaaactatag

SEQ ID NO: 139792 - DNA, 1863 bp, Artificial Sequence
  derived and/or modified sequence
atgctgagcgccatctacacagtgctggccggcctgctcttcctgcccctgctggtgaacctgtgctgcccctacttcttccaggacatcggctacttcctgaaggtggccgctgtgggcagaagagtgcgctcctatggcaagagaagacctgcccggaccatcctgcgggccttcctggagaaggcccggcagaccccccacaagcccttcctgctcttcagagatgagaccctgacctacgcccaggtggaccggcgcagcaaccaggtggcccgggccctgcatgaccacctgggcctgcggcagggcgactgtgtggccctgctgatgggaaatgaaccagcctacgtgtggctgtggctgggcctggtgaagctgggctgtgccatggcctgcctgaactacaacatccgggccaagagcctgctgcactgcttccagtgctgcggggccaaggtgctgctggtgtccccagagctgcaggccgctgtggaggagatcctgcccagcctgaagaaggatgatgtgtccatctactacgtgtccaggaccagcaacacagatggcatcgacagcttcctggacaaggtggatgaggtgtccacagagcccatccctgagagctggaggtctgaggtgaccttcagcaccccagccctgtacatctacaccagcggcaccaccggcctgcccaaggccgccatgatcacccaccagaggatctggtacggcaccggcctgacctttgtgtctggcctgaaggcagatgatgtgatctacatcaccctgcccttctaccacagcgctgccctgctgattggcatccacggctgcatcgtggccggggccaccctggccctgcggaccaagttcagcgccagccagttctgggatgactgcaggaagtacaacgtgaccgtcatccagtacatcggggagctgctgcgctacctgtgcaacagcccccagaagcccaatgaccgggaccacaaggtgcggctggccctgggcaatggcctgcggggagatgtgtggaggcagtttgtgaagagatttggagacatctgcatctatgagttctatgctgccacagagggcaacatcggcttcatgaactatgccaggaaggtgggcgctgtgggccgggtgaactacctgcagaagaagatcatcacctatgacctgatcaagtatgatgtggagaaggatgagcctgtgagagatgaaaatggctactgtgtgcgggtgcccaagggggaggtgggcctgctggtgtgcaagatcacccagctgacccccttcaacggctacgccggggccaaggcccagacagagaagaagaagctgagagatgtgttcaagaagggggacctgtacttcaacagcggggacctgctgatggtggaccacgagaacttcatctacttccatgacagagtgggggacaccttccgctggaagggggagaatgtggccaccacagaggtggccgacacagtgggcctggtggactttgtgcaggaggtgaatgtgtatggagtgcacgtgcctgaccacgagggccgcatcggcatggccagcatcaagatgaaggaaaatcatgaatttgatggcaagaagctgttccagcacatcgctgactacctgcccagctatgcccggccccgcttcctgcgcatccaggacaccatcgagatcaccggcaccttcaagcacaggaagatgaccctggtggaggagggcttcaacccagctgtgatcaaggatgccctgtacttcctggatgacacagccaagatgtatgtgcccatgacagaggacatctacaatgccatcagcgccaagaccctgaagctgtag

SEQ ID NO: 139793 - DNA, 1863 bp, Artificial Sequence
  derived and/or modified sequence
atgctgagcgccatctacaccgtgctggccggcctgctgttcctgccactgcttgttaacctgtgttgcccatacttctttcaggacatcgggtacttccttaaagtagcagctgtgggtcgtcgggtgcgatcctatggcaaaagacgaccggcaagaactatcttacgagcatttctcgagaaagcaagacaaacacctcataagcccttcctgctcttccgggatgagactttgacctacgcgcaagtggaccggcgctctaaccaggtggctcgcgcactccacgatcaccttggtttacgacagggggattgtgtcgccctactgatgggaaatgagcccgcatacgtgtggctctggctcggattggtgaaactgggctgtgctatggcctgtctgaattataatattcgggccaaaagcctgttacattgcttccagtgctgcggtgcgaaggttctgctagtctcccccgagctccaggctgcagtcgaggagattctgcccagcctaaagaaagacgacgtttctatttattacgtcagtcgcacctccaatacagatggcattgatagtttcctggacaaggttgacgaggtgagcacagaacctattcctgagagttggcgctctgaagttacattttcaactcctgcactgtacatatatacatcagggaccacaggactgcccaaggcagccatgatcactcatcagagaatttggtacggaaccgggctgaccttcgtgagcgggctaaaggccgacgacgtcatctatatcactctgcccttttaccacagcgcagctctgttgatcggcatccacgggtgtatcgtggctggcgctaccctagctttaaggaccaaattttccgcttctcagttctgggatgactgccggaaatacaatgtcactgtgattcagtatattggtgagcttcttcgatacttatgcaactcccctcagaagccgaatgatcgagatcataaggtgcgcctggccttgggcaacggcttgaggggggacgtctggcggcagttcgtcaaaagattcggggatatctgcatctacgagttttacgccgcgactgaaggaaatataggttttatgaactatgcccgtaaggtcggggccgtcgggcgcgtcaattacctccagaaaaagatcatcacatatgatctgattaagtacgatgtcgaaaaggatgagcccgtgagggacgagaacgggtactgcgtgagagtccctaagggagaggttggacttctcgtttgtaaaatcacacaactgactcccttcaatggttacgcaggggcaaaagctcagaccgaaaagaagaaacttcgggacgtcttcaaaaaaggggacctctattttaatagcggtgatctgctgatggtggaccacgagaacttcatatacttccacgacagagtcggcgacacatttcgatggaaaggggaaaacgttgcaacaaccgaggtagctgacacagttggtctggttgacttcgtgcaagaagtcaatgtctatggcgttcacgtccccgatcatgaaggacgcatcggcatggcttccatcaagatgaaggagaaccatgagtttgacggaaaaaaattattccagcacatcgccgactatcttcccagttatgctagacctcggttcttgcgaattcaggacactatcgaaattacaggtacatttaagcatcgaaagatgacactggttgaggaaggcttcaatccagccgtaatcaaggacgccctctactttttggacgatacagctaaaatgtacgtccccatgactgaagacatctacaacgctatttcggccaagacactcaagctttag

SEQ ID NO: 139794 - DNA, 1863 bp, Artificial Sequence
  derived and/or modified sequence
atgcttagtgccatttacactgttttagccggtctacttttcctgccactacttgtgaatctgtgctgtccctacttcttccaagacatcggctattttctgaaagtagccgctgtgggacgtcgtgtgagaagttacggcaagaggcgtccagcccgaactatcctcagagccttcctggagaaggcaagacagactccccataagccattcctcctgtttcgagacgagacattgacctatgcccaagtcgaccgcagatccaatcaggtggcgcgtgccttgcacgatcatctgggtttacgccagggcgattgtgtcgctctcctgatgggaaacgaacccgcttacgtctggctgtggttggggctggtgaaattagggtgtgcaatggcctgcctgaattataatattagagctaaatcgctgctgcattgttttcaatgctgtggcgcaaaggtgctcctggtatccccagagttgcaggctgccgtggaggagatcttgcctagcttaaagaaggacgacgtctccatttactacgtgagtaggaccagcaatacagacggaatcgatagctttctggacaaggtcgacgaggtgagtactgagccaatccccgagtcctggcgttcagaggtcacgttctctacacccgctctctacatatacaccagcgggaccacagggctgccaaaggcggctatgataacccaccagcgtatttggtatggtacagggttaacgtttgtctcaggcctgaaggccgacgatgtaatctacatcacactccccttttaccactccgcggcactactgatcggaattcatggctgtattgtggcaggcgcaactttggcgttaaggacaaaattttctgcctctcagttctgggacgactgtcggaagtataatgttacagtcattcagtatatcggtgagctccttaggtatctttgtaattcacctcagaaaccaaacgacagggaccacaaggtacgtctggcactgggtaacggtctccgcggtgacgtctggaggcagttcgtgaagagattcggtgacatttgcatttacgagttctacgcagctaccgaaggcaatattggctttatgaattacgcacgtaaagtgggggcagtggggcgagtgaattatttacagaagaagatcataacctatgacttgattaaatatgacgtcgagaaggacgagcctgtccgcgatgagaatggatactgtgtcagagtgcctaaaggagaggtagggctgttagtctgtaagattactcagctaactccttttaatggatatgcaggcgcaaaagcccagaccgaaaagaaaaagctcagagatgtcttcaagaaaggagacttgtacttcaactcgggggacctccttatggtcgaccacgaaaactttatctactttcacgatcgggtgggggacacattccgctggaaaggcgagaacgtggctacaactgaggtagctgatactgtgggcctagttgattttgtgcaggaggtgaacgtttacggtgtgcacgtacccgatcacgagggacgaatcggaatggcttctattaaaatgaaggagaatcacgagttcgacggcaagaaactgtttcaacatatagctgactacctccccagttatgccaggcctagatttttgcggatccaggatactatcgaaataaccgggacctttaaacacaggaagatgaccttggtggaagaaggcttcaatccagcggtgatcaaggacgctttgtatttcctcgatgatacagccaaaatgtatgttcccatgactgaagacatctataatgccatctcggctaaaacactgaagctgtag

SEQ ID NO: 139795 - DNA, 2394 bp, Artificial Sequence
  derived and/or modified sequence
agtcctgcccggaacccccggcaacgcgcatacgactacacctgctccggagcccgcggcggtacctgcagcggaggagctctgtcttccccttcatctcacgcgagcccggcgtcccgccgcgtgcgccccggcgcagcccgccagtccgcccggagcccgcccagtcgccgcgctgcacgcccggggtgaaccctctgccctcgctgggacagagggccccgcagccgtcatgctttccgccatctacacagtcctggcgggactgctgttcctgccgctcctggtgaacctctgctgcccatacttcttccaggacataggctacttcttgaaggtggccgccgtgggccggagggtgcgcagctacgggaagcggcggccggcgcgcaccatcctgcgggcgttcctggagaaagcgcgccagacgccacacaagccttttctgctcttccgcgacgagactctcacctacgcgcaggtggaccggcgcagcaatcaagtggcccgggcgctgcacgaccacctcggcctgcgccagggagactgcgtggcgctccttatgggtaacgagccggcctacgtgtggctgtggctggggctggtgaagctgggctgtgccatggcgtgcctcaattacaacatccgcgcgaagtccctgctgcactgcttccagtgctgcggggcgaaggtgctgctggtgtcgccagaactacaagcagctgtcgaagagatactgccaagccttaaaaaagatgatgtgtccatctattatgtgagcagaacttctaacacagatgggattgactctttcctggacaaagtggatgaagtatcaactgaacctatcccagagtcatggaggtctgaagtcactttttccactcctgccttatacatttatacttctggaaccacaggtcttccaaaagcagccatgatcactcatcagcgcatatggtatggaactggcctcacttttgtaagcggattgaaggcagatgatgtcatctatatcactctgcccttttaccacagtgctgcactactgattggcattcacggatgtattgtggctggtgctactcttgccttgcggactaaattttcagccagccagttttgggatgactgcagaaaatacaacgtcactgtcattcagtatatcggtgaactgcttcggtatttatgcaactcaccacagaaaccaaatgaccgtgatcataaagtgagactggcactgggaaatggcttacgaggagatgtgtggagacaatttgtcaagagatttggggacatatgcatctatgagttctatgctgccactgaaggcaatattggatttatgaattatgcgagaaaagttggtgctgttggaagagtaaactacctacagaaaaaaatcataacttatgacctgattaaatatgatgtggagaaagatgaacctgtccgtgatgaaaatggatattgcgtcagagttcccaaaggtgaagttggacttctggtttgcaaaatcacacaacttacaccatttaatggctatgctggagcaaaggctcagacagagaagaaaaaactgagagatgtctttaagaaaggagacctctatttcaacagtggagatctcttaatggttgaccatgaaaatttcatctatttccacgacagagttggagatacattccggtggaaaggggaaaatgtggccaccactgaagttgctgatacagttggactggttgattttgtccaagaagtaaatgtttatggagtgcatgtgccagatcatgagggtcgcattggcatggcctccatcaaaatgaaagaaaaccatgaatttgatggaaagaaactctttcagcacattgctgattacctacctagttatgcaaggccccggtttctaagaatacaggacaccattgagatcactggaacttttaaacaccgcaaaatgaccctggtggaggagggctttaaccctgctgtcatcaaagatgccttgtatttcttggatgacacagcaaaaatgtatgtgcctatgactgaggacatctataatgccataagtgctaaaaccctgaaactctgaatattcccaggaggataactcaacatttccagaaagaaactgaatggacagccacttgatataatccaactttaatttgattgaagattgtgaggaaattttgtaggaaatttgcatacccgtaaagggagacttttttaaataacagttgagtctttgcaagtaaaaagatttagagattattatttttcagtgtgcacctactgtttgtatttgcaaactgagcttgttggagggaaggcattattttttaaaatacttagtaaattaaatgaacaccaacatgtgagatggcactg

SEQ ID NO: 139796 - DNA, 1863 bp, Artificial Sequence
  derived and/or modified sequence
atgctgagcgccatctacaccgtgctggccggcctgctgttcctgcccctgctggtgaacctgtgctgcccctacttcttccaggacatcggctacttcctgaaggtggccgccgtgggcagaagagtgagaagctacggcaagagaagacccgccagaaccatcctgagagccttcctggagaaggccagacagaccccccacaagcccttcctgctgttcagagacgagaccctgacctacgcccaggtggacagaagaagcaaccaggtggccagagccctgcacgaccacctgggcctgagacagggcgactgcgtggccctgctgatgggcaacgagcccgcctacgtgtggctgtggctgggcctggtgaagctgggctgcgccatggcctgcctgaactacaacatcagagccaagagcctgctgcactgcttccagtgctgcggcgccaaggtgctgctggtgagccccgagctgcaggccgccgtggaggagatcctgcccagcctgaagaaggacgacgtgagcatctactacgtgagcagaaccagcaacaccgacggcatcgacagcttcctggacaaggtggacgaggtgagcaccgagcccatccccgagagctggagaagcgaggtgaccttcagcacccccgccctgtacatctacaccagcggcaccaccggcctgcccaaggccgccatgatcacccaccagagaatctggtacggcaccggcctgaccttcgtgagcggcctgaaggccgacgacgtgatctacatcaccctgcccttctaccacagcgccgccctgctgatcggcatccacggctgcatcgtggccggcgccaccctggccctgagaaccaagttcagcgccagccagttctgggacgactgcagaaagtacaacgtgaccgtgatccagtacatcggcgagctgctgagatacctgtgcaacagcccccagaagcccaacgacagagaccacaaggtgagactggccctgggcaacggcctgagaggcgacgtgtggagacagttcgtgaagagattcggcgacatctgcatctacgagttctacgccgccaccgagggcaacatcggcttcatgaactacgccagaaaggtgggcgccgtgggcagagtgaactacctgcagaagaagatcatcacctacgacctgatcaagtacgacgtggagaaggacgagcccgtgagagacgagaacggctactgcgtgagagtgcccaagggcgaggtgggcctgctggtgtgcaagatcacccagctgacccccttcaacggctacgccggcgccaaggcccagaccgagaagaagaagctgagagacgtgttcaagaagggcgacctgtacttcaacagcggcgacctgctgatggtggaccacgagaacttcatctacttccacgacagagtgggcgacaccttcagatggaagggcgagaacgtggccaccaccgaggtggccgacaccgtgggcctggtggacttcgtgcaggaggtgaacgtgtacggcgtgcacgtgcccgaccacgagggcagaatcggcatggccagcatcaagatgaaggagaaccacgagttcgacggcaagaagctgttccagcacatcgccgactacctgcccagctacgccagacccagattcctgagaatccaggacaccatcgagatcaccggcaccttcaagcacagaaagatgaccctggtggaggagggcttcaaccccgccgtgatcaaggacgccctgtacttcctggacgacaccgccaagatgtacgtgcccatgaccgaggacatctacaacgccatcagcgccaagaccctgaagctgtag

SEQ ID NO: 139797 - protein, 929 aa, Artificial Sequence
  derived and/or modified sequence
MEPRDGSPEARSSDSESASASSSGSERDAGPEPDKAPRRLNKRRFPGLRLFGHRKAITKSGLQHLAPPPPTPGAPCSESERQIRSTVDWSESATYGEHIWFETNVSGDFCYVGEQYCVARMLQKSVSRRKCAACKIVVHTPCIEQLEKINFRCKPSFRESGSRNVREPTFVRHHWVHRRRQDGKCRHCGKGFQQKFTFHSKEIVAISCSWCKQAYHSKVSCFMLQQIEEPCSLGVHAAVVIPPTWILRARRPQNTLKASKKKKRASFKRKSSKKGPEEGRWRPFIIRPTPSPLMKPLLVFVNPKSGGNQGAKIIQSFLWYLNPRQVFDLSQGGPKEALEMYRKVHNLRILACGGDGTVGWILSTLDQLRLKPPPPVAILPLGTGNDLARTLNWGGGYTDEPVSKILSHVEEGNVVQLDRWDLHAEPNPEAGPEDRDEGATDRLPLDVFNNYFSLGFDAHVTLEFHESREANPEKFNSRFRNKMFYAGTAFSDFLMGSSKDLAKHIRVVCDGMDLTPKIQDLKPQCVVFLNIPRYCAGTMPWGHPGEHHDFEPQRHDDGYLEVIGFTMTSLAALQVGGHGERLTQCREVVLTTSKAIPVQVDGEPCKLAASRIRIALRNQATMVQKAKRRSAAPLHSDQQPVPEQLRIQVSRVSMHDYEALHYDKEQLKEASVPLGTVVVPGDSDLELCRAHIERLQQEPDGAGAKSPTCQKLSPKWCFLDATTASRFYRIDRAQEHLNYVTEIAQDEIYILDPELLGASARPDLPTPTSPLPTSPCSPTPRSLQGDAAPPQGEELIEAAKRNDFCKLQELHRAGGDLMHRDEQSRTLLHHAVSTGSKDVVRYLLDHAPPEILDAVEENGETCLHQAAALGQRTICHYIVEAGASLMKTDQQGDTPRQRAEKAQDTELAAYLENRQHYQMIQREDQETAV

SEQ ID NO: 139798 - DNA, 2790 bp, Artificial Sequence
  derived and/or modified sequence
atggagcccagagacggcagccccgaggccagaagcagcgacagcgagagcgccagcgccagcagcagcggcagcgagagagacgccggccccgagcccgacaaggcccccagaagactgaacaagagaagattccccggcctgagactgttcggccacagaaaggccatcaccaagagcggcctgcagcacctggccccccccccccccacccccggcgccccctgcagcgagagcgagagacagatcagaagcaccgtggactggagcgagagcgccacctacggcgagcacatctggttcgagaccaacgtgagcggcgacttctgctacgtgggcgagcagtactgcgtggccagaatgctgcagaagagcgtgagcagaagaaagtgcgccgcctgcaagatcgtggtgcacaccccctgcatcgagcagctggagaagatcaacttcagatgcaagcccagcttcagagagagcggcagcagaaacgtgagagagcccaccttcgtgagacaccactgggtgcacagaagaagacaggacggcaagtgcagacactgcggcaagggcttccagcagaagttcaccttccacagcaaggagatcgtggccatcagctgcagctggtgcaagcaggcctaccacagcaaggtgagctgcttcatgctgcagcagatcgaggagccctgcagcctgggcgtgcacgccgccgtggtgatcccccccacctggatcctgagagccagaagaccccagaacaccctgaaggccagcaagaagaagaagagagccagcttcaagagaaagagcagcaagaagggccccgaggagggcagatggagacccttcatcatcagacccacccccagccccctgatgaagcccctgctggtgttcgtgaaccccaagagcggcggcaaccagggcgccaagatcatccagagcttcctgtggtacctgaaccccagacaggtgttcgacctgagccagggcggccccaaggaggccctggagatgtacagaaaggtgcacaacctgagaatcctggcctgcggcggcgacggcaccgtgggctggatcctgagcaccctggaccagctgagactgaagccccccccccccgtggccatcctgcccctgggcaccggcaacgacctggccagaaccctgaactggggcggcggctacaccgacgagcccgtgagcaagatcctgagccacgtggaggagggcaacgtggtgcagctggacagatgggacctgcacgccgagcccaaccccgaggccggccccgaggacagagacgagggcgccaccgacagactgcccctggacgtgttcaacaactacttcagcctgggcttcgacgcccacgtgaccctggagttccacgagagcagagaggccaaccccgagaagttcaacagcagattcagaaacaagatgttctacgccggcaccgccttcagcgacttcctgatgggcagcagcaaggacctggccaagcacatcagagtggtgtgcgacggcatggacctgacccccaagatccaggacctgaagccccagtgcgtggtgttcctgaacatccccagatactgcgccggcaccatgccctggggccaccccggcgagcaccacgacttcgagccccagagacacgacgacggctacctggaggtgatcggcttcaccatgaccagcctggccgccctgcaggtgggcggccacggcgagagactgacccagtgcagagaggtggtgctgaccaccagcaaggccatccccgtgcaggtggacggcgagccctgcaagctggccgccagcagaatcagaatcgccctgagaaaccaggccaccatggtgcagaaggccaagagaagaagcgccgcccccctgcacagcgaccagcagcccgtgcccgagcagctgagaatccaggtgagcagagtgagcatgcacgactacgaggccctgcactacgacaaggagcagctgaaggaggccagcgtgcccctgggcaccgtggtggtgcccggcgacagcgacctggagctgtgcagagcccacatcgagagactgcagcaggagcccgacggcgccggcgccaagagccccacctgccagaagctgagccccaagtggtgcttcctggacgccaccaccgccagcagattctacagaatcgacagagcccaggagcacctgaactacgtgaccgagatcgcccaggacgagatctacatcctggaccccgagctgctgggcgccagcgccagacccgacctgcccacccccaccagccccctgcccaccagcccctgcagccccacccccagaagcctgcagggcgacgccgcccccccccagggcgaggagctgatcgaggccgccaagagaaacgacttctgcaagctgcaggagctgcacagagccggcggcgacctgatgcacagagacgagcagagcagaaccctgctgcaccacgccgtgagcaccggcagcaaggacgtggtgagatacctgctggaccacgccccccccgagatcctggacgccgtggaggagaacggcgagacctgcctgcaccaggccgccgccctgggccagagaaccatctgccactacatcgtggaggccggcgccagcctgatgaagaccgaccagcagggcgacacccccagacagagagccgagaaggcccaggacaccgagctggccgcctacctggagaacagacagcactaccagatgatccagagagaggaccaggagaccgccgtgtag

SEQ ID NO: 139799 - DNA, 2862 bp, Artificial Sequence
  derived and/or modified sequence
gtgctgagccccggccgccggcccggcatgggcgtctcccgcgggccctccgccggccggggctagggccggatggagccgcgggacggtagccccgaggcccggagcagcgactccgagtcggcttccgcctcgtccagcggctccgagcgcgacgccggtcccgagccggacaaggcgccgcggcgactcaacaagcggcgcttcccggggctgcggctcttcgggcacaggaaagccatcaccaagtcgggcctccagcacctggccccccctccgcccacccctggggccccgtgcagcgagtcagagcggcagatccggagtacagtggactggagcgagtcagcgacatatggggagcacatctggttcgagaccaacgtgtccggggacttctgctacgttggggagcagtactgtgtagccaggatgctgcagaagtcagtgtctcgaagaaagtgcgcagcctgcaagattgtggtgcacacgccctgcatcgagcagctggagaagataaatttccgctgtaagccgtccttccgtgaatcaggctccaggaatgtccgcgagccaacctttgtacggcaccactgggtacacagacgacgccaggacggcaagtgtcggcactgtgggaagggattccagcagaagttcaccttccacagcaaggagattgtggccatcagctgctcgtggtgcaagcaggcataccacagcaaggtgtcctgcttcatgctgcagcagatcgaggagccgtgctcgctgggggtccacgcagccgtggtcatcccgcccacctggatcctccgcgcccggaggccccagaatactctgaaagcaagcaagaagaagaagagggcatccttcaagaggaagtccagcaagaaagggcctgaggagggccgctggagacccttcatcatcaggcccaccccctccccgctcatgaagcccctgctggtgtttgtgaaccccaagagtgggggcaaccagggtgcaaagatcatccagtctttcctctggtatctcaatccccgacaagtcttcgacctgagccagggagggcccaaggaggcgctggagatgtaccgcaaagtgcacaacctgcggatcctggcgtgcgggggcgacggcacggtgggctggatcctctccaccctggaccagctacgcctgaagccgccaccccctgttgccatcctgcccctgggtactggcaacgacttggcccgaaccctcaactggggtgggggctacacagatgagcctgtgtccaagatcctctcccacgtggaggaggggaacgtggtacagctggaccgctgggacctccacgctgagcccaaccccgaggcagggcctgaggaccgagatgaaggcgccaccgaccggttgcccctggatgtcttcaacaactacttcagcctgggctttgacgcccacgtcaccctggagttccacgagtctcgagaggccaacccagagaaattcaacagccgctttcggaataagatgttctacgccgggacagctttctctgacttcctgatgggcagctccaaggacctggccaagcacatccgagtggtgtgtgatggaatggacttgactcccaagatccaggacctgaaaccccagtgtgttgttttcctgaacatccccaggtactgtgcgggcaccatgccctggggccaccctggggagcaccacgactttgagccccagcggcatgacgacggctacctcgaggtcattggcttcaccatgacgtcgttggccgcgctgcaggtgggcggacacggcgagcggctgacgcagtgtcgcgaggtggtgctcaccacatccaaggccatcccggtgcaggtggatggcgagccctgcaagcttgcagcctcacgcatccgcatcgccctgcgcaaccaggccaccatggtgcagaaggccaagcggcggagcgccgcccccctgcacagcgaccagcagccggtgccagagcagttgcgcatccaggtgagtcgcgtcagcatgcacgactatgaggccctgcactacgacaaggagcagctcaaggaggcctctgtgccgctgggcactgtggtggtcccaggagacagtgacctagagctctgccgtgcccacattgagagactccagcaggagcccgatggtgctggagccaagtccccgacatgccagaaactgtcccccaagtggtgcttcctggacgccaccactgccagccgcttctacaggatcgaccgagcccaggagcacctcaactatgtgactgagatcgcacaggatgagatttatatcctggaccctgagctgctgggggcatcggcccggcctgacctcccaacccccacttcccctctccccacctcaccctgctcacccacgccccggtcactgcaaggggatgctgcaccccctcaaggtgaagagctgattgaggctgccaagaggaacgacttctgtaagctccaggagctgcaccgagctgggggcgacctcatgcaccgagacgagcagagtcgcacgctcctgcaccacgcagtcagcactggcagcaaggatgtggtccgctacctgctggaccacgcccccccagagatccttgatgcggtggaggaaaacggggagacctgtttgcaccaagcagcggccctgggccagcgcaccatctgccactacatcgtggaggccggggcctcgctcatgaagacagaccagcagggcgacactccccggcagcgggctgagaaggctcaggacaccgagctggccgcctacctggagaaccggcagcactaccagatgatccagcgggaggaccaggagacggctgtgtag

SEQ ID NO: 139800 - DNA, 2790 bp, Artificial Sequence
  derived and/or modified sequence
atggagccaagagatgggtctcccgaggccagaagcagtgattctgagtctgctagcgcaagtagttctggcagcgagcgggacgcagggcccgagccagataaagctcctcggcgactaaacaaacggcgctttcccgggttaaggctctttggccaccgcaaggccattacaaaatccggccttcagcacctggctccacccccccctacccccggagctccttgctccgagagcgaaagacaaatcagatctactgtagattggtccgagtccgcgacatacggagaacacatctggttcgaaacaaacgtaagcggggatttctgttacgttggagagcagtattgcgtcgcccggatgctccaaaaatccgtgtcccgacgaaagtgcgccgcttgcaagatagtcgtccatactccatgcattgagcagttggagaagataaattttcggtgcaagccgtcttttagagagagcggcagccgtaacgtccgcgaacccacattcgtgcggcaccactgggttcatcgcaggcgccaagatggtaaatgtcggcattgcggcaaggggtttcagcagaaattcacattccattctaaggagatcgtggccatcagttgcagctggtgcaagcaggcatatcactcaaaggtctcatgtttcatgctccagcagattgaggagccatgctccttgggggtacatgcagcggtagtgatcccacctacctggattttacgcgccagaagacctcaaaataccttaaaagcatccaagaaaaagaagcgcgcctcatttaaacggaagagttccaagaagggacccgaggagggaagatggaggcccttcattatccggcctactcctagtcctctcatgaaaccgcttctggtcttcgttaacccaaagagtggaggcaatcagggtgccaaaataattcagtcttttctatggtacttgaacccgcgacaggtgttcgatctctcacagggcgggcccaaggaagccctcgaaatgtatcggaaagtgcacaatctgaggatactggcctgtggtggcgacggaactgtgggctggattctctcaactctggaccagctgcggctgaaacctcctcctcctgtcgcaatcttgccgctgggcacagggaatgacctggcaagaaccttgaattgggggggcggctatacggacgaaccagtttccaaaatcttgtcccatgtggaggaagggaatgtggtgcagctggatagatgggacctgcatgccgagcccaacccagaagccgggcccgaagaccgggacgagggtgctactgacagacttccactcgatgtctttaataattatttctctctgggatttgacgcccacgtgacactggaattccatgaatcccgagaggcgaacccagagaagtttaatagtaggtttagaaacaagatgttctatgctggaactgcattctcagattttctcatggggtcatccaaggacctggcgaagcatattcgcgtagtgtgcgacggcatggatctgacgcccaaaatccaggacctgaaaccacaatgtgtggtgtttctaaatattcccagatactgcgccggcaccatgccctggggccaccccggggagcatcatgacttcgagcctcagcgccatgacgacggctatctggaggtgatcggttttaccatgacttcgcttgcagccctccaggtcggcggtcacggcgaaagactgacacagtgccgggaagtggttttaacaacatccaaggctatcccggtccaggtggacggggagccttgcaaacttgctgcctctcgaatccgcatcgcactccggaaccaggcgacaatggtgcagaaagctaaacgaagaagtgcagcccccctccattccgaccaacagcccgttcctgaacagttgcgaatccaggtgtccagagtcagtatgcacgactatgaagccctgcattacgacaaagaacaactgaaggaagccagtgtcccactgggaacagtggttgtgcctggcgatagcgacctggaattgtgcagagcccacatcgaaaggttgcagcaggagccagatggtgccggagcaaagagccctacttgccagaagctgagtcccaaatggtgtttcctggatgctacaaccgcttctaggttctaccgaatcgatagggctcaggagcaccttaattatgtaaccgagatcgcacaggacgaaatctatattctggaccccgagcttctcggtgcttctgcacggcctgatctgccgacaccaacctcgcctctacctacatctccctgttcccctacacctagaagcttacagggtgatgctgctcctccacaaggggaggagctcatcgaggccgctaagaggaacgatttttgtaaacttcaagaactacatagggcaggcggcgatctcatgcaccgcgatgagcagtcacgtacattattacatcatgcagtcagtacagggagcaaggatgtggtgcgctacttactggaccacgcaccgccagaaatactcgatgccgtggaggagaacggcgagacttgcctgcaccaggctgcagcgcttggacagagaacaatttgtcattacatcgtcgaggctggggccagtcttatgaagactgatcagcaaggagatacgccgagacagcgagccgaaaaggcccaagatactgaactcgctgcttatctagagaacagacaacattaccagatgatccagcgcgaagatcaggaaaccgccgtttag

SEQ ID NO: 139801 - DNA, 2790 bp, Artificial Sequence
  derived and/or modified sequence
atggagcccagagatggcagccctgaggcccggagcagtgacagcgagagcgccagcgccagcagcagcggcagcgagagagatgctggccctgagccagacaaggccccccggcggctgaacaagaggcgcttccctggcctgcggctgtttggccacaggaaggccatcaccaagagcggcctgcagcacctggcccctcctccacccacccctggggccccctgcagcgagagcgagcggcagatccgcagcacagtggactggagcgagagcgccacctatggagagcacatctggtttgagaccaacgtgtctggggacttctgctacgtgggggagcagtactgtgtggccaggatgctgcagaagtctgtgtccaggaggaaatgtgccgcctgcaagatcgtggtgcacaccccctgcatcgagcagctggagaagatcaacttccgctgcaagcccagcttccgggagagcggcagcagaaatgtgcgggagcccacctttgtgcgccaccactgggtgcacagaagacggcaggacggcaagtgccgccactgtgggaagggcttccagcagaagttcaccttccacagcaaggagatcgtggccatcagctgctcctggtgcaagcaggcctaccacagcaaggtgtcctgcttcatgctgcagcagatcgaggagccctgcagcctgggcgtgcatgctgctgtggtgatcccccccacctggatcctgcgggcccggcggccccagaacaccctgaaggccagcaagaagaagaagagggccagcttcaagaggaagagcagcaagaagggccctgaggagggccgctggaggcccttcatcatccggcccacccccagccccctgatgaagcccctgctggtgtttgtgaaccccaagagcggcggcaaccagggcgccaagatcatccagagcttcctgtggtacctgaacccccggcaggtgtttgacctgagccagggcggccccaaggaggccctggagatgtacaggaaggtgcacaacctgcgcatcctggcctgtggaggagatggcaccgtgggctggatcctgagcaccctggaccagctgcggctgaagcccccacctcctgtggccatcctgcccctgggcactggaaatgacctggcccggaccctgaactggggcggcggctacacagatgagcctgtgtccaagatcctgagccacgtggaggagggcaatgtggtgcagctggaccgctgggacctgcacgccgagcccaaccctgaggccggcccagaagatagagatgagggcgccacagaccggctgcccctggatgtgttcaacaactacttcagcctgggctttgatgcccacgtgaccctggagttccacgagagccgggaggccaaccctgagaagttcaacagccgcttcaggaacaagatgttttatgccggcacagccttcagtgacttcctgatgggcagcagcaaggacctggccaagcacatccgggtggtgtgtgatggcatggacctgacccccaagatccaggacctgaagccccagtgtgtggtgttcctgaacatcccccgctactgtgccggcaccatgccctggggccaccctggagagcaccacgactttgagccccagagacatgatgatggctacctggaggtgattggcttcaccatgaccagcctggccgccctgcaggtgggcggccacggggagcggctgacccagtgccgggaggtggtgctgaccaccagcaaggccatccctgtgcaggtggatggagagccctgcaagctggccgccagccgcatccgcatcgccctgaggaaccaggccaccatggtgcagaaggccaagagaagatctgctgcccccctgcacagcgaccagcagcctgtgcctgagcagctgcgcatccaggtgtcccgggtgtccatgcatgactatgaggccctgcactatgacaaggagcagctgaaggaggcctctgtgcccctgggcaccgtggtggtgcctggggacagcgacctggagctgtgccgggcccacatcgagcggctgcagcaggagccagatggagctggggccaagagccccacctgccagaagctgagccccaagtggtgcttcctggatgccaccacagccagccgcttctacagaattgaccgggcccaggagcacctgaactacgtgacagaaattgcccaggatgagatctacatcctggaccctgagctgctgggcgccagcgcccggccagacctgcccacccccaccagccccctgcccaccagcccctgcagccccacccccaggagcctgcagggagatgctgccccaccccagggcgaggagctgattgaggccgccaagagaaatgacttctgcaagctgcaggagctgcacagagctggaggagacctgatgcacagagatgagcagagcaggaccctgctgcaccacgctgtgtccacaggcagcaaggatgtggtgcgctacctgctggaccacgcccctcctgagatcctggatgctgtggaggagaatggagagacctgcctgcaccaggccgccgccctgggccagaggaccatctgccactacatcgtggaggccggggccagcctgatgaagacagaccagcagggcgacaccccccggcagagagctgagaaggcccaggacacagagctggccgcctacctggagaaccggcagcactaccagatgatccagcgggaggaccaggagacagctgtgtag

SEQ ID NO: 139802 - DNA, 2790 bp, Artificial Sequence
  derived and/or modified sequence
atggagccccgggacggcagccccgaggcccggagcagcgacagcgagagcgctagtgcctcatcaagcgggtccgaacgagacgctgggcctgagcccgataaagctcccagaagactgaacaagcgacgcttcccagggctgcgactgttcggtcatagaaaagctatcaccaaatctgggcttcagcacctggccccaccaccaccaacaccgggagcaccatgctccgaaagcgaaaggcaaatccggagcacagttgactggtccgagtctgctacctacggcgagcacatctggtttgagacgaatgtcagtggagatttttgctatgtcggtgagcagtattgcgtcgcgagaatgcttcagaaaagtgtgagccgtagaaagtgtgccgcctgcaagatcgtggttcataccccgtgtattgaacagctggaaaagatcaatttccgctgtaagcctagtttcagggagtctggttcccggaacgttcgggagcccacgtttgtgagacaccattgggtccaccgccgacgacaagacggtaaatgtcgacattgcggcaagggctttcagcagaaattcacctttcattcaaaagagattgtggctattagttgcagctggtgtaagcaggcatatcactccaaggttagttgtttcatgctgcagcaaatcgaggaaccctgttcactcggcgtgcacgccgctgtggtgatcccccctacgtggattctgcgcgcccgtcgaccccaaaataccctgaaggctagtaaaaagaaaaagcgagcttctttcaagaggaaaagttcgaagaagggtccagaagaagggaggtggcgccccttcatcatccgtcccacaccaagtcctctcatgaagcctctcttggtgtttgtgaaccctaaatccggggggaaccaaggcgcaaaaatcatccaatccttcctctggtacctgaatcccaggcaggtgttcgatctttcacagggcgggccaaaagaggctctcgagatgtatagaaaagtgcataacctccgaattctcgcttgtggaggagatggtaccgtcggttggattctgagcaccttagaccaactgagacttaagcctccccctcccgtggcaattctccctctgggaacaggtaatgaccttgcaaggacactgaactggggaggaggctacacagatgagccagtttctaagatcttgtcacatgtggaggagggtaatgtggtccaattggaccgatgggatctccatgccgagcccaatcctgaagcgggaccagaagatagagacgagggcgctaccgatcgattgcccttagatgtgttcaacaactatttctctctgggttttgacgcccacgtaactttggaattccatgaatcacgggaagccaaccccgagaagttcaatagtaggttcagaaacaagatgttctacgccgggacggccttttccgatttcctaatgggatcttctaaagaccttgccaagcacatccgagttgtatgcgacggcatggatctgaccccaaaaatccaggatttaaaaccgcagtgtgtagtgtttctgaacattcctcggtactgtgcaggtactatgccatggggccaccctggagagcaccatgacttcgagcctcagagacacgatgacggttacctggaggtcattgggtttacgatgacttctttggcggctctccaggttggtggacacggggagagactgacgcagtgtagagaagttgtgctaaccacctctaaagcaatcccggttcaggttgatggggagccctgtaaactcgctgcttccagaattcggattgccctcagaaatcaagccaccatggtgcaaaaagctaaacggaggtctgcagcgccacttcatagcgatcagcagccggtgccagaacagctcaggatacaggtgagtcgtgtgtccatgcacgactatgaagcgctgcattatgacaaggagcagctgaaggaggcttctgtccccttgggaaccgttgtcgttccaggggactccgacctggagctgtgtcgggcacacattgaacgcttgcagcaggagccagatggtgctggagcgaagtcaccgacatgccaaaaattgtccccaaagtggtgcttcctcgatgcaactacggcttcgcgcttctaccggattgatcgggcccaggaacacctaaactatgtgacagaaatcgctcaggatgagatctacatactggatcccgagcttctcggggcctctgcgcgacctgatctgcctacacccacctctccactgccgacctcaccatgttctccgaccccccgcagtttgcagggtgacgctgccccgcctcagggggaagagttgatcgaagccgccaagaggaacgacttttgcaagctacaagaactacacagagccgggggagatctgatgcaccgggacgaacaaagccgaacgcttctgcatcacgccgtgtccactggctccaaggatgttgtgcggtacctccttgaccatgcacctcctgaaattctcgacgccgttgaggaaaacggcgaaacatgtctccaccaagctgctgccctgggccaaagaaccatctgccattatattgtcgaggctggtgcaagcctgatgaaaaccgaccagcaaggcgatactccaaggcaaagagcggaaaaggcccaggatacagagctggcagcatatctggaaaaccggcagcactaccagatgatacaaagggaagatcaggagaccgccgtgtag

SEQ ID NO: 139803 - DNA, 2790 bp, Artificial Sequence
  derived and/or modified sequence
atggagccgcgagacggatcccccgaagccagatcttcagactctgagtcagcatctgcttcttctagcggctcggagagagacgctgggccagaaccagacaaagctcctaggcgcttgaataaacggagattcccaggcctgcggctctttggccatagaaaagcgatcactaagagcggattacagcatttggctccaccgcctcctacccccggagccccatgtagcgagagcgagaggcagatccggtctaccgtggattggagcgagtctgcgacatatggggagcatatatggtttgagactaatgtaagcggtgacttttgttacgttggtgaacagtactgtgttgccagaatgttacagaagtccgtcagcagacggaaatgtgccgcttgtaagatcgtcgtccatacgccctgtatcgaacaactagaaaaaataaattttagatgtaagccttcgttcagggagtctggctctaggaacgtcagggaacctactttcgtccgtcatcattgggtgcatcgaagaaggcaggacgggaagtgccggcactgcgggaagggcttccagcagaagtttacgtttcactctaaggaaatcgtggcaataagctgtagctggtgtaagcaggcgtatcacagcaaggtgagttgcttcatgctacagcagatcgaagagccctgctcactgggtgtccatgcggctgtggtgataccaccaacctggatcctccgtgcgagaagacctcagaatacccttaaggcttcaaagaagaaaaagcgtgccagctttaagaggaaatcctcaaagaaagggcctgaggagggccgatggagaccttttatcatccggccaaccccatcccccctgatgaagccactgctggtcttcgttaaccctaagtccgggggaaatcaaggcgctaagatcattcagagctttctctggtatctcaacccccgtcaagtgtttgacctgagccaggggggtccaaaagaggctttggaaatgtacagaaaggtccataacttaaggattctcgcctgtggaggggatggaactgtgggctggattctgtctactctggatcaattgagactgaaaccaccacccccagtggccattctcccccttgggactggaaatgatcttgccaggaccttgaattgggggggtggatacactgacgagcccgttagcaaaatactgagccacgtggaggaaggtaacgtagtgcaattggatcggtgggacctgcacgctgagccaaaccccgaggctgggcctgaagaccgagacgagggggctacggatagactgcctctagatgtgttcaacaattatttcagcctcggatttgatgctcatgttaccctagagtttcacgaatcacgggaggctaatccggaaaagttcaatagccgcttcaggaataaaatgttctacgcaggaaccgccttctcagatttcctcatgggaagtagcaaggacttagccaagcatattcgcgttgtctgcgacgggatggacctgacccccaaaatccaggatctgaagcctcagtgcgtggtgttccttaatattccgagatattgtgcagggacaatgccctggggccaccctggggaacatcacgattttgagccacaacgccacgatgacggttatttggaggttattggttttacgatgacctcactcgccgctctccaggttggcggtcatggagagaggctgacccaatgccgcgaggtggtgctgacaacgtcaaaagccatccccgtacaggtagacggcgagccctgtaagctggcggcttcaaggatccgtattgccttaaggaatcaggcaactatggtccaaaaggccaaaagacgatctgcagctcccctgcactccgatcagcagcccgttcctgagcagctgagaattcaggtgtcccgggtctccatgcatgattacgaagccctgcattacgacaaggagcagctcaaggaggcaagcgtgccgctgggcactgttgtcgtacccggagattccgacttggagctttgtagggcccatattgagagattgcagcaggagccagacggtgctggcgctaaatcccctacttgccagaagctctctccaaaatggtgcttcttagatgctacaactgcatcccggttctataggattgatagggcacaagaacatctgaattatgtcacagagatcgctcaggacgaaatttacatcttagatccagaactgcttggcgcatctgcccgaccagatctgccaacccccacttcccccctcccaacttccccttgctctccaacccccagaagcctgcaaggcgacgccgctccaccacagggggaggagctcatagaggcagcgaagagaaacgatttttgcaagctgcaggaattacaccgggctgggggtgaccttatgcatagggatgagcagtcgaggactttgttgcaccatgcagtgagtaccggcagcaaggacgtggttcgatacctgcttgaccacgcccctcctgagatcctggatgccgtggaggaaaacggcgaaacctgcctgcaccaagctgcggctctgggtcagagaactatatgccactacatcgtggaggccggtgcctcattgatgaaaaccgaccagcagggcgatacacctcgacaaagagctgaaaaggctcaagatacagagttagccgcataccttgagaatcgccagcactaccagatgatacaacgcgaagaccaggagacagcagtctag

SEQ ID NO: 139804 - DNA, 1704 bp, Artificial Sequence
  derived and/or modified sequence
atggaggccgagagaaggcccgcccccggctcaccgagtgagggtctgttcgcggacggacatcttatcctctggacattatgctctgtactgctccccgtgttcatcaccttctggtgttcgctacagcgatcaaggcgccagctgcatcggcgcgacatttttcggaagtctaagcacggctggagagatacggacctgttttctcagcctacttattgttgcgtttgcgcccaacacatcttgcagggagccttctgcgattgctgcggactgagagtcgatgagggctgtctgagaaaggcagataaaagattccaatgcaaagaaattatgctgaagaatgatactaaagtgctggacgctatgccacatcactggatacgcggcaatgttcccctgtgctcttattgtatggtctgcaaacagcagtgtggatgtcaacctaaattatgcgattaccgatgcatctggtgccagaagactgtgcatgacgagtgtatgaaaaacagtctcaaaaacgaaaagtgcgactttggcgagtttaagaatctgattatccccccaagctatctgacttctatcaaccagatgcgcaaagacaagaaaacagactatgaagtgctagcctcgaagctaggcaagcagtggacccccctgattatattggctaactctaggagcgggacgaacatgggagaaggactgttaggtgaatttcgtatccttcttaatcccgtgcaggtcttcgacgtgaccaagacacctccaatcaaggccctgcagctctgtaccttgttaccatactactccgctcgcgtgctggtgtgcggaggagatgggaccgtgggttgggttctggatgccgtagacgacatgaagattaaaggccaagagaagtacattccacaagtcgccgttctgcctctgggtaccggcaacgacctgagtaacactttgggatggggcactggttacgccggcgagattccagtagcacaggtactcagaaatgtgatggaagccgacggtatcaagttggaccgctggaaggtgcaggttaccaataaagggtattacaatctgagaaaaccgaaagaattcaccatgaataactatttctccgtgggaccagacgcactcatggccctcaatttccatgctcaccgggagaaagccccctcccttttttcgagccggattctgaacaaggccgtttacctgttttatgggaccaaggactgcctggtgcaggagtgtaaagatctcaataagaaggtggagctcgagctcgacggagagcgagtggccttgccctccctggaggggatcatcgtgctaaacattggttactggggaggggggtgtcgattgtgggagggaatgggtgatgagacttatccattggcccggcacgacgacggactgttagaggttgtcggcgtctatggctcctttcactgtgcccaaattcaggtcaagctggcaaacccttttcggatcggtcaggctcacacagtcaggctgatccttaagtgttccatgatgccaatgcaggttgatggtgagccatgggctcaggggccatgcacagtgactataacccataaaactcacgcgatgatgttgtatttttccggggagcagaccgacgatgatatctccagtacaagtgatcaagaggacatcaaggctacagaatag

SEQ ID NO: 139805 - DNA, 1704 bp, Artificial Sequence
  derived and/or modified sequence
atggaggccgagaggaggcctgcccctggcagccccagcgagggcctgtttgctgatggccacctgatcctgtggaccctgtgcagcgtgctgctgcctgtgttcatcaccttctggtgcagcctgcagaggagccggcggcagctgcacagaagagacatcttcaggaagagcaagcacggctggagggacacagacctcttcagccagcccacctactgctgcgtgtgtgcccagcacatcctgcagggcgccttctgtgactgctgcggcctgcgggtggatgagggctgcctgaggaaggctgacaagcgcttccagtgcaaggagatcatgctgaagaatgacaccaaggtgctggatgccatgccccaccactggatcagaggaaatgtgcccctgtgcagctactgcatggtgtgcaagcagcagtgtggctgccagcccaagctgtgtgactaccgctgcatctggtgccagaagacagtgcatgatgagtgcatgaagaacagcctgaagaatgagaagtgtgactttggagagttcaagaacctgatcatcccccccagctacctgaccagcatcaaccagatgaggaaggacaagaagacagattatgaggtgctggccagcaagctgggcaagcagtggacccccctcatcatcctggccaacagccgcagcggcaccaacatgggagagggcctgctgggggagttccgcatcctgctgaaccctgtgcaggtgtttgatgtgaccaagaccccacccatcaaggccctgcagctgtgcaccctgctgccctactacagcgcccgggtgctggtgtgtggaggagatggcaccgtgggctgggtgctggatgctgtggatgacatgaagatcaagggccaggagaagtacatcccccaggtggccgtgctgcccctgggcactggaaatgacctgagcaacaccctgggctggggcaccggctacgccggggagatccctgtggcccaggtgctgagaaatgtgatggaggctgatggcatcaagctggaccgctggaaggtgcaggtgaccaacaagggctactacaacctgaggaagcccaaggagttcaccatgaacaactacttctctgtgggcccagatgccctgatggccctgaacttccacgcccaccgggagaaggcccccagcctcttcagcagccgcatcctgaacaaggctgtgtacctgttctacggcaccaaggactgcctggtgcaggagtgcaaggacctgaacaagaaggtggagctggagctggatggagagcgggtggccctgcccagcctggagggcatcatcgtgctgaacatcggctactggggcggcggctgccgcctgtgggagggcatgggagatgagacctaccccctggcccggcatgatgatggcctgctggaggtggtgggcgtgtatggcagcttccactgtgcccagatccaggtgaagctggccaaccccttcagaattggccaggcccacacagtgcggctcatcctgaagtgcagcatgatgcccatgcaggtggatggagagccctgggcccagggcccctgcaccgtgaccatcacccacaagacccacgccatgatgctgtacttcagcggggagcagacagatgatgacatcagcagcaccagtgaccaggaggacatcaaggccacagaatag

SEQ ID NO: 139806 - DNA, 1704 bp, Artificial Sequence
  derived and/or modified sequence
atggaggccgagcggcggcccgcccccggcagccccagcgagggcctttttgcagatggtcatctgatcctttggacactctgtagcgtcctattgcctgtgtttattacattctggtgttctcttcaaaggagtaggaggcagctgcataggcgcgacatcttccgaaagtccaagcatggctggagagacaccgacttgtttagccaacccacctactgctgcgtttgcgcacagcacatcctgcagggggccttctgcgattgctgcggtttgagagttgatgaggggtgtctcaggaaggctgataagaggttccagtgcaaagaaattatgctgaagaacgataccaaagtgctggacgccatgccccaccactggattcgcggaaacgtacctctgtgttcttattgcatggtgtgtaaacagcagtgcggatgccaacccaagctttgtgactatcgatgcatctggtgtcagaaaaccgtccacgacgagtgcatgaaaaatagtctcaagaacgagaaatgtgactttggtgagtttaaaaacctaattattccccctagttatttgacttcgattaaccagatgcgaaaggataagaagaccgactatgaggttcttgcctcgaagctggggaaacaatggaccccactaattatccttgctaatagtcggagcggaaccaacatgggagagggtttgctgggagagttcaggattctcctgaacccagtgcaggttttcgatgtaacaaaaacacctccaattaaggccctccaactttgcacactgcttccatactatagtgctagagtcctggtttgtgggggggacggcaccgtggggtgggtcctcgacgcggtagacgatatgaagatcaaggggcaggaaaaatacattccccaggttgctgtactgccactgggcaccggcaatgacctcagcaacaccctgggctgggggactgggtacgccggcgagattccagtcgcccaggtgttacgaaacgtgatggaggccgatggcatcaagctagaccgttggaaagtgcaggtaaccaacaaaggatattataacctgcgcaagcctaaggagtttacaatgaataattacttcagcgtgggcccagatgccctgatggcactgaacttccacgcccacagagaaaaagctcctagcctgttttccagtcgaatccttaataaagctgtttatctgttctatgggacgaaggactgtctcgtgcaggagtgcaaagatttaaacaaaaaggtggaactggaactggatggagaaagagtcgctcttccttccctcgaggggataattgtgctgaatataggatactggggaggtggctgccggctatgggaggggatgggtgatgaaacctatccgttagccagacacgacgacggcctgctggaagtagtaggagtgtacggaagttttcattgcgcccagatccaagtgaagctggcaaacccgttccggattggacaagctcatacagtgagactcattctgaaatgttccatgatgcctatgcaggtggacggggagccatgggcacagggtccttgcacagttaccataacccacaagacccacgctatgatgctctattttagcggcgaacagaccgacgacgatatttcttccacgagcgatcaggaagatatcaaagcaactgagtag

SEQ ID NO: 139807 - DNA, 1704 bp, Artificial Sequence
  derived and/or modified sequence
atggaggctgagagacgcccagcccctggcagtccctctgagggactgtttgccgacggtcacttgattctatggactctgtgctctgttttgttacccgtgttcatcacattctggtgtagcttacagaggtcccgacggcagctccatagaagggacatttttagaaagtcaaaacacggttggcgagacacggacctgttttcgcagcccacttactgttgtgtatgcgcgcaacatatcctacagggggctttttgcgattgctgtgggttgcgcgtggacgagggttgccttcggaaggcggataagcggttccaatgtaaggaaataatgctgaaaaatgatacaaaagtgttggatgcaatgccacaccattggattaggggaaatgtccctctatgcagttactgtatggtgtgtaagcaacagtgtggctgccagccaaagttatgcgactacagatgtatatggtgccagaagacagtgcacgacgagtgcatgaaaaattccctgaagaatgagaagtgtgattttggtgaatttaagaatctcataatacctcccagctatctcacctcgattaaccagatgagaaaggataagaagacggactacgaggttctggcgtctaaactgggcaagcagtggaccccccttattatccttgcaaactctagaagcggaaccaacatgggcgaggggcttctgggcgagttcagaatcctgctcaaccccgttcaggtgtttgacgtgaccaaaacacctccaatcaaggccctgcagttgtgtactctccttccttattatagcgcaagggtactggtctgtggcggagatgggacagtcgggtgggtattggatgccgtggacgatatgaagattaagggtcaggaaaagtacattccacaggtggcagtcctgcctctcggaacagggaacgatctgtccaacactctaggatggggcacaggctacgcaggggaaattcctgtggcccaggtgctgcgaaacgtgatggaagctgatgggattaaactggataggtggaaggtacaagtgacaaataagggctactataacctgcggaaacctaaggaattcacgatgaataactatttttctgttggaccagacgccctcatggccctgaacttccacgcgcatcgtgaaaaggccccttcccttttctcttctagaattctcaataaggcagtgtatctgttttacggcactaaagactgccttgtgcaggagtgcaaggacctgaacaaaaaggttgaactggagctggatggggagcgggtggcgctcccgtctcttgaaggaattatcgtcctgaacatcggatattggggcggtggctgccgcctgtgggagggaatgggagatgagacttaccctctcgcacgacatgatgatggtctgctggaagtcgtcggcgtctacggctctttccactgcgcccagatccaagtgaaactggccaacccttttcggatcgggcaggcccatacggtgagacttattctgaagtgctcaatgatgcccatgcaggtggacggagaaccttgggcccagggtccctgtaccgtcaccatcactcacaaaacacacgcgatgatgctctacttctccggcgaacagaccgatgacgatattagctctaccagcgaccaggaagatataaaggccactgaatag

SEQ ID NO: 139808 - DNA, 1704 bp, Artificial Sequence
  derived and/or modified sequence
atggaggccgagagaagacccgcccccggcagccccagcgagggcctgttcgccgacggccacctgatcctgtggaccctgtgcagcgtgctgctgcccgtgttcatcaccttctggtgcagcctgcagagaagcagaagacagctgcacagaagagacatcttcagaaagagcaagcacggctggagagacaccgacctgttcagccagcccacctactgctgcgtgtgcgcccagcacatcctgcagggcgccttctgcgactgctgcggcctgagagtggacgagggctgcctgagaaaggccgacaagagattccagtgcaaggagatcatgctgaagaacgacaccaaggtgctggacgccatgccccaccactggatcagaggcaacgtgcccctgtgcagctactgcatggtgtgcaagcagcagtgcggctgccagcccaagctgtgcgactacagatgcatctggtgccagaagaccgtgcacgacgagtgcatgaagaacagcctgaagaacgagaagtgcgacttcggcgagttcaagaacctgatcatcccccccagctacctgaccagcatcaaccagatgagaaaggacaagaagaccgactacgaggtgctggccagcaagctgggcaagcagtggacccccctgatcatcctggccaacagcagaagcggcaccaacatgggcgagggcctgctgggcgagttcagaatcctgctgaaccccgtgcaggtgttcgacgtgaccaagaccccccccatcaaggccctgcagctgtgcaccctgctgccctactacagcgccagagtgctggtgtgcggcggcgacggcaccgtgggctgggtgctggacgccgtggacgacatgaagatcaagggccaggagaagtacatcccccaggtggccgtgctgcccctgggcaccggcaacgacctgagcaacaccctgggctggggcaccggctacgccggcgagatccccgtggcccaggtgctgagaaacgtgatggaggccgacggcatcaagctggacagatggaaggtgcaggtgaccaacaagggctactacaacctgagaaagcccaaggagttcaccatgaacaactacttcagcgtgggccccgacgccctgatggccctgaacttccacgcccacagagagaaggcccccagcctgttcagcagcagaatcctgaacaaggccgtgtacctgttctacggcaccaaggactgcctggtgcaggagtgcaaggacctgaacaagaaggtggagctggagctggacggcgagagagtggccctgcccagcctggagggcatcatcgtgctgaacatcggctactggggcggcggctgcagactgtgggagggcatgggcgacgagacctaccccctggccagacacgacgacggcctgctggaggtggtgggcgtgtacggcagcttccactgcgcccagatccaggtgaagctggccaaccccttcagaatcggccaggcccacaccgtgagactgatcctgaagtgcagcatgatgcccatgcaggtggacggcgagccctgggcccagggcccctgcaccgtgaccatcacccacaagacccacgccatgatgctgtacttcagcggcgagcagaccgacgacgacatcagcagcaccagcgaccaggaggacatcaaggccaccgagtag

SEQ ID NO: 139809 - protein, 1170 aa, Artificial Sequence
  derived and/or modified sequence
MNMFLYFQTIIKEGMLTKQNNSFQRSKRRYFKLRGRTLYYAKTAKSIIFDEVDLTDASVAESSTKNVNNSFTVITPCRKLILCADNRKEMEDWIAALKTVQNREHFEPTQYSMDHFSGMHNWYACSHARPTYCNVCREALSGVTSHGLSCEVCKFKAHKRCAVRATNNCKWTTLASIGKDIIEDADGIAMPHQWLEGNLPVSAKCTVCDKTCGSVLRLQDWRCLWCKAMVHTSCKESLLTKCPLGLCKVSVIPPTALNSIDSDGFWKASCPPSCTSPLLVFVNSKSGDNQGVKFLRRFKQLLNPAQVFDLMNGGPHLGLRLFQKFDTFRILVCGGDGSVGWVLSEIDSLNLHKQCQLGVLPLGTGNDLARVLGWGSACDDDTQLPQILEKLERASTKMLDRWSVMAYEAKLPRQASSSTVTEDFSEDSEVQQILFYEDSVAAHLSKILTSDQHSVVISSAKVLCETVKDFVARVGKAYEKTTESSEESEVMAKKCSVLKEKLDSLLKTLDDESQASSSLPNPPPTIAEEAEDGDGSGSICGSTGDRLVASACPARPQIFRPREQLMLRANSLKKAIRQIIEHTEKAVDEQNAQTQEQEGFVLGLSESEEKMDHRVCPPLSHSESFGVPKGRSQRKVSKSPCEKLISKGSLSLGSSASLPPQPGSRDGLPALNTKILYPNVRAGMSGSLPGGSVISRLLINADPFNSEPETLEYYTEKCVMNNYFGIGLDAKISLDFNNKRDEHPEKCRSRTKNMMWYGVLGTKELLHRTYKNLEQKVLLECDGRPIPLPSLQGIAVLNIPSYAGGTNFWGGTKEDDTFAAPSFDDKILEVVAVFGSMQMAVSRVIRLQHHRIAQCRTVKISILGDEGVPVQVDGEAWVQPPGYIRIVHKNRAQTLTRDRAFESTLKSWEDKQKCELPRPPSCSLHPEMLSEEEATQMDQFGQAAGVLIHSIREIAQSHRDMEQELAHAVNASSKSMDRVYGKPRTTEGLNCSFVLEMVNNFRALRSETELLLSGKMALQLDPPQKEQLGSALAEMDRQLRRLADTPWLCQSAEPGDEESVMLDLAKRSRSGKFRLVTKFKKEKNNKNKEAHSSLGAPVHLWGTEEVAAWLEHLSLCEYKDIFTRHDIRGSELLHLERRDLKDLGVTKVGHMKRILCGIKELSRSAPAVEA

SEQ ID NO: 139810 - DNA, 3513 bp, Artificial Sequence
  derived and/or modified sequence
atgaacatgtttctttattttcagaccatcataaaggaagggatgctgaccaagcagaataatagttttcagaggtctaaacgacgctatttcaagctgcgtgggaggacattatactacgcaaagaccgctaaatccattatcttcgatgaagtcgatcttactgacgcaagcgtcgcggaatcaagcacaaagaatgtaaataattcctttactgttattactccgtgtaggaagctaattctctgtgctgacaacaggaaggagatggaggactggatcgcggcgctgaaaacagttcaaaatcgcgagcattttgagcctacacagtatagcatggatcatttttccggcatgcacaactggtacgcctgtagtcacgctcggcccacttactgtaatgtatgcagggaggctctgtcaggggtgacctcccatggcctgtcctgtgaggtctgtaaatttaaggcccacaagcgctgcgccgtgagagccaccaacaattgcaagtggactacgttggcgtcgatcggcaaggacattatagaggatgcggatggtattgcaatgccccaccagtggttggaagggaacttgcccgtgtcggcaaaatgcacggtctgtgataaaacttgtggatccgtgctgcggcttcaggactggcgctgcctatggtgcaaagccatggtgcacacttcctgcaaggaatcgctccttacgaagtgccctttaggcctgtgcaaagttagtgtaatcccccctacggccttgaactctatcgattccgacggcttctggaaggcaagctgtccgccaagttgtacttctcccctgttagtatttgtaaacagcaagtccggcgataatcagggagtaaagttcctccggcgtttcaagcagctgttgaaccctgcccaggtgtttgatttgatgaatggcggaccccatttaggcttaagactgttccagaagtttgataccttccgcattttggtttgtggaggggatggctcagtcggctgggtgctgtctgagatcgacagtctcaacttacataaacagtgtcagctgggcgtgctccctctcggaactggtaacgacctggctcgtgtcctggggtggggctccgcttgtgacgacgatacccagttgccccaaatccttgagaagcttgaacgggcctcaactaaaatgttggaccgttggagcgtcatggcatacgaagcaaagctgcctaggcaagccagtagtagcaccgtaactgaggacttcagcgaggattccgaggtccagcaaatcctgttttacgaagattccgtggccgcacacctgtctaaaatcttgacgtcagaccagcatagtgtggttatttcctctgctaaggtcctgtgtgagacagtgaaagatttcgtggctcgagttggaaaggcgtatgagaagactactgaatcatctgaggagagtgaagtgatggctaaaaagtgctcagtactgaaagagaaactggattctttattgaagacgttggatgacgagtctcaggcaagctcctccctcccgaatccgcctcctaccatcgctgaagaggcagaggatggggatggctcaggctccatctgtggatccaccggggatcgtttggttgcgtccgcttgtcctgcacgccctcagatattcaggcctagagaacagcttatgcttcgcgccaattctctaaagaaggctatacggcaaattattgagcacacagaaaaagccgtggacgaacagaatgcccagactcaagagcaggaaggcttcgtcctgggactgagcgagtccgaagaaaagatggatcacagagtgtgtcctcccctgagtcattctgaaagtttcggcgttcccaaaggcagaagtcaaagaaaggtgagcaagtccccctgtgaaaagctgattagcaagggatcattgtctctggggtcctccgccagcctgccgccccagcccggcagtagagacgggttacccgcactgaacacaaaaatcctctatcctaatgtcagggccgggatgagtggaagtttgccgggcggctccgttatcagcaggcttctgattaatgccgatccattcaacagcgagcccgaaactttagaatattacaccgagaagtgcgtcatgaataattatttcggcatcggactggatgcaaaaatctctttagatttcaacaacaaacgcgacgaacacccagaaaagtgtcgttctcggacaaaaaacatgatgtggtacggggtgcttggcacaaaggaacttctgcaccggacttacaaaaatctagagcagaaggtgttactcgagtgtgatggaaggcccataccacttcctagcctccagggtatcgcagttttgaatattcctagttacgctgggggcaccaacttctggggaggcacaaaggaggatgacaccttcgcagctccttccttcgacgacaagatcttggaagttgtcgccgttttcggctccatgcagatggcagtttcaagggtgatcaggctccagcaccaccgtatcgcacagtgccgtacggttaaaatttccattttaggtgacgagggagtgcctgtgcaggtggatggtgaggcgtgggtgcagcccccaggctacattcgcattgtgcacaagaatcgagctcaaactctcactagagaccgggccttcgaatccaccctgaagagttgggaggacaagcagaaatgcgagttgcctcgtcccccatcttgctccctgcaccctgaaatgctaagcgaggaggaggcgacacagatggaccagtttgggcaagctgcgggagtgttgatccactcaatcagagagatcgcccagtcccatcgcgacatggaacaagagctggctcacgcagtgaacgccagcagtaaatcaatggatcgagtgtacggtaaaccgagaactacagaaggcctgaattgcagtttcgtgttggaaatggtgaataactttcgagcgctgcggtccgagactgagctcctactgtctggaaaaatggcactgcaattggatccccctcagaaagaacagcttggctccgcactcgcagaaatggaccgccagcttcggcgcctcgcagacacaccatggctgtgccaaagcgcggagcccggggacgaagagagtgtcatgttggatcttgctaaaaggagccggagcggaaagttccgactagtgaccaagttcaagaaggagaaaaacaacaaaaacaaggaagcacactcaagcctaggcgcaccagtgcatctgtggggcacggaggaagtggcagcctggcttgaacatctgtccctgtgcgagtataaagatatcttcacgcggcacgatatacgaggtagcgaactgttacacctggagagaagggacctgaaagatctgggagtgacaaaagttgggcatatgaagagaatcctgtgcggtatcaaagagctgtcccggtcagcccctgctgtggaagcttag

SEQ ID NO: 139811 - DNA, 3513 bp, Artificial Sequence
  derived and/or modified sequence
atgaacatgttcctgtacttccagaccatcatcaaggagggcatgctgaccaagcagaacaacagcttccagaggagcaagaggcgctacttcaagctgcggggccgcaccctgtactatgccaagacagccaagagcatcatctttgatgaggtggacctgacagatgcctctgtggccgagagcagcaccaagaatgtgaacaacagcttcaccgtcatcaccccctgcaggaagctgatcctgtgtgccgacaacaggaaggagatggaggactggattgctgccctgaagacagtgcagaaccgggagcactttgagcccacccagtacagcatggaccacttcagcggcatgcacaactggtacgcctgcagccacgcccggcccacctactgcaatgtgtgccgggaggccctgtctggagtgaccagccacggcctgagctgtgaggtgtgcaagttcaaggcccacaagagatgtgctgtgcgggccaccaacaactgcaagtggaccaccctggccagcatcggcaaggacatcattgaagatgctgatggcatcgccatgccccaccagtggctggagggcaacctgcctgtgtctgccaagtgcaccgtgtgtgacaagacctgtggctctgtgctgcggctgcaggactggcgctgcctgtggtgcaaggccatggtgcacaccagctgcaaggagagcctgctgaccaagtgccccctgggcctgtgcaaggtgtctgtcatccccccaacagccctgaacagcattgacagtgatggcttctggaaggccagctgcccccccagctgcaccagccccctgctggtgtttgtgaacagcaagagcggggacaaccagggcgtgaagttcctgcggcgcttcaagcagctgctgaacccagcccaggtgtttgacctgatgaatggaggcccccacctgggcctgcggctcttccagaagtttgacaccttccgcatcctggtgtgtggaggagatggctctgtgggctgggtgctgtctgaaattgacagcctgaacctgcacaagcagtgccagctgggcgtgctgcccctgggcactggaaatgacctggcccgggtgctgggctggggcagcgcctgtgatgatgacacccagctgccccagatcctggagaagctggagcgggccagcaccaagatgctggaccgctggagcgtgatggcctatgaggccaagctgccccggcaggccagcagcagcacagtgacagaggacttcagcgaggacagcgaggtgcagcagatcctcttctatgaagattctgtggccgcccacctgagcaagatcctgaccagtgaccagcacagcgtggtgatcagcagcgccaaggtgctgtgtgagaccgtgaaggactttgtggcccgggtgggcaaggcctatgagaagaccacagagagcagcgaggagagcgaggtgatggccaagaagtgcagcgtgctgaaggagaagctggacagcctgctgaagaccctggatgatgagagccaggccagcagcagcctgcccaaccccccacccaccatcgccgaggaggctgaagatggagatggcagcggcagcatctgtggcagcactggagaccggctggtggccagcgcctgcccagcccggccccagatcttccggccccgggagcagctgatgctgcgggccaacagcctgaagaaggccatccggcagatcatcgagcacacagagaaggctgtggatgagcagaatgcccagacccaggagcaggagggctttgtgctgggcctgtctgagagcgaggagaagatggaccaccgggtgtgcccccccctgagccacagcgagagctttggagtgcccaagggccgcagccagaggaaggtgtccaagagcccctgtgagaagctgatcagcaagggcagcctgagcctgggcagcagcgccagcctgcccccccagcccggcagcagagatggcctgcctgccctgaacaccaagatcctgtacccaaatgtgcgggccggcatgagcggcagcctgcccggcggcagcgtcatcagccggctgctgatcaatgctgaccccttcaacagcgagcctgagaccctggagtactacacagagaagtgtgtgatgaacaactacttcggcatcggcctggatgccaagatcagcctggacttcaacaacaagagagatgagcaccctgagaagtgccgcagcaggaccaagaacatgatgtggtatggagtgctgggcaccaaggagctgctgcacaggacctacaagaacctggagcagaaggtgctgctggagtgtgatggccggcccatccccctgcccagcctgcagggcattgctgtgctgaacatccccagctatgccggcggcaccaacttctggggcggcaccaaggaggatgacacctttgctgcccccagctttgatgacaagatcctggaggtggtggccgtgtttggctccatgcagatggctgtgtccagggtcatccggctgcagcaccaccgcatcgcccagtgcaggacagtgaagatcagcatcctgggagatgaaggagtgcctgtgcaggtggatggagaggcctgggtgcagcccccaggctacatccgcatcgtgcacaagaacagagcccagaccctgacccgggaccgggcctttgagagcaccctgaagtcctgggaggacaagcagaagtgtgagctgcccaggcctcccagctgcagcctgcaccctgagatgctgtctgaggaggaggccacccagatggaccagtttggccaggccgccggcgtgctgatccacagcatccgggagatcgcccagagccaccgggacatggagcaggagctggcccatgctgtgaatgccagcagcaagtccatggacagagtgtatggcaagcccaggaccacagagggcctgaactgcagctttgtgctggagatggtgaacaacttccgggccctgcggagtgaaacagagctgctgctgagcggcaagatggccctgcagctggaccccccccagaaggagcagctgggcagcgccctggccgagatggaccggcagctgcggcggctggccgacaccccctggctgtgccagagcgctgagcctggagatgaggagagcgtgatgctggacctggccaagaggagccgcagcggcaagttccggctggtgaccaagttcaagaaggagaagaacaacaagaacaaggaggcccacagcagcctgggcgcccctgtgcacctgtggggcacagaggaggtggccgcctggctggagcacctgagcctgtgtgagtacaaggacatcttcaccaggcatgacatccggggcagcgagctgctgcacctggagcggcgggacctgaaggacctgggcgtgaccaaggtgggccacatgaagaggatcctgtgtggcatcaaggagctgagccgcagcgccccagctgtggaggcctag

SEQ ID NO: 139812 - DNA, 3513 bp, Artificial Sequence
  derived and/or modified sequence
atgaacatgttcctgtacttccagaccatcatcaaggagggcatgctgaccaagcagaataatagctttcagcggtccaaacggcgctacttcaagctccgaggtcgtaccctttactacgctaagaccgcaaaatcaatcatttttgacgaggtggatcttaccgatgcgtccgtggctgaatcttctaccaaaaacgtaaacaactccttcaccgttatcacaccctgcaggaagctcatactatgcgctgataatagaaaggaaatggaggactggattgcagctctgaagacagtgcaaaacagggaacacttcgaaccaacacagtattctatggatcacttcagcggcatgcacaactggtacgcatgttcccatgcgcggcccacttactgtaacgtgtgccgggaagctctgtcaggcgtgactagtcatggtttatcatgcgaagtttgtaagttcaaggcccataaaaggtgtgcagtgagggccaccaacaattgcaagtggacaaccctggcgtctattggtaaagacatcatagaggacgcagatggcatcgctatgcctcaccaatggctggagggaaatctccccgtatcagccaagtgtactgtctgcgacaagacttgtggttccgttttacggctccaggactggcggtgtctgtggtgcaaggccatggttcatactagttgtaaggagagcctgctgactaagtgccctctcggtctgtgtaaggtgagtgtaatccctccgacagcactgaattcgatcgacagcgatggtttttggaaggcatcttgcccaccgtcttgtacctccccacttctggtgtttgtaaattctaaatccggcgacaatcagggtgtgaagtttcttcgccgattcaaacagcttctgaaccccgcacaagtatttgacctgatgaatggaggcccgcacttggggttgcggctgtttcaaaaattcgacaccttccggattcttgtgtgtggaggagatggctcagttgggtgggtcctctctgagatagattcactaaatctgcataagcagtgccaactgggcgtgctacccctggggactggcaacgacttagcgagagttctgggctggggtagtgcttgcgatgatgacacccagctgccccagattctcgagaagctggaacgggcctctactaagatgctcgaccggtggtctgtcatggcgtatgaagcaaaactacctcggcaggcatcttcgtccactgtgactgaagatttctcagaagacagcgaggtacagcagatcttattctacgaagacagcgtggccgcgcatctttcaaaaattttgacctcagaccagcattccgtagtcatctccagcgctaaagtcctctgtgagaccgttaaggactttgtggccagggtgggtaaggcctacgagaaaacaacagagtctagtgaagagtcagaggtcatggcgaagaagtgctcggtcctcaaagagaagctggactctctcctgaaaacattagacgacgagtctcaggcctccagcagtttacccaacccaccccccacaatagctgaggaggccgaggatggcgacggcagtggcagcatctgcggttctaccggggacaggttggttgcatcggcgtgtccggcgcgaccgcagattttccggcccagagagcagctcatgctccgggccaactccctgaagaaagcaatccggcaaatcattgaacacacggagaaggctgtcgacgaacaaaacgcccagactcaggagcaagaagggttcgttctggggttgtccgagtcagaagaaaagatggaccaccgggtgtgcccccctttgtcccatagcgagtctttcggagttcctaaggggcgatctcagcgcaaggtgtccaagtctccttgcgaaaaactgatctctaaaggatcactgagcctgggatcttcagcctcactacctccacagccaggctcccgggacgggctccccgctctgaatacaaagatcctctatcccaacgtgcgcgctggaatgtccggcagtttacctggcgggtctgtgatctccagactcctcatcaacgcagatccttttaactctgaacccgagacactggagtactataccgaaaagtgcgttatgaacaactactttggaattgggttggacgccaaaattagccttgattttaataataagagggacgagcacccggagaaatgcagatccaggactaaaaacatgatgtggtatggagtgctcggaacaaaagagttactacatcgcacgtataaaaacttagagcagaaagtgttgctcgagtgcgatggccgccccatccccttgccctcccttcaaggcatcgcggttctcaacataccctcatatgctggcggcacaaatttttggggaggcacaaaagaagatgatacttttgcagcccccagttttgacgataaaatcttggaggtagtcgctgtgtttggtagcatgcaaatggcggtgtctcgggtgatccggttgcagcaccatagaattgcccagtgtagaacagtgaaaattagcattctgggtgatgagggggtcccagtgcaggtggacggggaggcatgggtgcagcctcccggatatataaggatcgtgcataagaatcgggcccaaaccttaactagagacagggcgttcgaaagcacactgaagtcttgggaagacaagcaaaaatgcgaactgcccagacccccttcttgcagcttgcatcccgagatgctgagtgaagaagaagcaacccaaatggaccagttcggacaggccgccggggttctgattcattccatcagggaaattgcacagtcccatcgagatatggagcaggagctagcccatgctgtcaacgcttcatccaaatccatggacagggtctacggcaagccgcgcacaacagagggcctcaactgtagctttgtgttagagatggtgaataactttagggcccttagaagtgaaacggaactcttactgtctggaaaaatggccctgcagcttgacccaccacagaaggagcagctagggtccgcccttgcagaaatggaccggcagttgcgtcggctggccgacaccccttggctgtgccaatccgccgagcctggggatgaggagagcgtgatgttggatctggctaagaggtctaggagcgggaaattcagactggtcaccaaatttaagaaagaaaaaaataataagaacaaggaggcacactctagcctgggggcccccgtgcacctctggggaaccgaggaggtcgccgcctggctggagcatctctccctctgtgaatataaggacatattcacacgccacgatattcggggctcggagctgctgcacttagaaaggcgcgacttaaaggatctgggtgttacaaaggtcggacacatgaagagaattctctgcgggatcaaggaacttagtaggagtgctcctgccgtggaagcatag

SEQ ID NO: 139813 - DNA, 3513 bp, Artificial Sequence
  derived and/or modified sequence
atgaatatgttcctctactttcaaaccattattaaagagggtatgctaacaaaacagaataactcttttcagagatctaaacgtcggtacttcaaactcaggggcagaaccctctactacgcaaaaaccgccaagtcaattattttcgacgaggtggatctgacagacgccagcgttgccgagtcttccacaaaaaacgtgaataactcttttacggtaatcactccatgtaggaagctcatcctgtgcgcagataacagaaaggaaatggaggattggatcgccgctttgaagacggtgcagaatagggaacactttgagcccacccaatactcaatggatcacttttcaggaatgcacaattggtacgcctgtagccatgcaaggcccacgtattgtaacgtctgtagagaggcactgagcggtgtgacttcacacgggctttcatgtgaggtgtgtaaatttaaggctcacaagagatgtgcggtcagagccacaaacaactgtaagtggacaaccttggcttccatcggaaaagacattatagaagatgcagacggcattgccatgcctcaccagtggttagaggggaatctcccagtgagcgcaaaatgcacggtatgtgacaagacctgtgggtccgtcctgaggctccaggattggcggtgtttgtggtgtaaagcaatggtgcacaccagctgtaaggaaagtctgctcacaaagtgcccactaggcctttgtaaagtctctgttattccgccaactgccctgaattcaatcgatagtgatggtttttggaaagccagctgtccgccttcatgtacgagcccactgttagtcttcgtgaattcaaaaagtggggacaaccaaggggtcaaattccttcgccgttttaagcagctgcttaaccctgcccaggtgtttgatctgatgaatggcggtccacatcttggcttacgtctctttcagaagttcgacacttttaggatcctggtatgtggaggtgacggctctgtgggttgggtcctgtcagagatcgatagcctgaaccttcacaagcaatgccagttaggcgtgctgccgcttggcaccggcaatgacctagctcgagtattgggctgggggtcagcttgcgatgacgatacacaattgccacagattctagagaaactggagcgtgccagcactaagatgctggataggtggtcagttatggcttacgaggcaaagttgcccagacaggcatcatctagcaccgttactgaggacttcagcgaggacagtgaggtgcaacagattctgttctatgaagactccgtcgccgctcacctctctaagatcctgacctcagaccagcactcagtggtgatttcatccgctaaggtactttgcgagactgtcaaggattttgtcgcccgtgtgggaaaagcctatgaaaagacaacggaatcgtctgaagagagcgaagtcatggccaagaagtgttccgtgctgaaggagaagctggacagccttttaaagacactggacgacgaaagtcaggctagcagctccctgccaaatccccctcctaccattgccgaggaggctgaagacggagatggtagcggttctatatgcggcagcactggcgatcgactggtagcatcagcttgccccgctcgtcctcagatctttaggcctcgggagcaactgatgctgcgcgcaaattctctgaagaaggccatccgccagattatcgagcacacagagaaggcggtggacgagcaaaatgcgcagactcaggagcaggaaggcttcgtgctgggtctgtctgagtccgaggaaaagatggatcaccgtgtatgtcctcctttgtctcatagtgagagctttggcgtgccaaaaggcagatcccagagaaaagtatctaaaagcccctgtgaaaagctgatctctaaaggcagcctctcacttggaagcagtgcctctctgccaccacagccagggagcagggatggcctgcccgctctgaataccaagatcctgtatcccaatgtgcgagccggtatgtcagggtccctgcccggaggcagcgtcatttcaaggctcctgattaatgctgaccctttcaactcagaacctgagacgctagaatattacacggaaaagtgcgtgatgaacaactatttcggcatcggactagacgccaaaatttccctcgattttaataataagagagatgagcaccctgaaaaatgtagatcccgcaccaaaaatatgatgtggtatggcgtgctggggaccaaagaactcctgcacaggacttacaagaatcttgagcaaaaggttcttttagaatgcgacgggaggcctatacccctcccatccctgcaggggattgcagtgctaaacatcccttcttatgctggcggaactaatttttggggcggtacaaaggaggatgacactttcgcagctccaagcttcgacgataaaatacttgaagtggtggccgtctttggctccatgcagatggccgtgagtagagtgatccgactccagcaccacagaatcgctcaatgtaggaccgtcaaaataagcatacttggggatgagggggtgccggtgcaggtggatggcgaggcctgggttcaacctccaggatacattaggatagtgcataagaacagagcacagacactgaccagggatcgggcatttgaaagtaccctcaagagctgggaggataaacagaagtgtgagcttccgagaccccctagctgttccctgcacccagaaatgttgtcggaggaggaagcgacccaaatggatcagttcgggcaggccgcaggagtactcattcactcaattcgagagattgcacaatcacatcgcgacatggaacaagaactggctcatgcggtgaacgcatcatccaagtctatggacagagtgtacggcaaaccacggaccaccgagggcctcaactgtagcttcgtcttagagatggtcaataacttcagggccctccgctctgagaccgaactgctgctctcagggaaaatggctctccagctggatcctccacagaaagagcagctgggcagcgccctggcagaaatggaccgccagctccgccgtctggccgacaccccgtggttatgccagagcgccgagcctggcgacgaagaaagcgttatgcttgaccttgccaagcggtcacgatctggaaaattccggctggttacaaagtttaagaaggagaagaacaacaaaaacaaagaggcccacagtagtcttggagcaccagtgcacttgtggggtactgaagaagttgctgcttggctcgaacatctcagcctgtgtgaatataaggacatctttaccaggcacgacattaggggcagtgagcttttgcacttggaaagacgggacttaaaagaccttggcgtgacaaaagtcggccacatgaagaggattctgtgtgggatcaaagagctgagtaggtcagctcccgcagtggaagcttag

SEQ ID NO: 139814 - DNA, 3513 bp, Artificial Sequence
  derived and/or modified sequence
atgaacatgttcctgtacttccagaccatcatcaaggagggcatgctgaccaagcagaacaacagcttccagagaagcaagagaagatacttcaagctgagaggcagaaccctgtactacgccaagaccgccaagagcatcatcttcgacgaggtggacctgaccgacgccagcgtggccgagagcagcaccaagaacgtgaacaacagcttcaccgtgatcaccccctgcagaaagctgatcctgtgcgccgacaacagaaaggagatggaggactggatcgccgccctgaagaccgtgcagaacagagagcacttcgagcccacccagtacagcatggaccacttcagcggcatgcacaactggtacgcctgcagccacgccagacccacctactgcaacgtgtgcagagaggccctgagcggcgtgaccagccacggcctgagctgcgaggtgtgcaagttcaaggcccacaagagatgcgccgtgagagccaccaacaactgcaagtggaccaccctggccagcatcggcaaggacatcatcgaggacgccgacggcatcgccatgccccaccagtggctggagggcaacctgcccgtgagcgccaagtgcaccgtgtgcgacaagacctgcggcagcgtgctgagactgcaggactggagatgcctgtggtgcaaggccatggtgcacaccagctgcaaggagagcctgctgaccaagtgccccctgggcctgtgcaaggtgagcgtgatcccccccaccgccctgaacagcatcgacagcgacggcttctggaaggccagctgcccccccagctgcaccagccccctgctggtgttcgtgaacagcaagagcggcgacaaccagggcgtgaagttcctgagaagattcaagcagctgctgaaccccgcccaggtgttcgacctgatgaacggcggcccccacctgggcctgagactgttccagaagttcgacaccttcagaatcctggtgtgcggcggcgacggcagcgtgggctgggtgctgagcgagatcgacagcctgaacctgcacaagcagtgccagctgggcgtgctgcccctgggcaccggcaacgacctggccagagtgctgggctggggcagcgcctgcgacgacgacacccagctgccccagatcctggagaagctggagagagccagcaccaagatgctggacagatggagcgtgatggcctacgaggccaagctgcccagacaggccagcagcagcaccgtgaccgaggacttcagcgaggacagcgaggtgcagcagatcctgttctacgaggacagcgtggccgcccacctgagcaagatcctgaccagcgaccagcacagcgtggtgatcagcagcgccaaggtgctgtgcgagaccgtgaaggacttcgtggccagagtgggcaaggcctacgagaagaccaccgagagcagcgaggagagcgaggtgatggccaagaagtgcagcgtgctgaaggagaagctggacagcctgctgaagaccctggacgacgagagccaggccagcagcagcctgcccaaccccccccccaccatcgccgaggaggccgaggacggcgacggcagcggcagcatctgcggcagcaccggcgacagactggtggccagcgcctgccccgccagaccccagatcttcagacccagagagcagctgatgctgagagccaacagcctgaagaaggccatcagacagatcatcgagcacaccgagaaggccgtggacgagcagaacgcccagacccaggagcaggagggcttcgtgctgggcctgagcgagagcgaggagaagatggaccacagagtgtgcccccccctgagccacagcgagagcttcggcgtgcccaagggcagaagccagagaaaggtgagcaagagcccctgcgagaagctgatcagcaagggcagcctgagcctgggcagcagcgccagcctgcccccccagcccggcagcagagacggcctgcccgccctgaacaccaagatcctgtaccccaacgtgagagccggcatgagcggcagcctgcccggcggcagcgtgatcagcagactgctgatcaacgccgaccccttcaacagcgagcccgagaccctggagtactacaccgagaagtgcgtgatgaacaactacttcggcatcggcctggacgccaagatcagcctggacttcaacaacaagagagacgagcaccccgagaagtgcagaagcagaaccaagaacatgatgtggtacggcgtgctgggcaccaaggagctgctgcacagaacctacaagaacctggagcagaaggtgctgctggagtgcgacggcagacccatccccctgcccagcctgcagggcatcgccgtgctgaacatccccagctacgccggcggcaccaacttctggggcggcaccaaggaggacgacaccttcgccgcccccagcttcgacgacaagatcctggaggtggtggccgtgttcggcagcatgcagatggccgtgagcagagtgatcagactgcagcaccacagaatcgcccagtgcagaaccgtgaagatcagcatcctgggcgacgagggcgtgcccgtgcaggtggacggcgaggcctgggtgcagccccccggctacatcagaatcgtgcacaagaacagagcccagaccctgaccagagacagagccttcgagagcaccctgaagagctgggaggacaagcagaagtgcgagctgcccagaccccccagctgcagcctgcaccccgagatgctgagcgaggaggaggccacccagatggaccagttcggccaggccgccggcgtgctgatccacagcatcagagagatcgcccagagccacagagacatggagcaggagctggcccacgccgtgaacgccagcagcaagagcatggacagagtgtacggcaagcccagaaccaccgagggcctgaactgcagcttcgtgctggagatggtgaacaacttcagagccctgagaagcgagaccgagctgctgctgagcggcaagatggccctgcagctggaccccccccagaaggagcagctgggcagcgccctggccgagatggacagacagctgagaagactggccgacaccccctggctgtgccagagcgccgagcccggcgacgaggagagcgtgatgctggacctggccaagagaagcagaagcggcaagttcagactggtgaccaagttcaagaaggagaagaacaacaagaacaaggaggcccacagcagcctgggcgcccccgtgcacctgtggggcaccgaggaggtggccgcctggctggagcacctgagcctgtgcgagtacaaggacatcttcaccagacacgacatcagaggcagcgagctgctgcacctggagagaagagacctgaaggacctgggcgtgaccaaggtgggccacatgaagagaatcctgtgcggcatcaaggagctgagcagaagcgcccccgccgtggaggcctag

SEQ ID NO: 139815 - DNA, 6228 bp, Artificial Sequence
  derived and/or modified sequence
agagacacgaatatgtttcagccgcaacaggctgcgtttcagccggaagagtgaaagggcaccttgaaaacgcaagtttatgaatatgtttctgtactttcagaccatcatcaaagaggggatgctgaccaaacagaacaattcattccagcgatcaaaaaggagatactttaagcttcgagggcgaacgctttactatgccaaaacggcaaagtcaatcatatttgatgaggtggatctgacagatgccagcgtagctgaatccagtaccaaaaacgtcaacaacagttttacggtcataactccatgcaggaagctcatcttgtgtgctgataacagaaaagaaatggaagattggattgcagcattaaagactgtgcagaacagggagcactttgagcccacccagtacagcatggaccacttctcagggatgcacaattggtacgcctgttcccacgcgaggccgacctactgcaatgtgtgccgtgaggctctgtctggggtcacgtcgcacgggctgtcctgcgaggtgtgcaaatttaaggcccacaagcgctgtgctgtgcgtgcaaccaataactgcaagtggaccacactggcctcgatcgggaaggacatcattgaagatgcagatgggattgcaatgccccaccagtggttggaaggaaacctacctgtgagcgccaagtgcactgtgtgcgacaagacctgtggcagtgtgctgcgcctgcaggactggcgctgcctctggtgcaaggccatggttcacacatcgtgtaaagaatccttgctgaccaagtgcccacttggcctgtgcaaagtgtcagtcatcccacccacggctctcaacagcatcgactccgatgggttctggaaggccagctgtcctccttcttgcacaagcccactgttggtcttcgtcaattcaaaaagtggggacaaccagggtgtgaagttcctcagaagattcaaacagctactaaaccccgcccaggtcttcgacctcatgaacggaggcccacacctcggcttacggttattccagaagtttgacacattccggattctggtttgtggcggggatggaagtgttggctgggtcctctccgaaatcgacagcctcaaccttcataaacagtgtcagctgggagtgctgccgctcggcacagggaacgacttggcccgagtactgggctggggctcagcctgcgatgacgacacccagctcccccagatcttggagaagttggagagagccagcaccaagatgctggacaggtggagcgtcatggcatacgaggccaagctcccccggcaggcctcctcctctaccgtcaccgaagacttcagcgaggattccgaggtacagcagattctcttctatgaagactcggttgcagcccacctttctaaaatcctcacctcggaccagcactcggtggtcatctcctcggccaaagtgctctgtgagacggtgaaggacttcgtggcacgggtggggaaggcctatgagaagacgaccgagagctcggaggagtcagaggtcatggccaagaagtgctctgtcctgaaagagaagctggattcccttctcaagaccttggacgatgagtcccaggcctcgtcctctctgcccaacccgccccccaccattgccgaggaggctgaagatggagatgggtcgggcagcatctgcggttccaccggagaccgcttggtggcatcagcttgcccggcccggccgcagatattccggcctcgagaacagctcatgctgagagccaacagcctgaagaaagcaattcgtcagatcatagaacacacagaaaaagctgtcgatgagcagaatgcccagacccaggagcaggagggcttcgtcctgggcctctctgagtcagaggagaagatggaccacagagtgtgcccaccactgtcccacagcgagagcttcggggtccccaaggggaggagccagcgcaaagtgtcgaaatctccgtgtgaaaagctgatcagcaaagggagtctgtccctaggcagttctgcttcccttccgccccagccgggaagccgggacggcctgcctgcgctcaacaccaagatcctgtacccaaatgtccgggctggaatgtctggttccttacccggtggctcagtcatcagtcgcctgttaattaatgctgatcccttcaactctgaaccagaaaccctagagtattacacggagaaatgtgtcatgaacaactattttggcattggcctggatgcgaagatatccctggactttaacaacaagcgcgatgagcacccagagaagtgcaggagccgaaccaagaacatgatgtggtatggagttcttggaaccaaagagttgctgcacagaacctacaagaacctggagcaaaaggtcttgctggagtgtgacgggcgacccatcccactccccagtcttcagggaattgctgtccttaacattcccagctatgccggaggaaccaacttctgggggggtaccaaggaagatgatactttcgcagctccatcattcgatgacaagattctggaggtggtcgccgtgttcggcagcatgcagatggccgtctctcgagtcatcaggctacagcatcatcggatcgcccagtgtcgcacggtgaagatctccatccttggggatgagggcgtgcctgtgcaggtggacggagaggcctgggtccagccgccagggtacattcggattgtccacaagaaccgggcacagacactgaccagagacagggcatttgagagcaccctgaagtcctgggaagacaagcagaagtgcgagctgccccgccctccatcctgttccctgcacccggagatgctgtccgaggaggaggccacccagatggaccagtttgggcaggcagcaggggtcctcattcacagtatccgagaaatagctcagtctcaccgggacatggagcaggaactggcccacgccgtcaatgccagctccaagtccatggaccgtgtgtatggcaagcccagaaccacagaggggctcaactgcagcttcgtcctggaaatggtgaataacttcagagctctgcgcagtgagacggagctgctgctgtctgggaagatggccctgcagctggatccgcctcagaaggagcagctggggagtgctcttgccgagatggaccgacagctcaggaggctggcagacaccccgtggctctgccagtccgcagagcccggcgacgaagagagtgtgatgctggatcttgccaagcgcagtcgcagtggtaaattccgcctcgtgaccaagtttaaaaaggagaaaaacaacaagaacaaagaagctcacagtagcctgggagccccggttcacctctgggggacagaggaggttgctgcctggctggagcacctcagtctctgtgagtataaggacatcttcacacggcacgacatccggggctctgagctcctgcacctggagcggagggacctcaaggacctgggcgtgaccaaggtgggccacatgaagaggatcctgtgtggcatcaaggagctgagccgcagcgcccccgccgtcgaggcctagcctctgtcctctcagcctgtggcctccacatccccgccgccgaggcctagcctccgccctctcagcctgtggcctctgcgcctcctgccactgaggccctgggcagatgctgcagcccgcccccttctcatggtgctacttcctctgtcagctacagaaagcctccgtgacaccgtccaccagagctctggggtctcgaacataacaacacagctacctttgaaacaacactttctccagctcagagtcacctggggcacatgtgtcacggccactcagctctcgcccgcctgtgctgtgggccagggaatccagcggcgtctggcctcctgggcactgcttgcctggcctcgtgcttggattgtcccgggggctcctctccgtgtgtccttctgtggccgcaccgtgtggctccgcctcctggcccccagccagttctcagaaacgtggctggggcccagcacagcagcctgcaagggcccctgtttgttgatgcagcttttgttgaacaaaaatcgtgctctttcctggtttgaaagtagcatggatgtttccagtcttgttgattgtaatttgacgtgaagagaaaaaaaaattcctcctgcgtgagccaaggcagcgggtgctgtttcccaggcggggagcccctccctgggtgtcacagggcctgtgctcctccctcctccatcctctctcctcccgctcctccctccccccactgtgggctggggacgcctgcccttctgtctccggacgctctaggcgagttcagcttggggtgtgagtgagacagcttgccagctgcatccctgcagacagaggatgtgtgtccacatgagtgtttctgtgtgggaaatgcttcctggctctgggaaactttttctgcccattctgtggttcccagggagcgtggccctggtgggccaggggtggtttgacctcttcagcccgtccggtggcctggaggccggaggctctcctgagtgtctgcccctgcagtggcttcttgtcgcctgctgctgggcgtgatgtcgctggaggtgctggcagggactctgatttggtggtccgcgctgcccctgccctgcctctgtcctggctctgaactagtagatgatggtgccagagggcagggagctcgcctggggagagggctgtgccccgtagggacagtgcccaggtgaaggatgcccctggtcctccagggcactgactttgcccttttttcccgttgatagtcatggctcagaggtgcttgtaaatgtcttgggaagaggtttctgtaacccctgccctggtgtgaggaggaaatggctctggcctggctgcctggccgtggcttctctttggctcccaaagagaaggacagtgttgggagtatctgccgtggcttctctttggctcccaaagagaaggacagtgttgggagtatctgccggcgctgtccaggtcctttagtcagcgtcactccatctgatgtgcagaagctgggctgcacctgcgggggtgggcatagaccgggctgggtctgcagcagcccctggtcctgagcaggcggcagtgaacagcactggcccacctcccactcacagcccctctgtcccctctgcagtgcacccaggtgggcccctctgcgtgcctttgggtgctcccctctcgtggtcgttctggcccgaggcccttagagtatggaggctgagccaggccttgggtttccccagcacagcctcctgtcgctgcatgcgacgtgttgggatttttggatgaaagactctcccacgctctgttggtggacttagctgcctcactggaagtgatgtgggtggaaggtggttgtatgttaccttttccacctctcattgttttccccagaacattgtagatgggggttggcagagggagaaataagccagccacggcagtcgcttggtttcccaggtggaatgggctaacacaggagatgatgggaacctgtcccgcagtccctgcatgaccattggccctgctggcctggcgatgtgggcatcctggggttcttagggtcccagaacaagccccaggcaagctggaacttgggtggggaggggacatgaggaggataaacagctgactgtggcttcaaggacatcagggccaccccaagtcctcagtgtcctactcctggcaaggagttgggtttggatcaaaagtgtttaaaattaatatgttgtcagtgattagaacaacactgtttacataaaaaccatttttctaattctaacaagttagaatgtgaggaaggaatgaacatgagtgtttaggaacctgccctttggtgctgggctggcgtcccgcactggggtgtcctcgctgtctgggggctgctctgctgccccggcccaggtccccttgtggtgttgccagacgggcctcatggtctgctgtgcagagagaggcaggaaggatccctgaagagtcttggagaaaaggttctgtgccctcaggtggggcttaccccctcgtatttataatcttaatttatatagtgaccaccgtggaaacaaacgcctcttgtattgtcatgtacatagtccatacctgagtgctgtacataagttgttctgtgtataaataaaacaagcctgtttttgatcttc

SEQ ID NO: 139816 - protein, 369 aa, Artificial Sequence
  derived and/or modified sequence
MRPARHWETRFGARDFGGFQDCFFRDRLMDTARIAVVGAGVVGLSTAVCISKLVPRCSVTIISDKFTPDTTSDVAAGMLIPHTYPDTPIHTQKQWFRETFNHLFAIANSAEAGDAGVHLVSGWQIFQSTPTEEVPFWADVVLGFRKMTEAELKKFPQYVFGQAFTTLKCECPAYLPWLEKRIKGSGGWTLTRRIEDLWELHPSFDIVVNCSGLGSRQLAGDSKIFPVRGQVLQVQAPWVEHFIRDGSGLTYIYPGTSHVTLGGTRQKGDWNLSPDAENSREILSRCCALEPSLHGACNIREKVGLRPYRPGVRLQTELLARDGQRLPVVHHYGHGSGGISVHWGTALEAARLVSECVHALRTPIPKSNL

SEQ ID NO: 139817 - protein, 341 aa, Artificial Sequence
  derived and/or modified sequence
MDTARIAVVGAGVVGLSTAVCISKLVPRCSVTIISDKFTPDTTSDVAAGMLIPHTYPDTPIHTQKQWFRETFNHLFAIANSAEAGDAGVHLVSGWQIFQSTPTEEVPFWADVVLGFRKMTEAELKKFPQYVFGQAFTTLKCECPAYLPWLEKRIKGSGGWTLTRRIEDLWELHPSFDIVVNCSGLGSRQLAGDSKIFPVRGQVLQVQAPWVEHFIRDGSGLTYIYPGTSHVTLGGTRQKGDWNLSPDAENSREILSRCCALEPSLHGACNIREKVGLRPYRPGVRLQTELLARDGQRLPVVHHYGHGSGGISVHWGTALEAARLVSECVHALRTPIPKSNL

SEQ ID NO: 139818 - DNA, 1110 bp, Artificial Sequence
  derived and/or modified sequence
atgagacccgccagacactgggagaccagattcggcgccagagacttcggcggcttccaggactgcttcttcagagacagactgatggacaccgccagaatcgccgtggtgggcgccggcgtggtgggcctgagcaccgccgtgtgcatcagcaagctggtgcccagatgcagcgtgaccatcatcagcgacaagttcacccccgacaccaccagcgacgtggccgccggcatgctgatcccccacacctaccccgacacccccatccacacccagaagcagtggttcagagagaccttcaaccacctgttcgccatcgccaacagcgccgaggccggcgacgccggcgtgcacctggtgagcggctggcagatcttccagagcacccccaccgaggaggtgcccttctgggccgacgtggtgctgggcttcagaaagatgaccgaggccgagctgaagaagttcccccagtacgtgttcggccaggccttcaccaccctgaagtgcgagtgccccgcctacctgccctggctggagaagagaatcaagggcagcggcggctggaccctgaccagaagaatcgaggacctgtgggagctgcaccccagcttcgacatcgtggtgaactgcagcggcctgggcagcagacagctggccggcgacagcaagatcttccccgtgagaggccaggtgctgcaggtgcaggccccctgggtggagcacttcatcagagacggcagcggcctgacctacatctaccccggcaccagccacgtgaccctgggcggcaccagacagaagggcgactggaacctgagccccgacgccgagaacagcagagagatcctgagcagatgctgcgccctggagcccagcctgcacggcgcctgcaacatcagagagaaggtgggcctgagaccctacagacccggcgtgagactgcagaccgagctgctggccagagacggccagagactgcccgtggtgcaccactacggccacggcagcggcggcatcagcgtgcactggggcaccgccctggaggccgccagactggtgagcgagtgcgtgcacgccctgagaacccccatccccaagagcaacctgtag

SEQ ID NO: 139819 - DNA, 1026 bp, Artificial Sequence
  derived and/or modified sequence
atggacaccgccagaatcgccgtggtgggcgccggcgtggtgggcctgagcaccgccgtgtgcatcagcaagctggtgcccagatgcagcgtgaccatcatcagcgacaagttcacccccgacaccaccagcgacgtggccgccggcatgctgatcccccacacctaccccgacacccccatccacacccagaagcagtggttcagagagaccttcaaccacctgttcgccatcgccaacagcgccgaggccggcgacgccggcgtgcacctggtgagcggctggcagatcttccagagcacccccaccgaggaggtgcccttctgggccgacgtggtgctgggcttcagaaagatgaccgaggccgagctgaagaagttcccccagtacgtgttcggccaggccttcaccaccctgaagtgcgagtgccccgcctacctgccctggctggagaagagaatcaagggcagcggcggctggaccctgaccagaagaatcgaggacctgtgggagctgcaccccagcttcgacatcgtggtgaactgcagcggcctgggcagcagacagctggccggcgacagcaagatcttccccgtgagaggccaggtgctgcaggtgcaggccccctgggtggagcacttcatcagagacggcagcggcctgacctacatctaccccggcaccagccacgtgaccctgggcggcaccagacagaagggcgactggaacctgagccccgacgccgagaacagcagagagatcctgagcagatgctgcgccctggagcccagcctgcacggcgcctgcaacatcagagagaaggtgggcctgagaccctacagacccggcgtgagactgcagaccgagctgctggccagagacggccagagactgcccgtggtgcaccactacggccacggcagcggcggcatcagcgtgcactggggcaccgccctggaggccgccagactggtgagcgagtgcgtgcacgccctgagaacccccatccccaagagcaacctgtag

SEQ ID NO: 139820 - DNA, 1110 bp, Artificial Sequence
  derived and/or modified sequence
atgcggcccgcacgccactgggaaacccgctttggcgcacgcgacttcgggggctttcaggactgctttttccgagataggctgatggacacagccaggatcgccgtggtcggggcaggtgtcgtgggcttgtctaccgccgtatgcatttctaaactcgtccctaggtgttctgttaccatcatttccgataagttcacaccagacacaacgagtgacgtggcagcagggatgctgatccctcacacatatcctgacacccctatccacacgcagaaacagtggttccgcgaaaccttcaaccatttattcgcaatcgcaaactcagcagaggctggtgatgctggtgtgcacctggtatccggatggcaaatcttccagtccacacctactgaggaagtgcccttctgggccgacgttgttctgggatttaggaaaatgaccgaggctgaactcaagaagttcccccaatatgtgtttggtcaggccttcaccacattaaaatgtgagtgtcccgcttacctgccatggttggaaaagcggattaaaggctcaggaggttggacactcacacgccggatcgaagacctttgggagctccatcctagctttgatattgtggtcaattgctcaggcttgggcagtcgccagctagcgggagactcaaagattttccctgtaagaggccaagttctgcaggtgcaggccccatgggtggaacatttcattcgggatggaagcgggctgacctatatctatcctggaacatcacatgtcaccttgggaggcaccagacagaaaggggattggaatttgtctcccgatgctgaaaattccagagaaattctctcaaggtgctgcgctttagaaccttctttgcacggcgcatgcaacattcgcgagaaggttgggctcagaccctataggccaggtgtgaggctccagactgagctgctcgcccgggatggccagcgcctcccagtggtgcaccattatggacatggcagcggcgggatttctgtgcactggggcaccgcactggaagctgcgcgtctagtttcagaatgtgtgcacgcactaagaacacctatacccaagagtaacctgtag

SEQ ID NO: 139821 - DNA, 1026 bp, Artificial Sequence
  derived and/or modified sequence
atggacaccgctagaatagctgtcgtaggagccggggtcgtgggtctttctaccgcagtgtgtataagcaagttggtaccgagatgctccgttacaattatcagtgataagttcaccccagacaccacttctgacgtggcagcagggatgctcatcccacacacttacccagacacccctatccacacccagaaacagtggtttcgggagacattcaatcatctatttgccattgcgaactctgctgaggctggagatgctggagtacatttggtgagcggatggcaaatctttcagagcacccccactgaggaagtgcccttctgggccgatgtagtactgggcttccgaaaaatgacagaggcagagctgaaaaaattccctcagtacgtgttcggacaagcctttacgacattaaagtgtgaatgccctgcgtacctgccctggttagaaaagaggattaaagggtcaggtggatggaccctcacccgacggatcgaggacttgtgggagttacatcctagctttgacatcgttgtaaattgtagtggactcggctcgcggcaactggccggtgactctaaaattttccccgtgcgaggccaggtgctgcaggtccaggccccttgggtggagcactttatcagagacgggtccgggttgacctacatttacccgggaacatcacatgtgactctcggggggactcgacagaaaggagactggaacctgtcccctgacgccgagaatagccgagagattttatccagatgctgcgccctggagcctagcctgcacggagcatgtaatatacgggagaaggtggggctacgcccttatcggccaggcgtgagactacagactgagctgcttgccagggatgggcagaggctgcccgtagtccatcactacggccacggtagcggtggcataagcgtccactggggcacggcactcgaggctgcgcgactcgtgtccgagtgcgtccacgcgttgcgaaccccaattcctaagtctaacctttag

SEQ ID NO: 139822 - DNA, 2130 bp, Artificial Sequence
  derived and/or modified sequence
ctctgtctctcagggcatgagaccagccaggcactgggaaacaaggtttggtgccagagattttggtggcttccaagactgctttttcagagacaggctcatggacacagcacggattgcagttgtcggggcaggtgtggtggggctctccacggctgtgtgcatctccaaactggtgccccgatgctccgttaccatcatttcagacaagtttactccagataccaccagtgatgtggcagccggaatgcttattcctcacacttatccagatacacccattcacacgcagaagcagtggttcagagaaacctttaatcacctctttgcaattgccaattctgcagaagctggagatgctggtgttcatttggtatcaggttggcagatatttcagagcactccgactgaagaagtgccattctgggctgacgtggttctgggatttcgaaagatgactgaggctgagctgaagaaattcccccagtatgtgtttggtcaggcttttacaaccctgaaatgtgaatgccctgcctacctcccgtggttggagaaaaggataaagggaagtggaggctggacactcactcggcgaatagaagacctgtgggaacttcatccgtcctttgacatcgtggtcaactgttcaggccttggaagcagacagcttgcaggagactcaaagattttccctgtaaggggccaagtcctccaagttcaggctccctgggtggagcattttatccgagatggcagtgggctgacatatatttatcctggtacatcccatgtaaccctaggtggaactaggcaaaaaggggactggaatctgtccccggatgcagaaaatagcagagagattctttcccgatgctgtgctctggagccctccctccacggagcctgcaacatcagggagaaggtgggcttgaggccctacaggccaggcgtgcgactgcagacagagctccttgcgcgagatggacagaggctgcctgtagtccaccactatggccatgggagtgggggcatctcagtgcactggggcactgctctggaggccgccaggctggtgagcgagtgtgtccatgccctcaggacccccattcccaagtcaaacctgtagatgacataaaatgacagcaaagagactgagagactgttgatcaaagcacagaacaggttcaaataacttttccactgcatgaaagtttaattagacatttctttgttttcaacattagaagtggtgtaacatgtaagctgagcacggtggcatgcctatagtcccagctacttgagaggctgaggcaggaggattgttgagcccaggagtttgagtgcaatctgggtaacattttttagaggtgccagttcccacctctaaaaaaaacaccaacaacaaaagaaatgatgcaacatgtaggcttacttaggaagtccagcattaatggcatagggcataaagctctattttttgttaaaaatacttcttatagagtaaaatttatttagaactgatgtccaaggacctatgcagatttatatgaatgttggaagctatagagattttgatatcatttggcttataaatccacaggaggagataatgtatggaaaacatttaaatcactgtcaattgcagagctgcctgtgatcttcttaggttatagccaagtcagcaacataattcctctaaataaaattacattgtgctcacacagtgctggattattacatttaattgaagacaaagcatgcttgctcctagtactagcagcaagcttttcctcccctcagctggtaatgatggtaggagacagagatgaagttgcctatgtatgtcatatcaattcaatagctgcctggggtcaaacacctaggggttgtacattccattactgtaaatgattgagagctggtttgtggtatggttggctttgcctaagcatttttgaagatgaacagcatgtgcagccaaagaactaatttgctaattaaggtggaacaatcattctgaatgaaatataatcagagtactccgcagtttgttaagaagtattggggaggaggggaatgtgtctcacaataaaatgagttggaattgttgagttaaatgaatttaacctg

SEQ ID NO: 139823 - DNA, 2090 bp, Artificial Sequence
  derived and/or modified sequence
ggagcaggtggtcagcagtctcttgaaaccaaagtttactgctttttcagagacaggctcatggacacagcacggattgcagttgtcggggcaggtgtggtggggctctccacggctgtgtgcatctccaaactggtgccccgatgctccgttaccatcatttcagacaagtttactccagataccaccagtgatgtggcagccggaatgcttattcctcacacttatccagatacacccattcacacgcagaagcagtggttcagagaaacctttaatcacctctttgcaattgccaattctgcagaagctggagatgctggtgttcatttggtatcaggttggcagatatttcagagcactccgactgaagaagtgccattctgggctgacgtggttctgggatttcgaaagatgactgaggctgagctgaagaaattcccccagtatgtgtttggtcaggcttttacaaccctgaaatgtgaatgccctgcctacctcccgtggttggagaaaaggataaagggaagtggaggctggacactcactcggcgaatagaagacctgtgggaacttcatccgtcctttgacatcgtggtcaactgttcaggccttggaagcagacagcttgcaggagactcaaagattttccctgtaaggggccaagtcctccaagttcaggctccctgggtggagcattttatccgagatggcagtgggctgacatatatttatcctggtacatcccatgtaaccctaggtggaactaggcaaaaaggggactggaatctgtccccggatgcagaaaatagcagagagattctttcccgatgctgtgctctggagccctccctccacggagcctgcaacatcagggagaaggtgggcttgaggccctacaggccaggcgtgcgactgcagacagagctccttgcgcgagatggacagaggctgcctgtagtccaccactatggccatgggagtgggggcatctcagtgcactggggcactgctctggaggccgccaggctggtgagcgagtgtgtccatgccctcaggacccccattcccaagtcaaacctgtagatgacataaaatgacagcaaagagactgagagactgttgatcaaagcacagaacaggttcaaataacttttccactgcatgaaagtttaattagacatttctttgttttcaacattagaagtggtgtaacatgtaagctgagcacggtggcatgcctatagtcccagctacttgagaggctgaggcaggaggattgttgagcccaggagtttgagtgcaatctgggtaacattttttagaggtgccagttcccacctctaaaaaaaacaccaacaacaaaagaaatgatgcaacatgtaggcttacttaggaagtccagcattaatggcatagggcataaagctctattttttgttaaaaatacttcttatagagtaaaatttatttagaactgatgtccaaggacctatgcagatttatatgaatgttggaagctatagagattttgatatcatttggcttataaatccacaggaggagataatgtatggaaaacatttaaatcactgtcaattgcagagctgcctgtgatcttcttaggttatagccaagtcagcaacataattcctctaaataaaattacattgtgctcacacagtgctggattattacatttaattgaagacaaagcatgcttgctcctagtactagcagcaagcttttcctcccctcagctggtaatgatggtaggagacagagatgaagttgcctatgtatgtcatatcaattcaatagctgcctggggtcaaacacctaggggttgtacattccattactgtaaatgattgagagctggtttgtggtatggttggctttgcctaagcatttttgaagatgaacagcatgtgcagccaaagaactaatttgctaattaaggtggaacaatcattctgaatgaaatataatcagagtactccgcagtttgttaagaagtattggggaggaggggaatgtgtctcacaataaaatgagttggaattgttgagttaaatgaatttaacctg

SEQ ID NO: 139824 - DNA, 1110 bp, Artificial Sequence
  derived and/or modified sequence
atgaggcctgcccggcactgggagaccaggtttggagcccgggactttggaggcttccaggactgcttcttccgggaccggctgatggacacagccagaattgctgtggtgggcgccggcgtggtgggcctgagcacagctgtgtgcatcagcaagctggtgccccgctgcagcgtgaccatcatcagtgacaagttcaccccagacaccaccagtgatgtggccgccggcatgctgatcccccacacctacccagacacccccatccacacccagaagcagtggttccgggagaccttcaaccacctgtttgccatcgccaacagcgctgaggccggagatgctggggtgcacctggtgtctggctggcagatcttccagagcacccccacagaggaggtgcccttctgggcagatgtggtgctgggcttcaggaagatgacagaggccgagctgaagaagttcccccagtatgtgtttggccaggccttcaccaccctgaagtgtgagtgcccagcctacctgccctggctggagaagaggatcaagggcagcggcggctggaccctgaccaggagaattgaggacctgtgggagctgcaccccagctttgacatcgtggtgaactgcagcggcctgggcagccggcagctggccggggacagcaagatcttccctgtgcggggccaggtgctgcaggtgcaggccccctgggtggagcacttcatcagagatggcagcggcctgacctacatctacccaggcaccagccacgtgaccctgggcggcacccggcagaagggggactggaacctgagcccagatgctgagaacagccgggagatcctgagccgctgctgtgccctggagcccagcctgcacggggcctgcaacatccgggagaaggtgggcctgcggccctacagacctggggtgcggctgcagacagagctgctggccagagatggccagaggctgcctgtggtgcaccactacggccacggcagcggcggcatctctgtgcactggggcacagccctggaggccgcccggctggtgtctgaatgtgtgcacgccctgcggacccccatccccaagagcaacctgtag

SEQ ID NO: 139825 - DNA, 1026 bp, Artificial Sequence
  derived and/or modified sequence
atggacacagccagaattgctgtggtgggcgccggcgtggtgggcctgagcacagctgtgtgcatcagcaagctggtgccccgctgcagcgtgaccatcatcagtgacaagttcaccccagacaccaccagtgatgtggccgccggcatgctgatcccccacacctacccagacacccccatccacacccagaagcagtggttccgggagaccttcaaccacctgtttgccatcgccaacagcgctgaggccggagatgctggggtgcacctggtgtctggctggcagatcttccagagcacccccacagaggaggtgcccttctgggcagatgtggtgctgggcttcaggaagatgacagaggccgagctgaagaagttcccccagtatgtgtttggccaggccttcaccaccctgaagtgtgagtgcccagcctacctgccctggctggagaagaggatcaagggcagcggcggctggaccctgaccaggagaattgaggacctgtgggagctgcaccccagctttgacatcgtggtgaactgcagcggcctgggcagccggcagctggccggggacagcaagatcttccctgtgcggggccaggtgctgcaggtgcaggccccctgggtggagcacttcatcagagatggcagcggcctgacctacatctacccaggcaccagccacgtgaccctgggcggcacccggcagaagggggactggaacctgagcccagatgctgagaacagccgggagatcctgagccgctgctgtgccctggagcccagcctgcacggggcctgcaacatccgggagaaggtgggcctgcggccctacagacctggggtgcggctgcagacagagctgctggccagagatggccagaggctgcctgtggtgcaccactacggccacggcagcggcggcatctctgtgcactggggcacagccctggaggccgcccggctggtgtctgaatgtgtgcacgccctgcggacccccatccccaagagcaacctgtag

SEQ ID NO: 139826 - DNA, 1110 bp, Artificial Sequence
  derived and/or modified sequence
atgcggcccgcccggcactgggagacccggttcggcgcccgggacttcggagggttccaggattgcttcttccgtgacaggctgatggacactgctaggattgcggttgtcggcgctggtgtggtggggctgtctaccgcagtctgtattagcaagctggtcccgagatgctcggtgacaatcatttcagacaaatttactcccgacacaacttcagacgtcgctgctggcatgctgatcccgcatacttatcctgacacaccaatccatacacaaaaacagtggttcagagagacattcaaccacctttttgccatcgctaattctgctgaagctggagatgcgggggtgcacttggtttccgggtggcagatcttccaaagcacccctaccgaggaagtcccattctgggctgacgtagtcctcggctttcggaaaatgacggaagccgaactcaaaaagttccctcagtatgtgtttggacaggccttcaccacgctgaagtgtgaatgccctgcttatctaccgtggctcgagaaaaggattaaaggtagcggcggatggacattgacccgtcgaattgaggacctgtgggagctgcacccatcgttcgacatcgtcgttaattgcagcgggctgggtagcagacagttggcaggggatagcaaaatctttccagtgagaggccaggttcttcaggtacaggcgccgtgggttgagcattttataagggatggaagcggcctgacgtacatctatccgggcacttcccatgtgaccctcggcggcactcgccaaaagggggactggaatcttagtcccgacgccgagaatagccgcgaaattctgtcccgctgctgcgctctcgagccgtctcttcacggcgcctgcaatattcgagagaaggttgggctccggccatatagaccaggcgtaaggctgcagaccgagcttctagctcgtgacgggcagaggttgcccgtggttcatcactacggccatggctcaggaggaatatccgtccactggggtacggccctggaggcggccaggctggtatccgaatgcgttcatgctctacggacacccataccaaaatctaatctttag

SEQ ID NO: 139827 - DNA, 1026 bp, Artificial Sequence
  derived and/or modified sequence
atggacaccgcccggatcgccgtggtgggcgccggcgtggtgggcctctctaccgcagtatgcattagcaagctagtcccgcgctgtagcgtgaccatcatatctgataaatttacaccagatacaacctcagatgtcgctgccggtatgctgatcccacatacatatcccgacacgcctattcacactcagaagcaatggttccgggaaacttttaaccacctgtttgcaattgccaactcagctgaggcgggcgatgccggggtgcacctggtgtctggttggcaaatctttcagagtactcctacagaggaggtgcccttctgggctgacgtcgtcctgggtttccgcaaaatgaccgaggcggagctgaagaagttcccacagtacgtgttcggccaggccttcactaccttgaagtgcgagtgtcccgcataccttccttggcttgaaaagaggatcaaggggagcggaggctggacccttacaaggaggattgaggacctatgggaacttcatccttcattcgacatcgtcgtgaattgttctggcttaggctctcggcaactggccggcgactctaaaattttcccggtgcgaggacaagtgctccaggtgcaggctccttgggtcgagcattttattagggatggctctggcctaacgtacatttaccctggtactagccacgtcactcttggaggtacccgacagaagggagactggaatttgagccccgacgccgagaactctcgggaaatcctctcccgatgctgcgcactggagccaagcttacacggagcatgcaatatcagagaaaaggttggcctgaggccatacaggcccggagttcggttgcagacggagctcctcgcccgtgatggccaaagactcccggtcgtgcaccactatggccacggtagcggcggcataagcgtccactggggcaccgctctcgaagccgcaaggctagtgagcgaatgtgtgcatgcactgcgaactcctatacccaagtccaatctctag

SEQ ID NO: 139828 - DNA, 1110 bp, Artificial Sequence
  derived and/or modified sequence
atgcgccctgcaagacactgggaaacccggttcggagcgagggatttcggaggattccaggattgcttctttagggaccgcctgatggatacagcacgaattgccgtggtgggtgccggagttgtgggactgagtacagccgtgtgcattagcaaacttgtgccccgttgcagcgtgacaatcattagcgataagttcacgcctgataccacctcagatgttgccgctgggatgctcattccccacacatacccagatacacctatccacacccagaaacaatggttccgcgaaaccttcaaccaccttttcgccatcgcgaattccgcagaagccggtgacgccggagtgcacttagtctctggatggcaaatatttcagtccaccccgacagaggaggttcccttctgggcggacgtcgttctgggcttccgtaaaatgacggaggccgagctgaagaaattcccccagtatgttttcggtcaagcctttactacactgaaatgtgagtgtccggcttacctgccgtggctggagaagcgcatcaagggaagcgggggttggacattgacgcggcgtatcgaggacctgtgggaactccacccttcattcgatattgttgtgaactgctctggcctcggatctaggcagctggcaggcgattccaagatcttccctgtgaggggccaggttctgcaggtgcaggctccatgggtggaacactttattcgggatggcagtggtctgacatatatatacccgggaaccagccatgtgacgttgggtggcacccgtcagaagggcgactggaatctgtcacctgatgcagaaaacagccgcgaaatcctgtctcgatgttgtgctctcgagccttccctccacggcgcttgtaatatcagggagaaggtggggcttcggccttacaggccaggtgtcagattgcagactgagttactggcaagggatgggcaacggctacccgtagtccaccattacggccacggatcggggggaatttctgtgcattggggcaccgctctggaggcggctaggctcgtgtctgaatgtgtgcacgctttaaggacaccgataccaaaatcgaacctgtag

SEQ ID NO: 139829 - DNA, 1026 bp, Artificial Sequence
  derived and/or modified sequence
atggacaccgcgcgtattgctgtcgtaggagcaggggttgtcgggctgtctacagcagtgtgcatctctaaactggtacccagatgcagtgtgaccataatctctgacaagtttacgccagatactacatcagatgtggccgctggaatgcttatcccacatacttaccccgacacacctatccatacccagaagcagtggttccgcgaaaccttcaatcacctgttcgccatcgctaattctgccgaggctggagatgccggtgttcacttagtgagcggctggcagatatttcagtctacacctaccgaagaagtgccgttctgggcagatgtcgtgctaggcttccgtaaaatgacagaagctgagctgaagaaatttccccagtacgtgttcgggcaggctttcacaaccctcaagtgcgaatgccctgcctacctgccgtggcttgagaagagaattaagggaagtggcggttggaccttgacccgacgcatcgaagacctgtgggagctccatccttcattcgatattgtagtgaactgcagcgggctgggatcccggcagctggcaggggacagcaagatttttccagtccggggacaggtgttacaggtgcaggcgccttgggtggagcattttattcgtgacggatcaggactgacatacatatacccaggtaccagccatgtgacactgggaggaacacgccagaagggagactggaacttgagccctgatgcggagaatagcagggagattttgagtcggtgctgtgccctcgaaccatccttacacggagcctgcaatataagggaaaaagttggcctgaggccgtacagaccgggtgtgcgtctgcagaccgaacttcttgctcgggacggtcagcgccttcctgtggtgcatcactacgggcatggctccggcggtatctcagtccactggggaacagcacttgaagctgcaaggctagtttccgagtgtgtccacgcccttagaacccccattccaaaaagtaacctctag

SEQ ID NO: 139830 - protein, 167 aa, Artificial Sequence
  derived and/or modified sequence
MLPEKALHGHPQLPRTVPTRAAMRAAGTLLAFCCLVLSTTGGPSPDTCSQDLNSRVKPGFPKTIKTNDPGVLQAARYSVEKFNNCTNDMFLFKESRITRALVQIVKGLKYMLEVEIGRTTCKKNQHLRLDDCDFQTNHTLKQTLSCYSEVWVVPWLQHFEVPVLRCH

SEQ ID NO: 139831 - protein, 145 aa, Artificial Sequence
  derived and/or modified sequence
MRAAGTLLAFCCLVLSTTGGPSPDTCSQDLNSRVKPGFPKTIKTNDPGVLQAARYSVEKFNNCTNDMFLFKESRITRALVQIVKGLKYMLEVEIGRTTCKKNQHLRLDDCDFQTNHTLKQTLSCYSEVWVVPWLQHFEVPVLRCH

SEQ ID NO: 139832 - DNA, 504 bp, Artificial Sequence
  derived and/or modified sequence
atgctgcccgagaaggccctgcacggccacccccagctgcccagaaccgtgcccaccagagccgccatgagagccgccggcaccctgctggccttctgctgcctggtgctgagcaccaccggcggccccagccccgacacctgcagccaggacctgaacagcagagtgaagcccggcttccccaagaccatcaagaccaacgaccccggcgtgctgcaggccgccagatacagcgtggagaagttcaacaactgcaccaacgacatgttcctgttcaaggagagcagaatcaccagagccctggtgcagatcgtgaagggcctgaagtacatgctggaggtggagatcggcagaaccacctgcaagaagaaccagcacctgagactggacgactgcgacttccagaccaaccacaccctgaagcagaccctgagctgctacagcgaggtgtgggtggtgccctggctgcagcacttcgaggtgcccgtgctgagatgccactag

SEQ ID NO: 139833 - DNA, 438 bp, Artificial Sequence
  derived and/or modified sequence
atgagagccgccggcaccctgctggccttctgctgcctggtgctgagcaccaccggcggccccagccccgacacctgcagccaggacctgaacagcagagtgaagcccggcttccccaagaccatcaagaccaacgaccccggcgtgctgcaggccgccagatacagcgtggagaagttcaacaactgcaccaacgacatgttcctgttcaaggagagcagaatcaccagagccctggtgcagatcgtgaagggcctgaagtacatgctggaggtggagatcggcagaaccacctgcaagaagaaccagcacctgagactggacgactgcgacttccagaccaaccacaccctgaagcagaccctgagctgctacagcgaggtgtgggtggtgccctggctgcagcacttcgaggtgcccgtgctgagatgccactag

SEQ ID NO: 139834 - DNA, 928 bp, Artificial Sequence
  derived and/or modified sequence
gctgtggccctggcacctgcccctgggctgggacagcccactgttccatgctgcccaagaaggctcagcacaggcacaaaccattgcccggcactggcccgtgctgcctgagaaggattggcacgggcacagaccactgcccccacctgccctgcgccatctacccaagaaggctcggcacgggcaccaaccactgcctccaactgccccatgctgcctgagaaggcactgcacggccacccccaactgccccgcactgtccctacccgggcagccatgcgagcggctggaactctgctggccttctgctgcctggtcttgagcaccactgggggcccttccccagatacttgttcccaggaccttaactcacgtgtgaagccaggatttcctaaaacaataaagaccaatgacccaggagtcctccaagcagccagatacagtgttgaaaagttcaacaactgcacgaacgacatgttcttgttcaaggagtcccgcatcacaagggccctagttcagatagtgaaaggcctgaaatatatgctggaggtggaaattggcagaactacctgcaagaaaaaccagcacctgcgtctggatgactgtgacttccaaaccaaccacaccttgaagcagactctgagctgctactctgaagtctgggtcgtgccctggctccagcacttcgaggtgcctgttctccgttgtcactgacccccgcctcttcagcaagaccacagccatgacaaacaccaggatgcatgctccttgtcccctcccacccgcctcatgacccagcctcacagaccctctcaggcctctgacgagtgagcgggtgaagtgccactgggtcaccgcagggcagctggaatggcagcatggtagcacctcctaacagattaaatagatcacatttgcttctaaaatt

SEQ ID NO: 139835 - DNA, 930 bp, Artificial Sequence
  derived and/or modified sequence
gctgtggccctggcacctgcccctgggctgggacagcccactgttccatgctgcccaagaaggctcagcacaggcacaaaccattgcccggcactggcccgtgctgcctgagaaggattggcacgggcacagaccactgcccccacctgccctgcgccatctacccaagaaggctcggcacgggcaccaaccactgcctccaactgccccatgctgcctgagaaggcactgcacggccacccccaactgccccgcactgtccctacccgggcagccatgcgagcggctggaactctgctggccttctgctgcctggtcttgagcaccactgggggcccttccccagatacttgttcccaggaccttaactcacgtgtgaagccaggatttcctaaaacaataaagaccaatgacccaggagtcctccaagcagccagatacagtgttgaaaagttcaacaactgcacgaacgacatgttcttgttcaaggagtcccgcatcacaagggccctagttcagatagtgaaaggcctgaaatatatgctggaggtggaaattggcagaactacctgcaagaaaaaccagcacctgcgtctggatgactgtgacttccaaaccaaccacaccttgaagcagactctgagctgctactctgaagtctgggtcgtgccctggctccagcacttcgaggtgcctgttctccgttgtcactgacccccgcctcttcagcaagaccacagccatgacaaacaccaggatgcatgctccttgtcccctcccacccgcctcatgacccagcctcacagaccctctcaggcctctgacgagtgagcgggtgaagtgccactgggtcaccgcagggcagctggaatggcagcatggtagcacctcctaacagattaaatagatcacatttgcttctaaaattaa

SEQ ID NO: 139836 - DNA, 504 bp, Artificial Sequence
  derived and/or modified sequence
atgctgcccgagaaggctttacatggacacccccagctccctcgtaccgtccccaccagggcagcaatgagagcggccggaaccctgctggcattttgttgccttgtgctgtcgaccactggcgggcccagtccggacacttgttctcaggacctgaacagtcgagtgaagcccggatttcccaaaacgattaaaacaaatgatcccggtgtgctacaggccgctcgttactctgtcgagaaattcaataactgcactaacgatatgtttctattcaaggaaagccgcatcacccgggccctggtccagattgtgaagggcctgaagtatatgctggaggtggagatcggtcgtacaacatgcaaaaagaaccagcacctgcgcttggatgattgcgacttccagacgaaccacactctcaaacagactctctcctgctacagtgaagtgtgggtcgtcccctggctccaacacttcgaggtgcccgtgctccgctgtcactag

SEQ ID NO: 139837 - DNA, 438 bp, Artificial Sequence
  derived and/or modified sequence
atgcgggcagctggcacacttctggctttctgctgtttggttctatccacaaccggggggccctcaccggacacttgttctcaggacctgaattcaagggtgaagcctgggtttcctaaaacaataaagactaatgatccaggcgtattacaggctgcaagatacagcgtcgagaagtttaataactgcaccaacgacatgttcctgttcaaggagtctagaattacacgcgcgctcgtccagatagtgaagggcctcaaatacatgctcgaggtggagatcgggcggacgacttgtaagaaaaaccagcatttgcgcctggatgattgtgacttccagacaaatcatacactgaagcagactctctcctgctactctgaagtatgggtggtaccctggttacagcactttgaagtgcccgttcttcgctgtcattag

SEQ ID NO: 139838 - DNA, 504 bp, Artificial Sequence
  derived and/or modified sequence
atgctgcctgagaaggccctgcacggccacccccagctgcccaggacagtgcccaccagggctgccatgagagctgctggcaccctgctggccttctgctgcctggtgctgagcaccaccggcggccccagcccagacacctgcagccaggacctgaacagccgggtgaagccaggcttccccaagaccatcaagaccaatgaccccggggtgctgcaggccgcccgctacagcgtggagaagttcaacaactgcaccaatgacatgttcctgttcaaggagagccgcatcacccgggccctggtgcagatcgtgaagggcctgaagtacatgctggaggtggagatcggccgcaccacctgcaagaagaaccagcacctgcggctggatgactgtgacttccagaccaaccacaccctgaagcagaccctgagctgctacagcgaggtgtgggtggtgccctggctgcagcactttgaggtgcctgtgctgcgctgccactag

SEQ ID NO: 139839 - DNA, 438 bp, Artificial Sequence
  derived and/or modified sequence
atgagagctgctggcaccctgctggccttctgctgcctggtgctgagcaccaccggcggccccagcccagacacctgcagccaggacctgaacagccgggtgaagccaggcttccccaagaccatcaagaccaatgaccccggggtgctgcaggccgcccgctacagcgtggagaagttcaacaactgcaccaatgacatgttcctgttcaaggagagccgcatcacccgggccctggtgcagatcgtgaagggcctgaagtacatgctggaggtggagatcggccgcaccacctgcaagaagaaccagcacctgcggctggatgactgtgacttccagaccaaccacaccctgaagcagaccctgagctgctacagcgaggtgtgggtggtgccctggctgcagcactttgaggtgcctgtgctgcgctgccactag

SEQ ID NO: 139840 - DNA, 504 bp, Artificial Sequence
  derived and/or modified sequence
atgctgcccgagaaggccctgcacggccacccccagctgccccggacagtcccgacccgggccgcaatgcgggcggccggaacgctccttgccttttgctgccttgtgttaagtactactggggggccttcacccgacacatgttctcaggacctgaacagtcgagtcaagcctggattccccaagacaatcaaaacaaatgatccaggagtgcttcaggctgccaggtactcagttgagaaattcaacaactgtacgaatgacatgttcctgttcaaggaatctcgcatcactcgcgctttggtacagattgtgaaaggtctgaagtatatgctcgaagtcgagatcggccgcactacttgcaaaaaaaaccagcacctgcggctggatgattgtgactttcagaccaaccataccttaaagcagacactttcttgttacagcgaagtgtgggtagtgccgtggttacagcacttcgaagttccagtgcttcgctgccactag

SEQ ID NO: 139841 - DNA, 438 bp, Artificial Sequence
  derived and/or modified sequence
atgcgggccgccggcaccctgctggccttctgctgcctggtgctgtccactaccgggggtccatcgccagatacctgcagtcaggatctcaactcccgcgtgaagccgggcttccccaaaaccatcaagacaaatgatccaggcgttttgcaggctgctagatactccgtggagaaatttaacaattgcacaaacgacatgtttctgtttaaagagtctaggattactagggccctagtgcagattgtcaagggcctaaaatacatgctggaggtggaaatcggcaggaccacctgcaaaaaaaaccaacacctgcggctagacgattgtgacttccaaacaaatcacaccttgaaacagactttgtcttgctactccgaagtgtgggtagtgccttggctgcaacacttcgaagtcccagtgctccggtgccactag

SEQ ID NO: 139842 - DNA, 504 bp, Artificial Sequence
  derived and/or modified sequence
atgctgcctgagaaggctttacacggccaccctcagctgcctcggactgtgcccactagagctgccatgcgggctgccggaaccctgttggcgttctgttgtttagtcctgtcaactactggcggaccatccccagacacttgtagtcaggatcttaactctcgggtgaagcctggatttcccaagaccatcaagacaaatgatccaggggtgctgcaggccgctcggtattctgtggagaagttcaacaattgcaccaatgacatgtttttgttcaaggagagcagaatcacacgcgcactagtccaaatcgtgaagggtctgaaatacatgttagaagtggagattgggagaacaacctgtaagaagaatcagcacttgcgtttggacgactgtgatttccaaactaaccataccctgaagcaaaccttaagctgctacagcgaggtctgggtcgtgccctggttgcagcacttcgaggtccccgtcctacggtgtcactag

SEQ ID NO: 139843 - DNA, 438 bp, Artificial Sequence
  derived and/or modified sequence
atgagggctgctggaaccctgctcgcattctgttgtttggtcctcagcaccacagggggacctagtccagacacatgctctcaggatctgaattctcgagtgaagccaggttttccaaaaacgatcaagacaaacgaccccggagtgctccaggccgcacggtactcagtcgagaaatttaacaattgtacaaatgatatgttcctctttaaggaaagccgtattacacgggcactcgtccagatcgtgaaaggcttaaagtacatgttggaggtcgaaataggtaggacaacatgcaagaagaaccagcatttgcgactagatgactgcgacttccagacaaaccataccttgaagcaaacactgtcctgttattctgaggtttgggtggtaccgtggctgcagcacttcgaagtccccgtgctcagatgccattag

SEQ ID NO: 139844 - DNA, 504 bp, Artificial Sequence
  derived and/or modified sequence
atgctgccagaaaaagccctccacggacaccctcagcttcctcgcaccgtcccaactcgtgccgcaatgcgcgctgccggaacccttctcgccttttgctgtctggtattatcaaccaccggcggacctagccctgatacctgtagccaggacctgaactcaagagtgaaacccggcttccctaagacgataaaaactaacgatccaggcgtgctgcaagctgcgcgatacagcgttgagaaattcaataactgtactaacgacatgtttttatttaaggagtctcggatcactcgcgcgctggtgcagattgtgaagggcctaaaatatatgcttgaggtagaaattgggcgtacgacttgcaaaaaaaatcagcacctccgactggatgattgcgactttcagacaaaccatacgttgaaacagacactctcttgctacagcgaagtgtgggtggttccctggctacagcatttcgaagtgccagtactccgctgtcattag

SEQ ID NO: 139845 - DNA, 438 bp, Artificial Sequence
  derived and/or modified sequence
atgcgtgccgcaggaaccttactagctttctgttgcctcgtgctcagtactacaggcggcccttcaccagacacttgctcccaagacttgaacagtcgtgtcaaaccaggattccctaagaccattaagacaaacgaccctggcgtgttgcaggcagcccggtatagtgtggagaaattcaataattgtacaaatgatatgttccttttcaaagaatctcggataaccagagccctagtgcagatagtgaaaggattaaagtacatgttggaggtagaaataggaagaaccacctgtaaaaaaaaccagcatcttaggctcgacgattgcgattttcaaacaaatcacaccctgaagcagacactgtcatgttacagtgaggtctgggttgtaccctggttacagcattttgaagtgccagtacttagatgccattag

SEQ ID NO: 139846 - DNA, 504 bp, Artificial Sequence
  derived and/or modified sequence
atgttgcccgagaaggccttacatggacacccgcaactgccaagaacagtgcctacacgagctgctatgcgtgccgctgggacactactcgcattttgctgcttggttctgtcgactaccgggggtccttcacccgatacttgttcacaggatctgaattcacgagtaaaacccggattcccaaaaactattaagactaacgatcctggcgtcctacaagccgcccgatactctgtcgaaaaattcaacaattgcacaaacgacatgtttctctttaaggagagtcgcatcactagagctctcgtgcagattgtgaaggggctgaagtacatgctggaggtggaaattggccggacaacatgcaagaagaaccaacatttacgcctagacgactgtgattttcaaactaaccacacccttaaacagacgttgtcctgctattctgaggtatgggtagtgccctggctgcaacatttcgaggtacctgtgttacgctgtcactag

SEQ ID NO: 139847 - DNA, 438 bp, Artificial Sequence
  derived and/or modified sequence
atgcgtgccgcaggaaccttactagctttctgttgcctcgtgctcagtactacaggcggcccttcaccagacacttgctcccaagacttgaacagtcgtgtcaaaccaggattccctaagaccattaagacaaacgaccctggcgtgttgcaggcagcccggtatagtgtggagaaattcaataattgtacaaatgatatgttccttttcaaagaatctcggataaccagagccctagtgcagatagtgaaaggattaaagtacatgttggaggtagaaataggaagaaccacctgtaaaaaaaaccagcaccttcggctagatgattgtgattttcagacaaaccacaccctgaagcagacgctgtcctgttatagcgaggtttgggttgttccctggctgcagcacttcgaggtccccgtcctaagatgccactag

SEQ ID NO: 139848 - RNA, 504 nt, Artificial Sequence
  derived and/or modified sequence
augcugccagaaaaagcccuccacggacacccucagcuuccucgcaccgucccaacucgugccgcaaugcgcgcugccggaacccuucucgccuuuugcugucugguauuaucaaccaccggcggaccuagcccugauaccuguagccaggaccugaacucaagagugaaacccggcuucccuaagacgauaaaaacuaacgauccaggcgugcugcaagcugcgcgauacagcguugagaaauucaauaacuguacuaacgacauguuuuuauuuaaggagucucggaucacucgcgcgcuggugcagauugugaagggccuaaaauauaugcuugagguagaaauugggcguacgacuugcaaaaaaaaucagcaccuccgacuggaugauugcgacuuucagacaaaccauacguugaaacagacacucucuugcuacagcgaagugugggugguucccuggcuacagcauuucgaagugccaguacuccgcugucauuag

SEQ ID NO: 139849 - RNA, 438 nt, Artificial Sequence
  derived and/or modified sequence
augcgugccgcaggaaccuuacuagcuuucuguugccucgugcucaguacuacaggcggcccuucaccagacacuugcucccaagacuugaacagucgugucaaaccaggauucccuaagaccauuaagacaaacgacccuggcguguugcaggcagcccgguauaguguggagaaauucaauaauuguacaaaugauauguuccuuuucaaagaaucucggauaaccagagcccuagugcagauagugaaaggauuaaaguacauguuggagguagaaauaggaagaaccaccuguaaaaaaaaccagcaucuuaggcucgacgauugcgauuuucaaacaaaucacacccugaagcagacacugucauguuacagugaggucuggguuguacccugguuacagcauuuugaagugccaguacuuagaugccauuag

SEQ ID NO: 139850 - RNA, 504 nt, Artificial Sequence
  derived and/or modified sequence
auguugcccgagaaggccuuacauggacacccgcaacugccaagaacagugccuacacgagcugcuaugcgugccgcugggacacuacucgcauuuugcugcuugguucugucgacuaccggggguccuucacccgauacuuguucacaggaucugaauucacgaguaaaacccggauucccaaaaacuauuaagacuaacgauccuggcguccuacaagccgcccgauacucugucgaaaaauucaacaauugcacaaacgacauguuucucuuuaaggagagucgcaucacuagagcucucgugcagauugugaaggggcugaaguacaugcuggagguggaaauuggccggacaacaugcaagaagaaccaacauuuacgccuagacgacugugauuuucaaacuaaccacacccuuaaacagacguuguccugcuauucugagguauggguagugcccuggcugcaacauuucgagguaccuguguuacgcugucacuag

SEQ ID NO: 139851 - RNA, 438 nt, Artificial Sequence
  derived and/or modified sequence
augcgugccgcaggaaccuuacuagcuuucuguugccucgugcucaguacuacaggcggcccuucaccagacacuugcucccaagacuugaacagucgugucaaaccaggauucccuaagaccauuaagacaaacgacccuggcguguugcaggcagcccgguauaguguggagaaauucaauaauuguacaaaugauauguuccuuuucaaagaaucucggauaaccagagcccuagugcagauagugaaaggauuaaaguacauguuggagguagaaauaggaagaaccaccuguaaaaaaaaccagcaccuucggcuagaugauugugauuuucagacaaaccacacccugaagcagacgcuguccuguuauagcgagguuuggguuguucccuggcugcagcacuucgagguccccguccuaagaugccacuag

SEQ ID NO: 139852 - protein, 372 aa, Artificial Sequence
  derived and/or modified sequence
MSEAGEATTTTTTTLPQAPTEAAAAAPQDPAPKSPVGSGAPQAAAPAPAAHVAGNPGGDAAPAATGTAAAASLATAAGSEDAEKKVLATKVLGTVKWFNVRNGYGFINRNDTKEDVFVHQTAIKKNNPRKYLRSVGDGETVEFDVVEGEKGAEAANVTGPDGVPVEGSRYAADRRRYRRGYYGRRRGPPRNYAGEEEEEGSGSSEGFDPPATDRQFSGARNQLRRPQYRPQYRQRRFPPYHVGQTFDRRSRVLPHPNRIQAGEIGEMKDGVPEGAQLQGPVHRNPTYRPRYRSRGPPRPRPAPAVGEAEDKENQQATSGPNQPSVRRGYRRPYNYRRRPRPPNAPSQDGKEAKAGEAPTENPAPPTQQSSAE

SEQ ID NO: 139853 - DNA, 1976 bp, Artificial Sequence
  derived and/or modified sequence
agaaaaacttgtgcggggccatttttggggcagtaagatcgagcgaggagcccaagagcgagcgcgcagcacgaagctcgagccgcctccgccgcgcgaccccacctcggccgccgccgcctgcgccgcgagatccgccccggcctccccgagagcgagccccggccgccgcgaccaccagccgcgctaaccgccgaccaaccgccaccgaggcgcctgagcgagagcagaggaggaggaggcatgagtgaggcgggcgaggccaccaccaccaccaccaccaccctcccgcaggctccgacggaggcggccgccgcggctccccaggaccccgcgcccaagagcccggtgggcagcggtgcgccccaggccgcggccccggcgcccgccgcccacgtcgcaggaaaccccggtggggacgcggcccccgcagccacgggcaccgcggccgccgcctctttagccaccgccgccggcagcgaagacgcggagaaaaaagttctcgccaccaaagtccttggcactgtcaaatggttcaacgtcagaaatggatatggatttataaatcgaaatgacaccaaagaagatgtatttgtacatcagactgccatcaagaagaataacccacggaaatatctgcgcagtgtaggagatggagaaactgtagagtttgatgtggttgaaggagagaagggtgcagaagctgccaatgtgactggcccggatggagttcctgtggaagggagtcgttacgctgcagatcggcgccgttacagacgtggctactatggaaggcgccgtggccctccccggaattacgctggggaggaggaggaggaagggagcggcagcagtgaaggatttgacccccctgccactgataggcagttctctggggcccggaatcagctgcgccgcccccagtatcgccctcagtaccggcagcggcggttcccgccttaccacgtgggacagacctttgaccgtcgctcacgggtcttaccccatcccaacagaatacaggctggtgagattggagagatgaaggatggagtcccagagggagcacaacttcagggaccggttcatcgaaatccaacttaccgcccaaggtaccgtagcaggggacctcctcgcccacgacctgccccagcagttggagaggctgaagataaagaaaatcagcaagccaccagtggtccaaaccagccgtctgttcgccgtggataccggcgtccctacaattaccggcgtcgcccgcgtcctcctaacgctccttcacaagatggcaaagaggccaaggcaggtgaagcaccaactgagaaccctgctccacccacccagcagagcagtgctgagtaacaccaggctcctcaggcaccttcaccatcggcaggtgacctaaagaattaatgaccattcagaaataaagcaaaaagcaggccacaaccttaaccaacaccaaagaaacatccaagcaataaagtggaagactaaccaagatttggacattggaatgtttactgttattctttaagaaacaactacaaaaagaaaatgtcaacaaatttttccagcaagctgagaacctgggaattcctgcacggaagacaagagagtagcctctccagtttcagcaaccgctaggtttctattttttttcctggtttttactgttttggtaatatatatattgaaacaagaaatattaataccacatggggagaaccccaaccaaagaaatctgaaatatatagtaaatgcttttttttccgtttttgttcattttggatgctggtgctaaacctccaagtgtcatgatttaaaaaaaaaaaaaatttatgtccttcttatttatttctaggatgaggggaggataacatttttgctttcttatgtgactctctttgaaaatgtgcagtaagaaattcctcaaaaataaaatttttacccttcagaggacagaatgtttaaaa

SEQ ID NO: 139854 - DNA, 1119 bp, Artificial Sequence
  derived and/or modified sequence
atgagcgaggccggcgaggccaccaccaccaccaccaccaccctgccccaggcccccaccgaggccgccgccgccgccccccaggaccccgcccccaagagccccgtgggcagcggcgccccccaggccgccgcccccgcccccgccgcccacgtggccggcaaccccggcggcgacgccgcccccgccgccaccggcaccgccgccgccgccagcctggccaccgccgccggcagcgaggacgccgagaagaaggtgctggccaccaaggtgctgggcaccgtgaagtggttcaacgtgagaaacggctacggcttcatcaacagaaacgacaccaaggaggacgtgttcgtgcaccagaccgccatcaagaagaacaaccccagaaagtacctgagaagcgtgggcgacggcgagaccgtggagttcgacgtggtggagggcgagaagggcgccgaggccgccaacgtgaccggccccgacggcgtgcccgtggagggcagcagatacgccgccgacagaagaagatacagaagaggctactacggcagaagaagaggcccccccagaaactacgccggcgaggaggaggaggagggcagcggcagcagcgagggcttcgacccccccgccaccgacagacagttcagcggcgccagaaaccagctgagaagaccccagtacagaccccagtacagacagagaagattccccccctaccacgtgggccagaccttcgacagaagaagcagagtgctgccccaccccaacagaatccaggccggcgagatcggcgagatgaaggacggcgtgcccgagggcgcccagctgcagggccccgtgcacagaaaccccacctacagacccagatacagaagcagaggcccccccagacccagacccgcccccgccgtgggcgaggccgaggacaaggagaaccagcaggccaccagcggccccaaccagcccagcgtgagaagaggctacagaagaccctacaactacagaagaagacccagaccccccaacgcccccagccaggacggcaaggaggccaaggccggcgaggcccccaccgagaaccccgccccccccacccagcagagcagcgccgagtag

SEQ ID NO: 139855 - DNA, 1119 bp, Artificial Sequence
  derived and/or modified sequence
atgtccgaggccggtgaggctaccaccaccaccacgaccacactaccacaggcacccaccgaggccgcagccgcagctccacaagaccccgcccccaaaagtcccgtggggagtggcgcaccccaggctgctgcacccgctcctgcggctcacgttgcaggcaatccggggggcgacgccgcccccgcagccacagggaccgcagcagctgcttctctcgccaccgcggccggttcagaggacgcggaaaaaaaggtattagctaccaaagtgctgggcactgtgaaatggttcaatgtaaggaacggctacgggttcattaaccgtaatgacaccaaagaggacgtattcgttcaccagacagcaattaagaaaaacaacccgcgtaaatacctgcgaagcgttggagacggggaaaccgtggaattcgatgtggtggagggagagaaaggtgcagaggccgcaaacgtcacaggaccagatggggtgccagttgaggggagcaggtatgcagcagataggcgccgctataggaggggatattacggaaggcggcggggtccaccacgcaattacgccggcgaagaggaggaggaaggtagtggcagttccgagggctttgatcctcccgcaacggaccgccagtttagcggggcccgtaaccagctgagaaggcctcaatacagaccacagtaccgccagaggcgctttcccccgtaccacgtcggacagacattcgataggcgaagccgagttctgccacaccctaatcggatccaggctggcgagatcggggagatgaaagatggagttcctgagggagcccagttgcagggacctgtgcatcgtaatccaacttaccgtcctagatataggtccagaggccccccaagaccacgcccagcccccgccgtgggagaagctgaggacaaggaaaatcaacaagctacgagtgggcccaatcaaccatccgtccgtcgcggctatcggaggccttataattaccgacgcaggccgcgcccccctaatgcgccatcgcaagacggaaaggaggccaaagcaggcgaagcacctacagaaaatcccgctccaccaactcagcaatcctccgcagaatag

SEQ ID NO: 139856 - DNA, 1119 bp, Artificial Sequence
  derived and/or modified sequence
atgtctgaggccggggaggccaccaccaccaccaccaccaccctgccccaggcccccacagaggccgctgctgctgccccccaggaccctgcccccaagagccctgtgggcagcggggccccccaggccgccgccccagccccagctgcccacgtggccggcaaccctggaggagatgctgccccagctgccactggaacagctgctgctgccagcctggccacagctgctggctctgaagatgctgagaagaaggtgctggccaccaaggtgctgggcaccgtgaagtggttcaacgtgagaaatggctacggcttcatcaacagaaatgacaccaaggaggatgtgtttgtgcaccagacagccatcaagaagaacaaccccaggaagtacctgcggtctgtgggagatggagagaccgtggagtttgatgtggtggagggggagaagggagctgaggccgccaacgtgacaggcccagatggagtgcctgtggagggcagccgctatgctgctgacagaagacgctaccgccggggctactacggcagaagaagaggcccccccaggaactatgctggggaggaggaggaggagggcagcggcagcagcgagggctttgatcctccagccacagaccggcagttcagcggggccaggaaccagctgcggcggccccagtaccggccccagtaccggcagaggcgcttccccccctaccacgtgggccagacctttgaccggcgcagccgggtgctgccccaccccaaccgcatccaggccggggagatcggggagatgaaggatggagtgcctgagggcgcccagctgcagggccctgtgcacaggaaccccacctaccggccccgctaccgcagccggggccccccccggcccaggcctgccccagctgtgggggaggccgaggacaaggagaaccagcaggccaccagcggccccaaccagcccagcgtgcggcggggctaccgccggccctacaactacagaagaagaccccggcccccaaatgcccccagccaggacggcaaggaggccaaggccggggaggcccccacagagaacccagccccacccacccagcagagcagcgctgagtag

SEQ ID NO: 139857 - DNA, 1119 bp, Artificial Sequence
  derived and/or modified sequence
atgagcgaggccggcgaggccaccaccaccaccaccaccaccctgccccaggcacccaccgaagctgcagccgccgccccccaagatcccgccccaaaaagcccagtagggagcggtgcaccccaggcagctgccccagcccccgccgcccacgtggcaggtaatccagggggggacgctgccccagctgcaacaggcactgcggccgccgccagtctggcaaccgctgctggctccgaagatgcggagaaaaaagtactcgccacgaaggtcttgggcaccgtgaagtggttcaacgtgcgtaatggatatggattcattaacagaaacgataccaaggaagatgtgtttgtccaccaaactgcaatcaaaaagaataaccctcgcaagtatctccgcagcgtgggggacggggaaacagtggaatttgacgtggttgagggtgaaaagggagccgaggctgccaacgtgaccgggcctgatggcgtccctgtagagggcagtaggtatgctgcagaccgtcgaagataccgtagagggtactacggccggcgtaggggtccccctagaaattatgccggcgaagaggaagaagaagggtcgggttcatcggagggttttgatcccccagccacagatcgtcagttcagcggggcgaggaaccagctaaggcggcctcaatacaggccccagtatcgacagcgacgcttcccaccttaccacgtcggccagacttttgataggcggagccgcgtcctgccccaccccaataggattcaagccggagaaatcggagagatgaaggatggggttccagaaggcgcccagctgcaggggccagttcaccgtaatccaacatatcgaccccgttatcgaagtaggggtccaccccgcccaagacccgccccagccgtgggagaggcagaggacaaagagaaccagcaagctaccagtgggccaaaccagcctagtgttaggaggggctaccgtcgaccctacaactacagacgaagacctcggcctcccaacgcaccctcacaggatggcaaagaggccaaagcgggggaagcacccaccgagaaccccgctcctcccacccagcaaagttccgccgaatag

SEQ ID NO: 139858 - DNA, 1119 bp, Artificial Sequence
  derived and/or modified sequence
atgtccgaggccggagaggcaaccaccacaaccactacgaccctgccccaagcaccaaccgaggcggcagccgcagcacctcaggaccctgctcccaagagtcccgtagggtctggagctccacaggccgctgctcctgcgccagccgcacacgtcgctggcaacccaggaggcgacgccgctccagccgcaactggcaccgccgcagccgcatccctcgccacagcagctggatcagaggacgctgaaaagaaggtcctcgcaactaaggtcctcggaaccgtgaaatggttcaacgttagaaatggctatggattcatcaataggaatgacaccaaagaggatgttttcgttcaccagacggccataaagaaaaacaacccccgaaagtatctgcgctccgtgggggatggggagactgtagagtttgacgtggtggagggagagaagggagcggaggcagcaaatgtaactgggccagatggtgtgcccgtcgaaggcagccgttatgcagccgacaggcgaaggtaccgccgtggctactatggccgaagacgaggcccacccagaaactacgccggtgaggaggaggaagagggctctggatcaagcgagggcttcgacccacctgctacagatcggcagttcagcggcgctcgaaatcagctgcgacgtccacagtatcgccctcaatatcgtcagcgtcggtttcccccttatcacgttggacagacattcgatagacgctcacgggtgctgccccaccccaaccgaattcaggccggtgaaatcggcgagatgaaggacggggttcccgagggagcgcaactccagggacctgtgcatagaaacccaacttatcgaccgagatacaggtctcgcggtcctccgaggccaaggcctgcgccagctgtcggggaagcggaagacaaagagaatcagcaggctacttccgggccaaaccaaccgtctgttagaagaggctatcggaggccctacaactacagacgtcgcccaagaccccctaacgcaccttcgcaggacgggaaggaggcgaaggccggagaggcaccgactgaaaacccggctcccccaacacagcagtcttcagcagaatag

SEQ ID NO: 139859 - DNA, 1796 bp, Artificial Sequence
  derived and/or modified sequence
gcgaggagcccaagagagagcgcgcagcacgaagctcgagccgcctccgccgcgcgaccccacctcggccgccgccgcctgcgccgcgagatccgccccggcctccccgagagcgagccccggccgccgcgaccaccagccgcgctaaccgccgaccaaccgccaccgaggcgcctgagcgagagcagaggaggaggaggcatgagtgaggcgggcgaggccaccaccaccaccaccaccaccctcccgcaggctccgacggaggcggccgccgcggctccccaggaccccgcgcccaagagcccggtgggcagcggtgcgccccaggccgcggccccggcgcccgccgcccacgtcgcaggaaaccccggtggggacgcggcccccgcagccacgggcaccgcggccgccgcctctttagccaccgccgccggcagcgaagacgcggagaaaaaagttctcgccaccaaagtccttggcactgtcaaatggttcaacgtcagaaatggatatggatttataaatcgaaatgacaccaaagaagatgtatttgtacatcagactgccatcaagaagaataacccacggaaatatctgcgcagtgtaggagatggagaaactgtagagtttgatgtggttgaaggagagaagggtgcagaagctgccaatgtgactggcccggatggagttcctgtggaagggagtcgttacgctgcagatcggcgccgttacagacgtggctactatggaaggcgccgtggccctccccggaattacgctggggaggaggaggaggaagggagcggcagcagtgaaggatttgacccccctgccactgataggcagttctctggggcccggaatcagctgcgccgcccccagtatcgccctcagtaccggcagcggcggttcccgccttaccacgtgggacagacctttgaccgtcgctcacgggtcttaccccatcccaacagaatacaggctggtgagattggagagatgaaggatggagtcccagagggagcacaacttcagggaccggttcatcgaaatccaacttaccgcccaaggtaccgtagcaggggacctcctcgcccacgacctgccccagcagttggagaggctgaagataaagaaaatcagcaagccaccagtggtccaaaccagccgtctgttcgccgtggataccggcgtccctacaattaccggcgtcgcccgcgtcctcctaacgctccttcacaagatggcaaagaggccaaggcaggtgaagcaccaactgagaaccctgctccacccacccagcagagcagtgctgagtaacaccaggctcctcaggcaccttcaccatcggcaggtgacctaaagaattaatgaccattcagaaataaagcaaaaagcaggccacaaccttaaccaacaccaaagaaacatccaagcaataaagtggaagactaaccaagatttggacattggaatgtttactgttattctttaagaaacaactacaaaaagaaaatgtcaacaaatttttccagcaagctgagaacctgggaattcctgcacggaagacaagagagtagcctctccagtttcagcaaccgctaggtttctattttttttcctggtttttactgttttggtaatatatatattgaaacaagaaatattaataccacatggggagaaccccaaccaaagaaatctgaaatatatagtaaatgcttttttttccgtttttgttcattttggatgctggtgctaaacctccaagtgtcatgatttaaaaaaaaaaaaaa

SEQ ID NO: 139860 - protein, 641 aa, Artificial Sequence
  derived and/or modified sequence
MPPPLPLLLLTVLVVAAARPGCEFERNPAATCVDLQLRTCSDAAYNHTTFPNLLQHRSWEVVEASSEYILLSVLHQLLEGQCNPDLRLLGCAVLAPRCEGGWVRRPCRHICEGLREVCQPAFDAIDMAWPYFLDCHRYFTREDEGCYDPLEKLRGGLEADEALPSGLPPTFIRFSHHSYAQMVRVLRRTASRCAHVARTYSIGRSFDGRELLVIEFSSRPGQHELMEPEVKLIGNIHGNEVAGREMLIYLAQYLCSEYLLGNPRIQRLLNTTRIHLLPSMNPDGYEVAAAEGAGYNGWTSGRQNAQNLDLNRNFPDLTSEYYRLAETRGARSDHIPIPQHYWWGKVAPETKAIMKWMQTIPFVLSASLHGGDLVVSYPFDFSKHPQEEKMFSPTPDEKMFKLLSRAYADVHPMMMDRSENRCGGNFLKRGSIINGADWYSFTGGMSDFNYLHTNCFEITVELGCVKFPPEEALYILWQHNKESLLNFVETVHRGIKGVVTDKFGKPVKNARISVKGIRHDITTAPDGDYWRLLPPGIHIVIAQAPGYAKVIKKVIIPARMKRAGRVDFILQPLGMGPKNFIHGLRRTGPHDPLGGASSLGEATEPDPLRARRQPSADGSKPWWWSYFTSLSTHRPRWLLKY

SEQ ID NO: 139861 - DNA, 1926 bp, Artificial Sequence
  derived and/or modified sequence
atgccacctcccctgccactcctgttgttaactgtgcttgtggtggcggctgcacgacccggatgtgagtttgagcgaaacccagccgctacttgtgtcgacctacaactaaggacatgcagcgatgccgcatacaatcacactacatttcccaatctgctacaacaccgctcgtgggaggttgtggaggcaagctcagagtacattctgttatcggtgctacatcaattgctggaaggccagtgtaatcccgacctgagactgcttggctgtgcagtcctggcccctaggtgtgagggcggatgggttagacgaccctgccggcacatttgcgagggacttagggaggtctgccagcctgcttttgatgcgattgatatggcatggccatactttctggattgtcaccggtatttcacacgggaagatgaggggtgctacgatcccttagagaaactgcgcggaggccttgaggctgacgaggctttgcccagcggactgccacccacattcattaggttttctcatcatagctacgctcagatggtgcgtgtgctgaggcggaccgcttcccggtgcgcccatgttgccagaacgtactctatcggtcggtcgtttgatggcagagagctccttgtgatcgagttttcctctcgacctggacagcacgagctcatggagccagaggtaaagcttatcggcaacatccacggtaatgaagttgcgggaagggaaatgctcatctacctcgctcagtatctctgcagtgaatacctgctggggaaccccaggattcagcgtttgctgaacactactagaattcacctgttgccttcgatgaacccagacggctacgaggtagccgctgccgagggggctggatacaatggctggacaagtgggagacagaatgctcagaacctggatttgaataggaacttcccagacttgacttccgagtattacaggcttgccgagaccaggggggctaggagtgatcatattccaatcccacagcattattggtggggtaaggtagctccggagacaaaggcaatcatgaaatggatgcagacaattcctttcgtgctgtcagcaagcttgcatggaggggatctcgtggtgagttacccctttgactttagtaaacatccgcaggaagaaaagatgttcagccccacgccggatgaaaagatgtttaaactcctcagtcgcgcttacgcagacgtccatcccatgatgatggacagatctgagaaccggtgcggcggtaactttctcaagaggggttcaattatcaatggggctgactggtactcttttaccggaggcatgtctgattttaattacctgcacacaaactgtttcgagatcacggtggagcttggatgcgtcaagttccctcccgaggaggctctgtatattttgtggcagcacaataaggaatcactgcttaattttgtggagacggttcatcgaggtatcaaaggagttgtaacagacaagttcggcaaacccgttaagaacgccagaattagcgtaaaggggattaggcacgatattacgaccgcccctgatggagactactggagattattacccccaggaatccatattgtgattgctcaggccccaggatacgccaaggtgattaaaaaggtgatcatccccgcacggatgaaaagggctggaagagtggacttcattctccagcctttgggtatgggtcctaaaaacttcatccacggcctcagaagaaccggccctcacgaccccctgggaggggcttcttctctgggtgaggctactgagccggacccactccgtgcccgacggcagcctagtgctgacgggtctaagccttggtggtggtcttatttcacgtctctgagcacacataggccaagatggttacttaaatattag

SEQ ID NO: 139862 - DNA, 1926 bp, Artificial Sequence
  derived and/or modified sequence
atgcccccgccactgccactcctgctcctgacggtgctcgtggtcgctgctgcccgtcccgggtgtgagttcgagcgaaatcccgctgcaacgtgtgttgacttacagctgagaacctgcagcgatgctgcttacaatcacacaacatttcctaatctcctgcaacaccgctcatgggaggtggttgaggcctcctctgagtacattttgctttctgtccttcatcaactattagaaggccaatgcaacccagacctcaggttgctgggttgcgccgttcttgcccccaggtgcgaagggggttgggtacggcgaccatgcagacacatctgtgagggcctacgcgaagtgtgtcagcctgcttttgacgctatcgacatggcctggccttactttttggattgccaccggtacttcacgagagaggatgaaggatgctacgatcccctggagaagctgcgcggaggactggaggctgatgaagccctgccgtctggcctgcctcctacttttattcggtttagccatcactcctatgctcagatggtgagagttctccgcaggaccgccagccgctgtgctcatgtggcgcgcacgtacagcatcgggaggagcttcgacggacgcgagctgcttgtcatagaatttagctcaaggcctggacaacacgaacttatggaacccgaggttaagctaataggaaatatccatggaaatgaggtagcaggcagggaaatgctgatctacttggcacagtacctctgttccgaatacttgttgggtaatccgcgtattcagaggttacttaacaccactcgcatccacctgcttccctccatgaatcccgatggctatgaggtcgccgcggctgagggagcaggctataacggatggacttctggcagacaaaatgctcaaaacttagatcttaacagaaattttcctgacctgacaagcgaatactaccggctggccgagaccagaggcgccagatctgaccacattccgattcctcagcactactggtggggaaaagtggcccctgaaaccaaagccatcatgaaatggatgcaaaccataccgtttgtcttatccgcctcactgcacggaggtgatctcgttgtgtcttatccatttgatttttcgaagcaccctcaggaagagaaaatgtttagtcctactcctgatgaaaagatgttcaaattactctcaagggcttatgcagacgtccaccccatgatgatggatcggtctgagaacagatgcggaggtaatttcctgaagcgcggctctattatcaatggcgcagactggtattctttcactggcggtatgtcagacttcaactatctacataccaactgcttcgagataaccgttgagcttgggtgtgtcaagtttccgccggaagaggcgctgtatatcctttggcagcacaacaaagaatccctcctgaacttcgttgaaacggtacaccgtgggataaaaggcgtcgtgactgacaagtttgggaaacccgtcaagaatgctcgtatatcggtgaaaggaattcggcacgatatcaccactgctccagatggcgattattggagacttctgccccccgggattcacatcgtaatagcacaagcacctggatacgcaaaagtgatcaagaaggtgataatccccgcgcgtatgaagagagcaggacgggtggatttcattctgcagcccctgggtatggggccgaaaaactttatacacggcctccgtaggactggcccacatgaccctctgggaggcgcaagctcgcttggcgaggcaaccgagccagaccctctgagggctaggcggcaaccaagcgccgacggcagcaagccctggtggtggagctattttacttcgctcagtacgcatcgacccagatggcttctcaaatattag

SEQ ID NO: 139863 - DNA, 1926 bp, Artificial Sequence
  derived and/or modified sequence
atgcctcctcctctgccactcctgctgttaactgtgctggtcgtagccgctgctcgtcccggctgcgaattcgaacgcaaccctgcagcaacatgtgtggacttacaactacggacgtgttccgacgctgcttacaatcatacaacttttcctaatctgcttcagcataggtcctgggaggtagttgaagctagctctgagtatatccttttgtctgtattgcatcaacttttggaaggccagtgcaaccctgatctacgactgctcggatgtgcagtactggctcctcggtgtgagggtggctgggtgcgtaggccttgtagacatatctgcgaggggctcagggaggtttgccagcctgcctttgacgcaattgacatggcttggccgtatttcctggactgtcatcgctactttactcgtgaagatgaaggttgttacgatcctttagaaaaactgcgcgggggtcttgaagcggacgaagcactgcccagtggactgcctcctacatttatacgattttctcaccatagttacgcacagatggtccgtgtcctgcgcagaacagcctcaaggtgcgcccatgtggcccgaacctattccatcgggagatcctttgatggacgcgaactgttagtgatcgaattttcatcccggcctggacaacatgaactgatggaaccagaagttaaattgatcggtaatatccatgggaacgaagtcgccgggcgggagatgctgatatatctggcacagtatttatgctccgaatacctgctcggcaaccccagaatccagcgtctgctcaataccacaagaatccacctattacccagcatgaatccagacgggtacgaagttgcagcggcagagggggccggatataatggttggacaagcggtcgacagaacgcccagaacctggacctgaacagaaactttcccgatctgacatctgagtattatcgactggcagagacccgtggagccagaagtgaccatatcccaattcctcaacattactggtggggcaaagtggcccctgagaccaaagcaatcatgaaatggatgcagaccataccttttgtcctaagcgctagcctccacggcggtgatctagtagtgagctatccattcgatttctctaagcatccccaagaagagaaaatgttcagccccaccccagacgaaaagatgttcaagctgctgtcccgagcttacgctgatgtgcatccgatgatgatggatcgatctgaaaatagatgtggaggcaacttcctcaagcgcggcagtatcataaacggagcggattggtattcattcactggcggaatgtccgatttcaactacctccatactaattgtttcgagataacagtcgagctgggctgcgtgaaattcccccccgaagaggcactctatatcctttggcagcacaacaaagagtcactgctgaatttcgttgagacagtgcatagaggcatcaaaggagttgtgactgacaagtttggaaaacctgtgaagaacgcccgtatctcagttaaaggaatcaggcacgacataacaacagcacctgatggcgattattggcggttgttgccaccaggcatacatatcgtgatcgcgcaagctccgggctatgccaaagtcataaaaaaggtcattatcccagcaaggatgaagagagctggtcgcgtcgattttattctccaaccactgggcatggggcctaaaaattttattcatggactgcgaagaaccggcccccacgacccacttgggggagcatcatctctgggtgaagcgaccgagcctgatcccctacgagcccgtcgacaaccgagcgcggatggctcaaagccctggtggtggtcatacttcacttctttatccacccacagacctcgttggctgttgaaatactag

SEQ ID NO: 139864 - DNA, 1926 bp, Artificial Sequence
  derived and/or modified sequence
atgcccccccccctgcccctgctgctgctgaccgtgctggtggtggccgccgccagacccggctgcgagttcgagagaaaccccgccgccacctgcgtggacctgcagctgagaacctgcagcgacgccgcctacaaccacaccaccttccccaacctgctgcagcacagaagctgggaggtggtggaggccagcagcgagtacatcctgctgagcgtgctgcaccagctgctggagggccagtgcaaccccgacctgagactgctgggctgcgccgtgctggcccccagatgcgagggcggctgggtgagaagaccctgcagacacatctgcgagggcctgagagaggtgtgccagcccgccttcgacgccatcgacatggcctggccctacttcctggactgccacagatacttcaccagagaggacgagggctgctacgaccccctggagaagctgagaggcggcctggaggccgacgaggccctgcccagcggcctgccccccaccttcatcagattcagccaccacagctacgcccagatggtgagagtgctgagaagaaccgccagcagatgcgcccacgtggccagaacctacagcatcggcagaagcttcgacggcagagagctgctggtgatcgagttcagcagcagacccggccagcacgagctgatggagcccgaggtgaagctgatcggcaacatccacggcaacgaggtggccggcagagagatgctgatctacctggcccagtacctgtgcagcgagtacctgctgggcaaccccagaatccagagactgctgaacaccaccagaatccacctgctgcccagcatgaaccccgacggctacgaggtggccgccgccgagggcgccggctacaacggctggaccagcggcagacagaacgcccagaacctggacctgaacagaaacttccccgacctgaccagcgagtactacagactggccgagaccagaggcgccagaagcgaccacatccccatcccccagcactactggtggggcaaggtggcccccgagaccaaggccatcatgaagtggatgcagaccatccccttcgtgctgagcgccagcctgcacggcggcgacctggtggtgagctaccccttcgacttcagcaagcacccccaggaggagaagatgttcagccccacccccgacgagaagatgttcaagctgctgagcagagcctacgccgacgtgcaccccatgatgatggacagaagcgagaacagatgcggcggcaacttcctgaagagaggcagcatcatcaacggcgccgactggtacagcttcaccggcggcatgagcgacttcaactacctgcacaccaactgcttcgagatcaccgtggagctgggctgcgtgaagttcccccccgaggaggccctgtacatcctgtggcagcacaacaaggagagcctgctgaacttcgtggagaccgtgcacagaggcatcaagggcgtggtgaccgacaagttcggcaagcccgtgaagaacgccagaatcagcgtgaagggcatcagacacgacatcaccaccgcccccgacggcgactactggagactgctgccccccggcatccacatcgtgatcgcccaggcccccggctacgccaaggtgatcaagaaggtgatcatccccgccagaatgaagagagccggcagagtggacttcatcctgcagcccctgggcatgggccccaagaacttcatccacggcctgagaagaaccggcccccacgaccccctgggcggcgccagcagcctgggcgaggccaccgagcccgaccccctgagagccagaagacagcccagcgccgacggcagcaagccctggtggtggagctacttcaccagcctgagcacccacagacccagatggctgctgaagtactag

SEQ ID NO: 139865 - DNA, 2136 bp, Artificial Sequence
  derived and/or modified sequence
agcgagcgcagagccccggccccgcgcggcccgagtgccacatcactgcgctggccgtccaaggtccgccgccccaccatgccgcccccgctgccgctgctgctccttacagtcctggtcgtcgccgctgcccggccggggtgcgagtttgagcggaaccccgccgccacctgcgtggacctgcagctcaggacctgcagtgatgccgcctacaaccacaccaccttccccaacctgcttcagcaccggtcatgggaggtggtggaggccagctccgagtacatcctgctgagcgttctacaccagctcctggaaggccagtgcaacccggacctgcggctgctgggctgtgctgtgctggccccccggtgtgagggcggctgggtgcgcagaccctgccggcacatctgcgagggcctgcgggaggtctgccagcccgccttcgacgccattgacatggcctggccctacttccttgactgccaccgctacttcacgagagaggacgagggctgctatgacccgctggagaagcttcggggaggcctggaggctgacgaggcactgccctcagggctgccgcccaccttcatccgcttcagccaccactcctacgcccagatggtgcgtgtgctgaggcggacggcctcccgctgcgcccacgtggccaggacctacagcatcgggcgcagcttcgacggcagggagctgctggtcatcgagttctccagccgccccggccagcacgagctgatggagcccgaggtgaagctcatcggcaacattcatggcaacgaggtggcgggccgggagatgctcatctacctagcccagtacctgtgctctgagtacctgcttggtaacccccgcatccagcgcctgctcaacaccacccgcatccacctgctgccctccatgaaccctgacggctatgaggtggcagctgccgagggtgccggctacaacgggtggacgagcgggaggcagaacgcgcagaacctggatctgaaccgaaatttcccggacctgacgtccgagtactaccggctggcggagacccgcggcgcacgcagcgaccacatccccatcccccagcactactggtggggtaaggtggccccggagacaaaggcaatcatgaagtggatgcagaccataccctttgtgctctcagccagccttcatgggggcgacctggtggtgtcctaccccttcgacttctccaagcacccccaggaggagaagatgttttctcccacgcccgacgagaagatgttcaagctgctgtccagagcctacgctgacgtccaccccatgatgatggacaggtcggagaataggtgtggaggcaatttcctgaagagggggagcatcatcaacggggcggactggtacagcttcacgggaggcatgtccgatttcaactacctgcacaccaactgctttgagatcacggtagagctgggctgtgtgaagttcccccccgaggaggccctgtacatactctggcagcacaacaaggagtcactcctgaatttcgtggagacggtgcaccggggcatcaaaggtgtggtgacagataaattcggcaagccagtcaaaaacgcccggatctcagtcaaaggcattcgccacgacatcaccacagccccagatggtgactactggagactgctgcccccaggtatccacattgtcattgcccaagcccctggctacgccaaagtcatcaagaaagtcatcatccccgcccggatgaagagggctggccgtgtggacttcattctgcaacctctggggatgggacccaagaactttattcatgggctgcggaggactgggccccacgacccactgggaggtgccagctctttgggggaggccacggagcccgacccgctccgggcgcgcaggcagccctcggccgacgggagtaagccctggtggtggtcctacttcacatcgctgagcacccacaggccacgctggctgctcaagtactagccccggccccagcacccgccaggatgtggagaccgaggcccatctccgcatcccgggctcctggctcttgattttgtctgccacagacatcccacaaagccgctgccattttattaaagtgttttgatccac

SEQ ID NO: 139866 - DNA, 1926 bp, Artificial Sequence
  derived and/or modified sequence
atgcctcctccactgcctctgctgctcttaactgtgttagtggtggccgccgccagacctgggtgtgaattcgaacgtaaccctgccgcaacatgtgtggatctgcagttgcggacctgctcagacgctgcttacaaccacacaacattcccaaacctcttacaacacaggtcctgggaggttgtcgaggctagttctgaatatatcttactctctgttcttcatcagcttctggaaggacagtgcaatcccgatttgcgactactaggatgcgcagttcttgcccccagatgcgaaggcggatgggttcgaaggccatgtcgccacatttgtgagggcctgcgtgaagtgtgccagcctgcgttcgacgcgatcgatatggcttggccgtatttcctggattgtcatagatactttacacgagaggacgaagggtgctacgaccctctagagaaactcaggggcggtctggaggcggatgaggctcttcctagtggactgccgccaacttttatacgcttttcacaccatagttacgcgcagatggtccgcgtgttgaggcggaccgcctcgcggtgcgcccacgtggccaggacctactctatcggccgaagttttgatggcagagagctgctcgtcattgaattctcatcacgccctgggcagcatgagctgatggaaccagaagttaaattgataggaaacatccacggcaacgaggtggccggacgtgagatgctgatctatctagcccaatatttgtgctcggagtatctgcttggtaatccccgcatccagcgcttactaaacaccacacgaattcatcttctgccgtctatgaaccccgatggatacgaggtcgcggcagccgagggcgctggatataacggctggacctcgggcagacagaacgcccagaacctggatttaaataggaactttcctgacctgacatcagaatactaccgcctagctgagactcgaggagccagatcagaccacatccctatcccacagcattattggtgggggaaggtagcacccgagactaaggctatcatgaagtggatgcagactattcccttcgtcctttcagcctctctgcacggcggagacctcgtggtgtcctaccctttcgatttctctaagcacccccaagaggagaagatgtttagcccaactcctgatgaaaagatgttcaaattgctgtctagagcttatgccgatgtgcatcccatgatgatggatcgcagtgaaaatcgctgtggaggcaatttcctaaagcgggggtcaataattaatggtgctgactggtactccttcacaggcggcatgtctgatttcaattacctgcacacaaattgtttcgagatcaccgttgagctaggatgcgtaaagttccccccagaagaagccctgtacattctgtggcaacacaacaaagaatccctgctgaacttcgtggaaactgtgcatagaggaattaaaggtgtcgtgactgataaattcgggaaaccagtaaagaacgcccggatcagcgtgaagggcatcagacacgatatcacaacggccccagatggggattactggagactgctgccgcccggcattcatatcgttattgcacaggcacccggctatgccaaggtaatcaaaaaagttatcattcccgcacgaatgaagcgtgccggtagggttgattttattctgcagcctctagggatgggccccaagaatttcattcacgggctgaggcgaacagggcctcacgaccccctgggtggggccagtagtttaggcgaggccacagaacccgatcctctgagggcccgtagacaaccaagcgctgatgggtcgaaaccatggtggtggtcctactttacctctcttagtacccatcggccaagatggctactgaagtactag

SEQ ID NO: 139867 - DNA, 1926 bp, Artificial Sequence
  derived and/or modified sequence
atgcccccacccctgcccctgctgctgctgactgtgctggtggtggccgccgcccggcccggctgtgaatttgagaggaacccagctgccacctgtgtggacctgcagctgcggacctgcagtgatgctgcctacaaccacaccaccttccccaacctgctgcagcaccgctcctgggaggtggtggaggccagcagcgagtacatcctgctgtctgtgctgcaccagctgctggagggccagtgcaacccagacctgcggctgctgggctgtgctgtgctggccccccgctgtgagggcggctgggtgcggcggccctgccgccacatctgtgagggcctgcgggaggtgtgccagcctgcctttgatgccatcgacatggcctggccctacttcctggactgccaccgctacttcacccgggaggatgagggctgctatgaccccctggagaagctgcggggcggcctggaggctgatgaggccctgcccagcggcctgccccccaccttcatccgcttcagccaccacagctatgcccagatggtgcgggtgctgcggaggacagccagccgctgtgcccacgtggcccggacctacagcatcggccgcagctttgatggccgggagctgctggtgattgagttcagcagccggcccggccagcacgagctgatggagcctgaggtgaagctgattggcaacatccatggaaatgaggtggccggccgggagatgctgatctacctggcccagtacctgtgcagcgagtacctgctgggcaacccccgcatccagaggctgctgaacaccacccgcatccacctgctgcccagcatgaacccagatggctatgaggtggccgctgctgagggcgccggctacaacggctggaccagcggccggcagaatgcccagaacctggacctgaacagaaacttcccagacctgaccagcgagtactaccgcctggccgagaccaggggggcccggagtgaccacatccccatcccccagcactactggtggggcaaggtggcccctgagaccaaggccatcatgaagtggatgcagaccatcccctttgtgctgagcgccagcctgcatggaggagacctggtggtgtcctacccctttgacttcagcaagcacccccaggaggagaagatgttcagccccaccccagatgagaagatgttcaagctgctgagccgggcctatgcagatgtgcaccccatgatgatggacagaagtgaaaatagatgtggcggcaacttcctgaagaggggcagcatcatcaacggggctgactggtacagcttcaccggcggcatgtctgacttcaactacctgcacaccaactgctttgagatcaccgtggagctgggctgtgtgaagttccccccagaggaggccctgtacatcctgtggcagcacaacaaggagagcctgctgaactttgtggagaccgtgcaccggggcatcaagggcgtggtgacagacaagtttgggaagcctgtgaagaatgcccgcatctctgtgaagggcatcagacatgacatcaccacagccccagatggagactactggaggctgctgcccccaggcatccacatcgtgattgcccaggcccctggctacgccaaggtgatcaagaaggtgatcatcccagccaggatgaagagagctggccgggtggacttcatcctgcagcccctgggcatgggccccaagaacttcatccacggcctgcggaggacaggcccccatgaccccctgggcggggccagcagcctgggggaggccacagagccagaccccctgcgggcccggcggcagcccagcgcagatggcagcaagccctggtggtggagctacttcaccagcctgagcacccaccggccccgctggctgctgaagtactag

SEQ ID NO: 139868 - DNA, 1926 bp, Artificial Sequence
  derived and/or modified sequence
atgcccccccccctgcccctgctgctgctgaccgtgctggtggtggctgccgccagacccgggtgcgagtttgaacggaacccagccgcaacttgtgtcgatctgcagctcaggacttgttccgatgcagcctataatcatacaacctttccaaatcttctgcaacacaggagctgggaggtggttgaggcctcctctgaatacatacttctgtctgttctgcaccagctgctggagggccagtgcaaccccgacctccggttgctaggatgcgctgtgctggctccccggtgcgagggcggttgggtcaggcgcccatgtcggcacatctgcgaggggctcagagaggtgtgccagcctgcgtttgacgcaatcgatatggcctggccttactttctagattgccaccggtacttcacacgggaagacgaagggtgttatgatccactcgaaaaacttaggggtgggctggaagccgatgaggcactcccatccgggctacctcctacgttcattcggttttctcaccacagctatgcccagatggtacgcgttctccgacgcacagcctctagatgcgcccatgtcgcccgaacgtactctattggacggagtttcgatgggagagaactcctcgtgattgaattcagtagtcgcccggggcagcatgaactgatggagccagaggtgaagctgattgggaatattcatgggaacgaagttgcgggtcgtgaaatgcttatatacttagcacagtacttgtgctctgagtatttactcggaaatcccaggatccagcggctcttgaacaccaccagaatccacctgctgcccagcatgaaccctgatggatacgaagtcgcagccgcggagggggctggctataacgggtggacgtctggacgtcagaatgcccaaaaccttgacttaaaccggaatttccctgacctcacttccgaatactacagactcgcggagacgagaggtgcacgcagtgatcatatacccattccccagcactactggtggggcaaagtggctcctgagactaaggcaatcatgaaatggatgcagaccattccattcgtgctctctgctagcctgcacggtggagatctggttgtctcttacccgttcgacttctcaaagcatccgcaggaagagaagatgttctcacctacccctgacgagaagatgtttaagctgctctcccgggcttatgctgatgtgcacccgatgatgatggatagatccgagaatagatgtggtggcaactttctgaagaggggatccatcatcaacggcgcggactggtattccttcaccggggggatgtcagatttcaactacttgcatactaactgcttcgagataactgtggaattgggctgcgtgaaattccctccagaagaagccttatacatcctgtggcagcataataaagagtctctgctgaacttcgtggaaactgtccatcggggcattaagggggtggttactgataaatttggcaaaccggtgaagaatgcgagaatctctgttaaagggattcgtcacgacatcacgactgctcccgacggggattattggagactgctaccccctgggatccacattgtgatagcccaagcacccggctacgccaaagtgatcaaaaaggtgatcatcccagctcggatgaagagggctggacgggtagatttcatcttgcagcctctgggtatgggaccgaagaattttatccatggattgagaagaacagggcctcatgatcccctgggcggtgcttctagcctaggggaagcaacagagcccgaccccttacgggcaaggcggcagccctctgcagatgggtctaaaccatggtggtggtcctattttacgtccctgagcacccatcggcccaggtggctcctgaagtactag

SEQ ID NO: 139869 - RNA, 1926 nt, Artificial Sequence
  derived and/or modified sequence
augcccccgccacugccacuccugcuccugacggugcucguggucgcugcugcccgucccgggugugaguucgagcgaaaucccgcugcaacguguguugacuuacagcugagaaccugcagcgaugcugcuuacaaucacacaacauuuccuaaucuccugcaacaccgcucaugggaggugguugaggccuccucugaguacauuuugcuuucuguccuucaucaacuauuagaaggccaaugcaacccagaccucagguugcuggguugcgccguucuugcccccaggugcgaaggggguuggguacggcgaccaugcagacacaucugugagggccuacgcgaagugugucagccugcuuuugacgcuaucgacauggccuggccuuacuuuuuggauugccaccgguacuucacgagagaggaugaaggaugcuacgauccccuggagaagcugcgcggaggacuggaggcugaugaagcccugccgucuggccugccuccuacuuuuauucgguuuagccaucacuccuaugcucagauggugagaguucuccgcaggaccgccagccgcugugcucauguggcgcgcacguacagcaucgggaggagcuucgacggacgcgagcugcuugucauagaauuuagcucaaggccuggacaacacgaacuuauggaacccgagguuaagcuaauaggaaauauccauggaaaugagguagcaggcagggaaaugcugaucuacuuggcacaguaccucuguuccgaauacuuguuggguaauccgcguauucagagguuacuuaacaccacucgcauccaccugcuucccuccaugaaucccgauggcuaugaggucgccgcggcugagggagcaggcuauaacggauggacuucuggcagacaaaaugcucaaaacuuagaucuuaacagaaauuuuccugaccugacaagcgaauacuaccggcuggccgagaccagaggcgccagaucugaccacauuccgauuccucagcacuacugguggggaaaaguggccccugaaaccaaagccaucaugaaauggaugcaaaccauaccguuugucuuauccgccucacugcacggaggugaucucguugugucuuauccauuugauuuuucgaagcacccucaggaagagaaaauguuuaguccuacuccugaugaaaagauguucaaauuacucucaagggcuuaugcagacguccaccccaugaugauggaucggucugagaacagaugcggagguaauuuccugaagcgcggcucuauuaucaauggcgcagacugguauucuuucacuggcgguaugucagacuucaacuaucuacauaccaacugcuucgagauaaccguugagcuugggugugucaaguuuccgccggaagaggcgcuguauauccuuuggcagcacaacaaagaaucccuccugaacuucguugaaacgguacaccgugggauaaaaggcgucgugacugacaaguuugggaaacccgucaagaaugcucguauaucggugaaaggaauucggcacgauaucaccacugcuccagauggcgauuauuggagacuucugccccccgggauucacaucguaauagcacaagcaccuggauacgcaaaagugaucaagaaggugauaauccccgcgcguaugaagagagcaggacggguggauuucauucugcagccccuggguauggggccgaaaaacuuuauacacggccuccguaggacuggcccacaugacccucugggaggcgcaagcucgcuuggcgaggcaaccgagccagacccucugagggcuaggcggcaaccaagcgccgacggcagcaagcccuggugguggagcuauuuuacuucgcucaguacgcaucgacccagauggcuucucaaauauuag

SEQ ID NO: 139870 - RNA, 1926 nt, Artificial Sequence
  derived and/or modified sequence
augccuccuccucugccacuccugcuguuaacugugcuggucguagccgcugcucgucccggcugcgaauucgaacgcaacccugcagcaacauguguggacuuacaacuacggacguguuccgacgcugcuuacaaucauacaacuuuuccuaaucugcuucagcauagguccugggagguaguugaagcuagcucugaguauauccuuuugucuguauugcaucaacuuuuggaaggccagugcaacccugaucuacgacugcucggaugugcaguacuggcuccucggugugaggguggcugggugcguaggccuuguagacauaucugcgaggggcucagggagguuugccagccugccuuugacgcaauugacauggcuuggccguauuuccuggacugucaucgcuacuuuacucgugaagaugaagguuguuacgauccuuuagaaaaacugcgcgggggucuugaagcggacgaagcacugcccaguggacugccuccuacauuuauacgauuuucucaccauaguuacgcacagaugguccguguccugcgcagaacagccucaaggugcgcccauguggcccgaaccuauuccaucgggagauccuuugauggacgcgaacuguuagugaucgaauuuucaucccggccuggacaacaugaacugauggaaccagaaguuaaauugaucgguaauauccaugggaacgaagucgccgggcgggagaugcugauauaucuggcacaguauuuaugcuccgaauaccugcucggcaaccccagaauccagcgucugcucaauaccacaagaauccaccuauuacccagcaugaauccagacggguacgaaguugcagcggcagagggggccggauauaaugguuggacaagcggucgacagaacgcccagaaccuggaccugaacagaaacuuucccgaucugacaucugaguauuaucgacuggcagagacccguggagccagaagugaccauaucccaauuccucaacauuacugguggggcaaaguggccccugagaccaaagcaaucaugaaauggaugcagaccauaccuuuuguccuaagcgcuagccuccacggcggugaucuaguagugagcuauccauucgauuucucuaagcauccccaagaagagaaaauguucagccccaccccagacgaaaagauguucaagcugcugucccgagcuuacgcugaugugcauccgaugaugauggaucgaucugaaaauagauguggaggcaacuuccucaagcgcggcaguaucauaaacggagcggauugguauucauucacuggcggaauguccgauuucaacuaccuccauacuaauuguuucgagauaacagucgagcugggcugcgugaaauucccccccgaagaggcacucuauauccuuuggcagcacaacaaagagucacugcugaauuucguugagacagugcauagaggcaucaaaggaguugugacugacaaguuuggaaaaccugugaagaacgcccguaucucaguuaaaggaaucaggcacgacauaacaacagcaccugauggcgauuauuggcgguuguugccaccaggcauacauaucgugaucgcgcaagcuccgggcuaugccaaagucauaaaaaaggucauuaucccagcaaggaugaagagagcuggucgcgucgauuuuauucuccaaccacugggcauggggccuaaaaauuuuauucauggacugcgaagaaccggcccccacgacccacuugggggagcaucaucucugggugaagcgaccgagccugauccccuacgagcccgucgacaaccgagcgcggauggcucaaagcccuggugguggucauacuucacuucuuuauccacccacagaccucguuggcuguugaaauacuag

SEQ ID NO: 139871 - protein, 423 aa, Artificial Sequence
  derived and/or modified sequence
MASALEQFVNSVRQLSAQGQMTQLCELINKSGELLAKNLSHLDTVLGALDVQEHSLGVLAVLFVKFSMPSVPDFETLFSQVQLFISTCNGEHIRYATDTFAGLCHQLTNALVERKQPLRGIGILKQAIDKMQMNTNQLTSIHADLCQLCLLAKCFKPALPYLDVDMMDICKENGAYDAKHFLCYYYYGGMIYTGLKNFERALYFYEQAITTPAMAVSHIMLESYKKYILVSLILLGKVQQLPKYTSQIVGRFIKPLSNAYHELAQVYSTNNPSELRNLVNKHSETFTRDNNMGLVKQCLSSLYKKNIQRLTKTFLTLSLQDMASRVQLSGPQEAEKYVLHMIEDGEIFASINQKDGMVSFHDNPEKYNNPAMLHNIDQEMLKCIELDERLKAMDQEITVNPQFVQKSMGSQEDDSGNKPSSYS

SEQ ID NO: 139872 - protein, 319 aa, Artificial Sequence [sequence omitted]

SEQ ID NO: 139873 - protein, 277 aa, Artificial Sequence
  derived and/or modified sequence
ASPFWVSWLYGSPLPAPPLPGGARSGTCAPILVLQNAAEALARQMTQLCELINKSGELLAKNLSHLDTVLGALDVQEHSLGVLAVLFVKFSMPSVPDFETLFSQVQLFISTCNGEHIRYATDTFAGLCHQLTNALVERKQPLRGIGILKQAIDKMQMNTNQLTSIHADLCQLCLLAKCFKPALPYLDVDMMDICKENGAYDAKHFLCYYYYGGMIYTGLKNFERALYFYEQAITTPAMAVSHIMLESYKKYILVSLILLGKVQQLPKYTSQIVGRFI

SEQ ID NO: 139874 - protein, 403 aa, Artificial Sequence
  derived and/or modified sequence
MTQLCELINKSGELLAKNLSHLDTVLGALDVQEHSLGVLAVLFVKFSMPSVPDFETLFSQVQLFISTCNGEHIRYATDTFAGLCHQLTNALVERKQPLRGIGILKQAIDKMQMNTNQLTSIHADLCQLCLLAKCFKPALPYLDVDMMDICKENGAYDAKHFLCYYYYGGMIYTGLKNFERALYFYEQAITTPAMAVSHIMLESYKKYILVSLILLGKVQQLPKYTSQIVGRFIKPLSNAYHELAQVYSTNNPSELRNLVNKHSETFTRDNNMGLVKQCLSSLYKKNIQRLTKTFLTLSLQDMASRVQLSGPQEAEKYVLHMIEDGEIFASINQKDGMVSFHDNPEKYNNPAMLHNIDQEMLKCIELDERLKAMDQEITVNPQFVQKSMGSQEDDSGNKPSSYS

SEQ ID NO: 139875 - DNA, 1272 bp, Artificial Sequence
  derived and/or modified sequence
atggcgtctgcgcttgaacagttcgttaatagcgtgcgtcagctttctgcccagggacaaatgacgcagctctgcgagctcataaacaagtccggagagcttttggcaaaaaacctgagccatctcgacacagtcctgggagccctggacgtgcaggaacactccctgggtgtcctggcggttctcttcgtgaagttctcaatgcctagcgtccctgactttgagaccttattttcccaagtgcaactgtttatctctacctgcaacggcgagcacatccgttacgcaacagacacctttgctggattgtgccaccagctgactaacgcactcgtggagcgtaaacagccgttaagaggtattggtatcctaaagcaggctattgataaaatgcagatgaatacaaaccaactcacatccatacatgctgatctctgtcagctgtgtttactggctaagtgtttcaagccagcactgccctacctggatgtcgacatgatggacatctgcaaggagaacggagcctatgacgccaagcacttcctgtgttactattattatggggggatgatttatacagggctcaagaattttgaaagagccctatatttctatgaacaggccatcaccactccagccatggcagtgagccatattatgttagaatcttataaaaagtacattctggtgtcactcatcctcttgggaaaagtgcagcagctccctaagtatacctctcagatagtgggtagatttatcaaaccacttagtaacgcgtaccacgaactcgcacaggtttattccacaaataatccatctgagctaagaaacttagtgaacaagcacagcgagaccttcacaagagataacaacatggggctggtaaaacaatgcctgagctcgttatacaaaaagaatatccagcggttgactaaaacgtttctgacactctcactccaagatatggctagtcgggtgcagctctccggcccgcaggaagccgaaaagtatgtgcttcatatgatagaagacggcgaaatctttgcaagcattaaccagaaagacgggatggtgtcatttcatgacaatccagaaaagtataataacccagcaatgcttcataatatagaccaggagatgctgaaatgcatcgagttggatgagcgactaaaagcaatggatcaggagatcactgtaaatccccagtttgtacagaaatcaatggggtcacaggaggatgactctggaaacaagcctagttcctatagctag

SEQ ID NO: 139876 - DNA, 960 bp, Artificial Sequence
  derived and/or modified sequence
atggcctctgcgctcgagcaatttgtcaactctgttcgccagttaagcgcacaggggcaaatgacgcagttgtgcgaattaatcaataaaagtggtgaactgctggcaaaaaacctctcacacctcgacaccgtactcggcgcactggatgtgcaagaacattcccttggtgtacttgcagtcctgttcgtgaaattctcaatgccttcggtccccgatttcgaaacactcttctctcaagtccagctttttatttcaacttgtaacggggaacatattcgctacgcgaccgacacgttcgccggcctttgccaccaattgactaacgccctggttgagcgcaagcaacctctacgggggattggaattttgaaacaggccattgataagatgcagatgaacaccaaccaattaacctccatccacgccgacttgtgtcaactctgcctcttggcgaaatgcttcaagccagccctgccttatctggacgtggacatgatggatatctgtaaggaaaacggggcctacgacgcaaaacacttcctgtgctattactactatggggggatgatctacaccgggctaaagaatttcgagcgggctctctatttctatgagcaggctattaccactcctgccatggctgtatctcacataatgctcgaatcttacaagaaatacattctggtgagcctgatcctactcggaaaggtgcaacaactgcctaaatacacatctcagattgttggcaggttcattaaacgccagagcctcgccatgttggctcgattagtccttaattcgtggcctcaagctgttttgttgcgtctccctcccagggttcttgggttacaacccctctcaaatgcttaccacgagctggcacaggtctactcaacaaataatccttccgagctgcggaatctggtgaacaagcacagtgaaacttttactcgatag

SEQ ID NO: 139877 - DNA, 1272 bp, Artificial Sequence
  derived and/or modified sequence
atggccagcgccctggagcagtttgtgaacagcgtgcggcagctgagcgcccagggccagatgacccagctgtgtgagctgatcaacaagtctggagagctgctggccaagaacctgagccacctggacacagtgctgggcgccctggatgtgcaggagcacagcctgggcgtgctggccgtgctgtttgtgaagttctccatgcccagcgtgcctgactttgagaccctcttcagccaggtgcagctgttcatcagcacctgcaatggagagcacatccgctatgccacagacacctttgctggcctgtgccaccagctgaccaatgccctggtggagaggaagcagcccctgcggggcatcggcatcctgaagcaggccatcgacaagatgcagatgaacaccaaccagctgaccagcatccatgctgacctgtgccagctgtgcctgctggccaagtgcttcaagccagccctgccctacctggatgtggacatgatggacatctgcaaggaaaatggagcctatgatgccaagcacttcctgtgctactactactatggaggcatgatctacacaggcctgaagaactttgagcgggccctgtacttctatgagcaggccatcaccaccccagccatggctgtgagccacatcatgctggagagctacaagaagtacatcctggtgtccctcatcctgctgggcaaggtgcagcagctgcccaagtacaccagccagatcgtgggccgcttcatcaagcccctgagcaatgcctaccacgagctggcccaggtgtacagcaccaacaaccccagcgagctgaggaacctggtgaacaagcacagcgagaccttcacccgggacaacaacatgggcctggtgaagcagtgcctgagcagcctgtacaagaagaacatccagaggctgaccaagaccttcctgaccctgagcctgcaggacatggccagccgggtgcagctgagcggcccccaggaggccgagaagtatgtgctgcacatgattgaagatggagagatctttgccagcatcaaccagaaggatggcatggtgtccttccatgacaaccctgagaagtacaacaacccagccatgctgcacaacatcgaccaggagatgctgaagtgcatcgagctggatgagcggctgaaggccatggaccaggagatcaccgtgaacccccagtttgtgcagaagtccatgggcagccaggaggatgattctggcaacaagcccagcagctacagctag

SEQ ID NO: 139878 - DNA, 960 bp, Artificial Sequence
  derived and/or modified sequence
atggccagcgccctggagcagtttgtgaacagcgtgcggcagctgagcgcccagggccagatgacccagctgtgtgagctgatcaacaagtctggagagctgctggccaagaacctgagccacctggacacagtgctgggcgccctggatgtgcaggagcacagcctgggcgtgctggccgtgctgtttgtgaagttctccatgcccagcgtgcctgactttgagaccctcttcagccaggtgcagctgttcatcagcacctgcaatggagagcacatccgctatgccacagacacctttgctggcctgtgccaccagctgaccaatgccctggtggagaggaagcagcccctgcggggcatcggcatcctgaagcaggccatcgacaagatgcagatgaacaccaaccagctgaccagcatccatgctgacctgtgccagctgtgcctgctggccaagtgcttcaagccagccctgccctacctggatgtggacatgatggacatctgcaaggaaaatggagcctatgatgccaagcacttcctgtgctactactactatggaggcatgatctacacaggcctgaagaactttgagcgggccctgtacttctatgagcaggccatcaccaccccagccatggctgtgagccacatcatgctggagagctacaagaagtacatcctggtgtccctcatcctgctgggcaaggtgcagcagctgcccaagtacaccagccagatcgtgggccgcttcatcaagaggcagagcctggccatgctggcccggctggtgctgaacagctggccccaggccgtgctgctgcggctgcccccccgggtgctgggcctgcagcccctgagcaatgcctaccacgagctggcccaggtgtacagcaccaacaaccccagcgagctgaggaacctggtgaacaagcacagcgagaccttcaccaggtag

SEQ ID NO: 139879 - DNA, 1272 bp, Artificial Sequence
  derived and/or modified sequence
atggccagcgccctggagcagttcgtgaacagcgtgcggcagctgagtgcccagggacagatgactcagctgtgcgaattgattaacaagagcggcgagctgctagccaagaacctgtcccatctcgacaccgtcttgggtgccctcgatgtgcaggaacattctctaggggtgcttgccgttcttttcgtgaaattttctatgccctccgtgcccgatttcgagacacttttttcgcaagtacaactgttcatcagcacatgcaatggcgaacacatacggtatgctactgatacattcgccggactctgtcatcagctcaccaacgccttggtagaacgtaaacagcctctcaggggcatcggcatccttaagcaagccatcgacaagatgcagatgaacaccaatcagctcaccagcatccacgcagatctgtgtcagctgtgcctgctagcaaagtgcttcaaaccagccctgccgtatctcgacgttgacatgatggatatctgtaaggagaatggggcctatgacgcgaagcattttctctgctattactattacggcggcatgatctataccgggttaaagaacttcgaaagggcgctgtacttctacgagcaggccatcactacaccagccatggccgtgagccacataatgctggagagttacaagaagtacattctagtaagcctgatactattagggaaagtccaacaactgcctaagtatacctcccaaattgtcgggcgctttataaagcctctctccaatgcctaccacgaattagcgcaggtctacagtactaataaccccagcgagctgaggaacttggtaaataaacacagtgagaccttcacccgcgacaataatatggggctggtgaaacagtgtctctcttccttgtataaaaagaatattcagcgcctaaccaaaacgtttctgactttatcactgcaggatatggcatcacgcgttcagctgagtggccctcaggaagctgaaaaatacgtcctgcacatgattgaagatggagagatcttcgccagcattaaccagaaagatgggatggtgagtttccacgataaccccgaaaaatataataatcccgccatgctgcacaacattgatcaagaaatgctgaagtgcatagagctggatgagaggttgaaagcgatggatcaagaaataactgtcaatcctcagtttgtgcagaagtccatggggtctcaggaagatgactcaggaaataagccgtctagctactcatag

SEQ ID NO: 139880 - DNA, 960 bp, Artificial Sequence
  derived and/or modified sequence
atggccagcgccctggagcagttcgtgaacagcgtgcggcagctgagcgcccaggggcaaatgacgcagctttgcgagctcattaataagtcgggcgaactgttggcaaaaaacctgtcccacttggacacggtgctcggcgctctggacgtgcaggaacattcactgggtgtgctcgccgtgctctttgtaaagttcagcatgccgtccgtcccggactttgagaccttatttagtcaggtgcagctctttatttctacatgtaatggggagcacattaggtatgcaaccgacacttttgccggtctgtgtcaccagctcacgaacgctttagtagaaagaaaacagcctcttagaggtattggtatccttaagcaggcaattgacaagatgcagatgaatactaaccagttgacttctattcatgcagatctttgccaactctgtctgctggcgaaatgtttcaagccggcccttccttatctggacgtcgatatgatggacatctgcaaggagaacggggcctacgacgcgaagcacttcctatgctattattactacggagggatgatctataccgggctgaaaaactttgaaagggccctgtatttctacgaacaggcgattaccacccctgccatggcagtgagccacatcatgctggagtcctataaaaaatacatcttagtctcactgattctcctgggaaaagttcaacagttacctaaatacacatcacaaattgtgggccgcttcattaaaagacagagtcttgcaatgttggctaggctcgtcctgaacagctggccgcaggcggtactactgcgtctacccccacgtgtgctgggcttgcagcccctctccaatgcttatcacgagctcgcacaggtgtatagcaccaacaaccccagtgaactgagaaacctggtcaataaacatagtgaaacatttactcgctag

SEQ ID NO: 139881 - DNA, 1272 bp, Artificial Sequence
  derived and/or modified sequence
atggcaagcgccctggaacagttcgtgaattcagtgcgccagctaagcgcccagggacaaatgacccagctgtgcgagcttattaacaagagtggggaattgctggccaaaaatttgtcgcacctggatactgtcctgggagccttagacgtgcaggaacactccctgggagtcctggctgtcctctttgtgaagttttccatgccttctgtccccgattttgaaactctgtttagccaagtgcagctgttcatcagcacttgcaatggcgaacacataaggtacgccactgatacttttgctggactttgccatcaacttaccaatgccctggtggaacgcaagcaacccctcagaggtataggaatcctcaaacaggctatcgataaaatgcagatgaacactaatcagctgacttcaatccacgcggacctctgccaactgtgtttgttggctaaatgttttaagcctgcactgccttaccttgatgtcgacatgatggacatctgcaaagagaacggggcatacgacgccaagcattttctgtgttattactattacggtggcatgatatataccgggttgaagaactttgagagagccctctatttctatgaacaggctatcacgaccccagcaatggccgtgtcacacattatgctagagtcttataaaaaatatatcctggtgagcctgatcctactggggaaagtgcagcagctgccgaagtataccagccagatcgtcgggagatttataaaacctttatccaatgcctaccatgaactcgcgcaggtttatagcactaacaaccccagcgaactacggaatcttgtcaacaagcattccgaaacctttactagagacaataacatgggcctcgtaaaacagtgtcttagtagcctgtataagaaaaatatccagcggctgaccaagacattccttacactgtctctgcaggatatggcttcccgtgtgcagttaagtggccctcaggaagcggagaagtatgttctccacatgattgaggatggagagattttcgcaagcatcaatcagaaggacggcatggtaagcttccatgataaccctgagaagtacaacaatcctgccatgctgcacaacatcgatcaggagatgctgaaatgcatcgaattagacgagaggctcaaagctatggatcaggagatcaccgtgaatccacaatttgttcagaaatccatgggctcccaagaggacgattctgggaataagccctcatcttattcttag

SEQ ID NO: 139882 - DNA, 960 bp, Artificial Sequence
  derived and/or modified sequence
atggcgtccgctcttgagcagttcgtcaatagtgttagacaactatctgcacaggggcagatgactcagttgtgcgagctgatcaacaaaagcggagaattgctcgccaagaatttgagtcacctcgatacagtgctcggggctctcgatgtgcaggagcattccctcggggtcttagcggtgctgtttgtgaagttttctatgccttctgtgcccgatttcgaaactctgtttagtcaggtgcagcttttcatttccacatgtaatggggaacatatcagatatgccaccgatacctttgccggtctttgtcaccagctaacaaatgcgctggtggaacggaagcagccgctgcggggaatcggaattctgaaacaagccatagataagatgcagatgaacacaaaccagcttactagcattcatgccgacctttgccagctctgccttctggccaaatgcttcaaaccagcacttccttatctggacgtggacatgatggatatatgcaaagagaacggggcttacgatgccaaacacttcttgtgttattattactatggcggaatgatttacactgggcttaagaactttgaacgtgcgctatacttttacgagcaggcgatcacaactcctgccatggccgtttcacacatcatgttggagtcttacaaaaaatatatcctggtgagtctcattcttctaggaaaagtccaacagctgcccaaatacacaagccagatcgtcgggcgttttataaagagacagtctctggccatgctggctagacttgtcttgaacagttggccccaagctgtgctgctgagactgccacccagggtgctcggccttcagcccctgagcaatgcttaccacgagctagcccaggtctatagcacaaacaatcccagcgagctgcggaatctggtgaacaagcactccgagaccttcactcggtag

SEQ ID NO: 139883 - DNA, 1657 bp, Artificial Sequence
  derived and/or modified sequence
tcgccgctcgcgaggacctcaggtggatcgccgcggcccctcctcccagagcggcagccttttcccgcgcgtgctgccttcgccgctcgggccgcccgggggaaaacatggcgtctgccctggagcagttcgtgaacagtgtccgacagctctcagctcaagggcaaatgacacagctttgtgaactgatcaacaagagtggggaactccttgcgaagaacttatcccatctggacactgtgctcggggctctggatgtacaagaacactccttgggcgtccttgctgttttgtttgtgaagttttctatgcccagtgttcctgacttcgaaacgctattctcacaggttcagctcttcatcagcacttgtaatggggagcacattcgatatgcaacagacacttttgctgggctttgccatcagctaacaaatgcacttgtggaaagaaaacagcccctgcgaggaattggcatccttaagcaagccatagacaagatgcagatgaatacaaaccagctgacctcaatacatgctgatctctgccagctttgtttgctagcaaaatgctttaagcctgcccttccatatcttgacgtggatatgatggatatctgtaaagagaatggagcctatgatgcaaaacactttttatgttactattattatggagggatgatctatactgggctgaagaactttgaaagagctctctacttttatgaacaggctataactactcctgccatggcggtcagtcatatcatgttggaatcatataaaaagtatattttagtgtctttgatattacttggcaaagtacaacagctaccaaaatatacatctcaaattgtgggtagattcattaagcctcttagcaatgcataccacgagttagcacaagtgtattcaaccaacaacccctcagaactccgaaacctggtgaataagcacagtgaaaccttcactcgcgataacaacatggggctggtgaagcaatgcttgtcatctctttataagaagaatattcagaggctaacaaagacctttttaactctatcattacaagatatggcaagtcgtgtgcagttgtctggacctcaggaggcagagaaatacgttctgcacatgatagaagatggtgagatttttgcaagtattaaccagaaggacggtatggtcagtttccatgataaccctgaaaaatataataacccagccatgcttcataacattgatcaggagatgctgaagtgcattgagctggatgagcggctgaaagccatggaccaggagatcacagtgaaccctcagtttgtacaaaagagtatgggctcacaagaagatgattcaggaaacaaaccatccagttattcttgaaactaacatccatcctgagctaaacaagagaaactaccatcttggccagtgacaagtgttcggagggcagcagagaggaccaagcctgtgtcacctggagactaagaaattaagttttgttttgacatcttcagtcctgtgtgctttcagaaaaccattttctctgcaaagaaaggaaacagatttgcaaactttaaagtctgtcgtggatttatttatcctcagattattgttactgcattaaatctacctttttgttttaagttgcttgaacatta

SEQ ID NO: 139884 - DNA, 1009 bp, Artificial Sequence
  derived and/or modified sequence
cagccttttcccgcgcgtgctgccttcgccgctcgggccgcccgggggaaaacatggcgtctgccctggagcagttcgtgaacagtgtccgacagctctcagctcaagggcaaatgacacagctttgtgaactgatcaacaagagtggggaactccttgcgaagaacttatcccatctggacactgtgctcggggctctggatgtacaagaacactccttgggcgtccttgctgttttgtttgtgaagttttctatgcccagtgttcctgacttcgaaacgctattctcacaggttcagctcttcatcagcacttgtaatggggagcacattcgatatgcaacagacacttttgctgggctttgccatcagctaacaaatgcacttgtggaaagaaaacagcccctgcgaggaattggcatccttaagcaagccatagacaagatgcagatgaatacaaaccagctgacctcaatacatgctgatctctgccagctttgtttgctagcaaaatgctttaagcctgcccttccatatcttgacgtggatatgatggatatctgtaaagagaatggagcctatgatgcaaaacactttttatgttactattattatggagggatgatctatactgggctgaagaactttgaaagagctctctacttttatgaacaggctataactactcctgccatggcggtcagtcatatcatgttggaatcatataaaaagtatattttagtgtctttgatattacttggcaaagtacaacagctaccaaaatatacatctcaaattgtgggtagattcattaagagacagagtctcgctatgttggccaggttggtgttgaactcctggcctcaagcagtccttctgcgtctgcctcccagagtgctgggattacagcctcttagcaatgcataccacgagttagcacaagtgtattcaaccaacaacccctcagaactccgaaacctggtgaataagcacagtgaaaccttcactcg

SEQ ID NO: 139885 - DNA, 1613 bp, Artificial Sequence
  derived and/or modified sequence
gagtccgttctgggtgtcttggctctatggctcgcctctgccagctcctccgctgccaggcggcgcacgctcgggaacctgtgcgcctattttggtcctacagaatgctgcggaagctctcgctcggcaaatgacacagctttgtgaactgatcaacaagagtggggaactccttgcgaagaacttatcccatctggacactgtgctcggggctctggatgtacaagaacactccttgggcgtccttgctgttttgtttgtgaagttttctatgcccagtgttcctgacttcgaaacgctattctcacaggttcagctcttcatcagcacttgtaatggggagcacattcgatatgcaacagacacttttgctgggctttgccatcagctaacaaatgcacttgtggaaagaaaacagcccctgcgaggaattggcatccttaagcaagccatagacaagatgcagatgaatacaaaccagctgacctcaatacatgctgatctctgccagctttgtttgctagcaaaatgctttaagcctgcccttccatatcttgacgtggatatgatggatatctgtaaagagaatggagcctatgatgcaaaacactttttatgttactattattatggagggatgatctatactgggctgaagaactttgaaagagctctctacttttatgaacaggctataactactcctgccatggcggtcagtcatatcatgttggaatcatataaaaagtatattttagtgtctttgatattacttggcaaagtacaacagctaccaaaatatacatctcaaattgtgggtagattcattaagcctcttagcaatgcataccacgagttagcacaagtgtattcaaccaacaacccctcagaactccgaaacctggtgaataagcacagtgaaaccttcactcgcgataacaacatggggctggtgaagcaatgcttgtcatctctttataagaagaatattcagaggctaacaaagacctttttaactctatcattacaagatatggcaagtcgtgtgcagttgtctggacctcaggaggcagagaaatacgttctgcacatgatagaagatggtgagatttttgcaagtattaaccagaaggacggtatggtcagtttccatgataaccctgaaaaatataataacccagccatgcttcataacattgatcaggagatgctgaagtgcattgagctggatgagcggctgaaagccatggaccaggagatcacagtgaaccctcagtttgtacaaaagagtatgggctcacaagaagatgattcaggaaacaaaccatccagttattcttgaaactaacatccatcctgagctaaacaagagaaactaccatcttggccagtgacaagtgttcggagggcagcagagaggaccaagcctgtgtcacctggagactaagaaattaagttttgttttgacatcttcagtcctgtgtgctttcagaaaaccattttctctgcaaagaaaggaaacagatttgcaaactttaaagtctgtcgtggatttatttatcctcagattattgttactgcattaaatctacctttttgttttaagttgcttg

SEQ ID NO: 139886 - DNA, 1272 bp, Artificial Sequence
  derived and/or modified sequence
atggccagcgccctggagcagttcgtgaacagcgtgagacagctgagcgcccagggccagatgacccagctgtgcgagctgatcaacaagagcggcgagctgctggccaagaacctgagccacctggacaccgtgctgggcgccctggacgtgcaggagcacagcctgggcgtgctggccgtgctgttcgtgaagttcagcatgcccagcgtgcccgacttcgagaccctgttcagccaggtgcagctgttcatcagcacctgcaacggcgagcacatcagatacgccaccgacaccttcgccggcctgtgccaccagctgaccaacgccctggtggagagaaagcagcccctgagaggcatcggcatcctgaagcaggccatcgacaagatgcagatgaacaccaaccagctgaccagcatccacgccgacctgtgccagctgtgcctgctggccaagtgcttcaagcccgccctgccctacctggacgtggacatgatggacatctgcaaggagaacggcgcctacgacgccaagcacttcctgtgctactactactacggcggcatgatctacaccggcctgaagaacttcgagagagccctgtacttctacgagcaggccatcaccacccccgccatggccgtgagccacatcatgctggagagctacaagaagtacatcctggtgagcctgatcctgctgggcaaggtgcagcagctgcccaagtacaccagccagatcgtgggcagattcatcaagcccctgagcaacgcctaccacgagctggcccaggtgtacagcaccaacaaccccagcgagctgagaaacctggtgaacaagcacagcgagaccttcaccagagacaacaacatgggcctggtgaagcagtgcctgagcagcctgtacaagaagaacatccagagactgaccaagaccttcctgaccctgagcctgcaggacatggccagcagagtgcagctgagcggcccccaggaggccgagaagtacgtgctgcacatgatcgaggacggcgagatcttcgccagcatcaaccagaaggacggcatggtgagcttccacgacaaccccgagaagtacaacaaccccgccatgctgcacaacatcgaccaggagatgctgaagtgcatcgagctggacgagagactgaaggccatggaccaggagatcaccgtgaacccccagttcgtgcagaagagcatgggcagccaggaggacgacagcggcaacaagcccagcagctacagctag

SEQ ID NO: 139887 - DNA, 960 bp, Artificial Sequence
  derived and/or modified sequence
atggccagcgccctggagcagttcgtgaacagcgtgagacagctgagcgcccagggccagatgacccagctgtgcgagctgatcaacaagagcggcgagctgctggccaagaacctgagccacctggacaccgtgctgggcgccctggacgtgcaggagcacagcctgggcgtgctggccgtgctgttcgtgaagttcagcatgcccagcgtgcccgacttcgagaccctgttcagccaggtgcagctgttcatcagcacctgcaacggcgagcacatcagatacgccaccgacaccttcgccggcctgtgccaccagctgaccaacgccctggtggagagaaagcagcccctgagaggcatcggcatcctgaagcaggccatcgacaagatgcagatgaacaccaaccagctgaccagcatccacgccgacctgtgccagctgtgcctgctggccaagtgcttcaagcccgccctgccctacctggacgtggacatgatggacatctgcaaggagaacggcgcctacgacgccaagcacttcctgtgctactactactacggcggcatgatctacaccggcctgaagaacttcgagagagccctgtacttctacgagcaggccatcaccacccccgccatggccgtgagccacatcatgctggagagctacaagaagtacatcctggtgagcctgatcctgctgggcaaggtgcagcagctgcccaagtacaccagccagatcgtgggcagattcatcaagagacagagcctggccatgctggccagactggtgctgaacagctggccccaggccgtgctgctgagactgccccccagagtgctgggcctgcagcccctgagcaacgcctaccacgagctggcccaggtgtacagcaccaacaaccccagcgagctgagaaacctggtgaacaagcacagcgagaccttcaccagatag

SEQ ID NO: 139888 - protein, 411 aa, Artificial Sequence
  derived and/or modified sequence
MQCSWKAVLLLALASIAIQYTAIRTFTAKSFHTCPGLAEAGLAERLCEESPTFAYNLSRKTHILILATTRSGSSFVGQLFNQHLDVFYLFEPLYHVQNTLIPRFTQGKSPADRRVMLGASRDLLRSLYDCDLYFLENYIKPPPVNHTTDRIFRRGASRVLCSRPVCDPPGPADLVLEEGDCVRKCGLLNLTVAAEACRERSHVAIKTVRVPEVNDLRALVEDPRLNLKVIQLVRDPRGILASRSETFRDTYRLWRLWYGTGRKPYNLDVTQLTTVCEDFSNSVSTGLMRPPWLKGKYMLVRYEDLARNPMKKTEEIYGFLGIPLDSHVARWIQNNTRGDPTLGKHKYGTVRNSAATAEKWRFRLSYDIVAFAQNACQQVLAQLGYKIAASEEELKNPSVSLVEERDFRPFS

SEQ ID NO: 139889 - DNA, 1236 bp, Artificial Sequence
  derived and/or modified sequence
atgcagtgttcctggaaagcagtacttctcctggctctggccagcatcgccattcagtatacagccataagaactttcacagcaaagagctttcatacttgccccgggctggccgaggctgggctggccgagaggctgtgcgaagagtcccccacattcgcctataatctcagccggaagacccacatcctcatcctagcaacaacccgctcgggatctagtttcgtgggccagctgttcaaccaacacttagatgtgttctatttatttgagccattgtatcacgtgcaaaacaccctcattccccggtttactcagggcaagtcccccgccgatcgacgggttatgctcggtgccagcagagatcttctccgctcgctctatgattgtgatctgtacttcttggaaaattacatcaagcccccacctgtgaatcacaccaccgaccgcatcttccggcgcggcgcgtcgagagtgctatgttcaagaccggtctgtgaccctcccgggcccgccgacctggtccttgaagagggtgactgcgtgagaaagtgcggacttcttaacctcacggtcgcagctgaggcgtgtagagagaggagtcatgttgcgatcaagactgttagagtccctgaagtcaacgacctgagggcgttggtcgaggacccccgactaaaccttaaagtcattcagctggtgagagacccaagggggatattagctagccgtagcgagacgttcagggacacatatcgactctggcggctgtggtatgggacaggtcggaaaccctacaacttggatgtcactcagctgaccacggtgtgtgaggactttagtaatagcgtgtccaccggcctaatgcgaccaccatggctgaagggtaaatatatgctggtgcggtacgaggatcttgccaggaatcccatgaagaaaacggaagagatatacggttttctgggcatcccccttgacagccatgtggcccgctggattcagaacaataccagaggtgacccaacactcggaaagcacaaatatggcacggtgcgtaacagcgccgccaccgcagagaaatggagattccgcctgagttatgatattgttgccttcgcgcaaaacgcttgccaacaggtattggctcaactcggatacaagattgccgcctccgaggaggagctgaagaatccttccgtgtctcttgtcgaagagcgggacttcaggccattttcgtag

SEQ ID NO: 139890 - DNA, 1236 bp, Artificial Sequence
  derived and/or modified sequence
atgcagtgctcctggaaggctgtgctgctgctggccctggccagcatcgccatccagtacacagccatccgcaccttcaccgccaagagcttccacacctgccccggcctggccgaggccggcctggccgagcggctgtgtgaggagagccccacctttgcctacaacctgagcaggaagacccacatcctgatcctggccaccaccaggagcggcagcagctttgtgggccagctgttcaaccagcacctggatgtgttctacctgtttgagcccctgtaccacgtgcagaacaccctcatcccccgcttcacccagggcaagagccctgctgacagaagagtgatgctgggcgccagccgggacctgctgcggagcctgtatgactgtgacctgtacttcctggagaactacatcaagcccccacctgtgaaccacaccacagaccgcatcttcagaagaggagccagccgggtgctgtgcagcaggcctgtgtgtgaccccccaggccctgctgacctggtgctggaggagggggactgtgtgaggaaatgtggcctgctgaacctgactgtggccgctgaggcctgccgggagaggagccacgtggccatcaagacagtgcgggtgcctgaggtgaatgacctgcgggccctggtggaggacccccggctgaacctgaaggtgatccagctggtgcgggacccccggggcatcctggccagccgctctgagaccttccgggacacctaccgcctgtggaggctgtggtacggcaccggcaggaagccctacaacctggatgtgacccagctgaccaccgtgtgtgaggacttcagcaacagcgtgtccacaggcctgatgaggcctccctggctgaagggcaagtacatgctggtgcgctatgaggacctggccaggaaccccatgaagaagacagaggagatctacggcttcctgggcatccccctggacagccacgtggcccgctggatccagaacaacaccaggggggaccccaccctgggcaagcacaagtatggaacagtgagaaattctgctgccacagctgagaagtggaggttccggctgtcctatgacatcgtggcctttgcccagaatgcctgccagcaggtgctggcccagctgggctacaagattgctgccagcgaggaggagctgaagaaccccagcgtgtccctggtggaggagcgggacttccggcccttctcctag

SEQ ID NO: 139891 - DNA, 1236 bp, Artificial Sequence
  derived and/or modified sequence
atgcagtgcagctggaaggccgtgctgctgctggccctggccagcatcgcaatacagtatacggccattaggacattcacagccaaatccttccacacctgtccaggacttgctgaagctgggctggctgagcgactctgtgaagagagcccgacctttgcatacaatctgtctcggaagacccatatccttatacttgcgactacccggagtgggtcctcttttgtcggccaactgttcaaccagcatctcgatgtattctacttgtttgagccactgtatcatgttcagaacacactaataccgcggtttacgcagggtaagtcacctgcagaccgccgcgttatgctgggcgcttcacgcgacttgcttcggtcattgtacgattgtgacctatactttctggagaattatataaagcccccccccgtgaatcacaccacggaccggatctttagaaggggggctagccgcgtcttatgctccagacccgtgtgtgaccctccaggaccggctgatttggtgttggaggaaggggattgtgtgaggaagtgcggtttgctgaatctgacggtcgccgccgaagcctgtagagaacgcagccatgttgccattaagacagttcgggtgcccgaggtcaacgacctgagggcgctggtggaagatccacgcttaaatctcaaagttattcagttagtgcgggaccccagaggaatcttagcgagtcgcagcgagacattccgcgacacttaccgtctgtggcgactgtggtatgggaccggacggaagccttataatttggatgtgacgcagctgacaactgtgtgtgaggatttctccaattccgtctcgacaggcctcatgcgaccgccttggcttaaggggaagtacatgcttgtcagatacgaagacctagctagaaatcctatgaagaaaaccgaggaaatttacggattccttggaatcccacttgattcccacgtcgcccggtggatacaaaacaacacaagaggggatcccactttaggcaagcacaagtatggtaccgtgcggaactcggccgcgactgcagaaaagtggcgtttccgactgtcctatgatatagtggccttcgcacagaacgcctgccaacaggtcttagctcagctgggatacaagattgcagcctctgaagaggagcttaagaacccgtcagtgagcctggtcgaagaaagagactttcgccctttctcttag

SEQ ID NO: 139892 - DNA, 1236 bp, Artificial Sequence
  derived and/or modified sequence
atgcaatgttcttggaaggccgttttacttctggctcttgctagcattgcaattcagtacaccgcgatcagaacatttaccgccaagtctttccacacctgcccaggcttggctgaggctggcttggccgaaagactgtgtgaggaaagccctacttttgcctacaatctgtccaggaagactcacattctcattctggccaccacccgtagcggttcctccttcgtggggcagctttttaaccagcacctagacgtgttctatttgttcgagcctctctatcatgtccagaacacacttattccacggtttacccaaggtaagtcccctgccgacaggcgtgtgatgctgggggctagccgcgacctcctccgctccctctacgactgcgacctttatttcctggagaattacataaagcctccaccggttaatcataccaccgaccgaattttcagacgtggcgctagccgggtgctttgttccaggcccgtttgcgatccaccgggtccagctgatctggtcctggaagagggcgattgcgtccggaagtgtggcttactcaacttgacagtggctgccgaggcatgcagggaacgttcacacgtagccattaagacagtgagagtgcctgaagtgaatgacctgcgagctctcgttgaagacccccgtctcaacttgaaggttatacagctggtccgggaccccagaggaattctcgcaagtaggagcgagacattcagagacacgtatagattgtggcggttgtggtacggtacaggcagaaaaccctataatctagacgtgacccagctcacaactgtgtgcgaagacttctccaacagcgtctccaccggccttatgcgtccaccctggttgaagggtaaatatatgctcgttcgctacgaagatctcgcacggaaccccatgaagaagacagaggaaatatacggattcttggggataccactggattctcacgtggctcgctggatccagaataacacccgcggtgaccccaccctcggcaaacataaatacgggaccgtgcgaaactccgcggcaacagctgagaagtggcggttcagactgtcctatgatatcgttgcctttgcccagaacgcctgtcaacaagtgctcgcccaattaggctacaagatcgccgcaagtgaggaagaactgaagaatccctctgtgtccctcgtcgaggaaagagattttaggcctttctcatag

SEQ ID NO: 139893 - DNA, 2718 bp, Artificial Sequence
  derived and/or modified sequence
gctcggagctgtagccgccgctgccgccgctgctcttggctcggggacgcgggcgggcgctccgagaggctctggtgcctgcggctgctgctctcctccggcgcccggggctgcggcgctccgggtcccggcccctgtcccggcatctctcgggtccctgagccccggccccgggtcccgcgtccggccggagagaacgcactcagctgctcgagccgccccgggctcgcgcccccgggccatgaagaggggcccgtgaggcgcgcgcggagtcggaggaagaggagggaggagggaggccgaggaggagggcgcgggaggcggaggatgccgccgcggctgctgccgccgccgccacccgcgggtccccggcgaccctgactccagacccgaggatggagccggcgctgggcgctgcagctgctcccggcgcgtccccgaccaggtagctggtgtcacttcggtgtggttggaagaagactttctccccagctgcattcccggaggcgccctttcgacctggaggccgggtctgctggccacagggctgccgcactggctgggactgccagctgggcctggagacgctggtggctgtggactccccagcttggagcagtccctctttgacctcaccccttggagaagcagccccatgaaggtgcccagccatgcaatgttcctggaaggccgtcctcctccttgccctggcctccattgccatccagtacacggccatccgcaccttcaccgccaagtcctttcacacctgccccgggctggcagaggccgggctggccgagcgactgtgcgaggagagccccaccttcgcctacaacctctcccgcaagacccacatcctcatcctggccaccacgcgcagtggctcctccttcgtgggccagctcttcaaccagcacctggacgtcttctacctgtttgagcccctctaccacgtccagaacacgctcatcccccgcttcacccagggcaagagcccggccgaccggcgggtcatgctaggcgccagccgcgacctcctgcggagcctctacgactgcgacctctacttcctggagaactacatcaagccgccgccggtcaaccacaccaccgacaggatcttccgccgcggggccagccgggtcctctgctcccggcctgtgtgcgaccctccggggccagccgacctggtcctggaggagggggactgtgtgcgcaagtgcgggctactcaacctgaccgtggcggccgaggcgtgccgcgagcgcagccacgtggccatcaagacggtgcgcgtgcccgaggtgaacgacctgcgcgccctggtggaagacccgcgattaaacctcaaggtcatccagctggtccgagacccccgcggcattctggcttcgcgcagcgagaccttccgcgacacgtaccggctctggcggctctggtacggcaccgggaggaaaccctacaacctggacgtgacgcagctgaccacggtgtgcgaggacttctccaactccgtgtccaccggcctcatgcggcccccgtggctcaagggcaagtacatgttggtgcgctacgaggacctggctcggaaccctatgaagaagaccgaggagatctacgggttcctgggcatcccgctggacagccacgtggcccgctggatccagaacaacacgcggggcgaccccaccctgggcaagcacaaatacggcaccgtgcgaaactcggcggccacggccgagaagtggcgcttccgcctctcctacgacatcgtggcctttgcccagaacgcctgccagcaggtgctggcccagctgggctacaagatcgccgcctcggaggaggagctgaagaacccctcggtcagcctggtggaggagcgggacttccgccccttctcgtgacccgggcggtgcgggtgggggcgggaggcgcaaggtgtcggttttgataaaatggaccgtttttaactgttgccttattaacccctccctctcccacctcatcttcgtgtccttcctgcccccagctcaccccactcccttctgccccttttttgtctctgaaatttgcactacgtcttggacgggaatcactggggcagagggcgcctgaagtagggtcccgccccccccccccccattcagacacatggatgttgggtctctgtgcggacggtgacaatgtttacaagcaccacatttacacatccacacacgcacacgggcactcgcgaggcgacttctcaagcttttgaatgggtgagtggtcgggtatctagtttttgcactgtcttactattcaaggtaagaggatacaaacaagaggaccacttgtctctaatttatgaatggtgtccatcctttccccatccctgcctcctgcccctgacgcccatttccccccttagagcagcgaaactgccccctcctgcccgcccttgcctgtcggtgaggcaggtttttactgtgaggtgaacgtggacctgtttctgtttccagtctgtggtgatgctgtctgtctgtctgagtctcgtggccgcccctggaccagtgatgactgatgaatcttatgagcttctgattgatctcggggtccatctgtgatatttctttgtgccaaaaagaaaaaaaaagagtggatcagtttgctaaatgaacattgaaattgaaatgctttatctgtgttttctgtaaataaaagagtgcaataatc

SEQ ID NO: 139894 - DNA, 1236 bp, Artificial Sequence
  derived and/or modified sequence
atgcagtgcagctggaaggccgtgctgctgctggccctggccagcatcgccatccagtacaccgccatcagaaccttcaccgccaagagcttccacacctgccccggcctggccgaggccggcctggccgagagactgtgcgaggagagccccaccttcgcctacaacctgagcagaaagacccacatcctgatcctggccaccaccagaagcggcagcagcttcgtgggccagctgttcaaccagcacctggacgtgttctacctgttcgagcccctgtaccacgtgcagaacaccctgatccccagattcacccagggcaagagccccgccgacagaagagtgatgctgggcgccagcagagacctgctgagaagcctgtacgactgcgacctgtacttcctggagaactacatcaagcccccccccgtgaaccacaccaccgacagaatcttcagaagaggcgccagcagagtgctgtgcagcagacccgtgtgcgacccccccggccccgccgacctggtgctggaggagggcgactgcgtgagaaagtgcggcctgctgaacctgaccgtggccgccgaggcctgcagagagagaagccacgtggccatcaagaccgtgagagtgcccgaggtgaacgacctgagagccctggtggaggaccccagactgaacctgaaggtgatccagctggtgagagaccccagaggcatcctggccagcagaagcgagaccttcagagacacctacagactgtggagactgtggtacggcaccggcagaaagccctacaacctggacgtgacccagctgaccaccgtgtgcgaggacttcagcaacagcgtgagcaccggcctgatgagacccccctggctgaagggcaagtacatgctggtgagatacgaggacctggccagaaaccccatgaagaagaccgaggagatctacggcttcctgggcatccccctggacagccacgtggccagatggatccagaacaacaccagaggcgaccccaccctgggcaagcacaagtacggcaccgtgagaaacagcgccgccaccgccgagaagtggagattcagactgagctacgacatcgtggccttcgcccagaacgcctgccagcaggtgctggcccagctgggctacaagatcgccgccagcgaggaggagctgaagaaccccagcgtgagcctggtggaggagagagacttcagacccttcagctag

SEQ ID NO: 139895 - protein, 560 aa, Artificial Sequence
  derived and/or modified sequence
MELPAVGEHVFAVESIEKKRIRKGRVEYLVKWRGWSPKYNTWEPEENILDPRLLIAFQNRERQEQLMGYRKRGPKPKPLVVQVPTFARRSNVLTGLQDSSTDNRAKLDLGAQGKGQGHQYELNSKKHHQYQPHSKERAGKPPPPGKSGKYYYQLNSKKHHPYQPDPKMYDLQYQGGHKEAPSPTCPDLGAKSHPPDKWAQGAGAKGYLGAVKPLAGAAGAPGKGSEKGPPNGMMPAPKEAVTGNGIGGKMKIVKNKNKNGRIVIVMSKYMENGMQAVKIKSGEVAEGEARSPSHKKRAADERHPPADRTFKKAAGAEEKKVEAPPKRREEEVSGVSDPQPQDAGSRKLSPTKEAFGEQPLQLTTKPDLLAWDPARNTHPPSHHPHPHPHHHHHHHHHHHHAVGLNLSHVRKRCLSETHGEREPCKKRLTARSISTPTCLGGSPAAERPADLPPAAALPQPEVILLDSDLDEPIDLRCVKTRSEAGEPPSSLQVKPETPASAAVAVAAAAAPTTTAEKPPAEAQDEPAESLSEFKPFFGNIIITDVTANCLTVTFKEYVTV

SEQ ID NO: 139896 - DNA, 2655 bp, Artificial Sequence
  derived and/or modified sequence
agccggggcgggcgcgggcagcggcgggccggccgggctgtgcggggcgagcggcggcggcggcgggggcgcttcggccggggcggcagctgggcgccggcgggagctagcagcgtctgcagccgcgccggccgccagcgccccggcgcgctccggctcggccatggagctgccagctgttggcgagcacgtcttcgcggtggagagcatcgagaagaagcggatccgcaagggcagagtggagtatctggtgaaatggagaggctggtcgcccaaatataacacgtgggaaccggaggagaacatcctggaccccaggctgctgatcgccttccagaacagggaacggcaggagcagctgatgggatatcggaagagagggccgaagcccaaaccgctagtggtgcaggtgcctacctttgcccgtcgttccaatgtcctgaccggcctccaggactcctccactgacaaccgtgccaagctggatttgggcgcgcaggggaagggccaggggcatcagtacgagctcaacagcaagaagcaccaccagtaccagccgcacagcaaggagcgggcgggcaagcccccgccgccgggcaagagcggcaagtactactaccagctcaacagcaagaagcaccacccctaccagcccgaccccaaaatgtacgacctgcagtaccagggcggccacaaggaggcgcccagccccacctgcccggacctgggggccaagagccacccgcccgacaagtgggcgcaaggtgcgggggccaaaggctacctgggggcggtgaagcccctggccggtgcggcgggtgctccaggcaaaggctccgagaagggcccccccaacggaatgatgccggcccccaaagaggctgtgacgggcaacgggattgggggcaagatgaagatagtcaagaacaagaacaagaacggacgcatcgtgatcgtgatgagcaaatacatggagaacggcatgcaggcggtgaagatcaagtccggcgaggtggcagagggggaggctcgctcccccagccacaagaagcgggcagccgacgagcgccaccctcctgccgacaggacttttaaaaaggcggcgggcgcagaggagaagaaggtggaggcgccgcccaagaggagggaggaggaggtgtccggggttagcgatccgcagccccaggatgccggctcccgcaagctgtccccgaccaaggaggcctttggagagcagcccctgcagctcaccaccaagcccgacctgcttgcctgggacccggcccggaacacgcacccgccctcacaccacccgcacccgcacccccatcaccaccaccaccaccaccaccaccaccaccacgccgtcggcctgaatctctcccacgtgcgcaagcgctgcctctccgagacccacggcgagcgcgagccctgcaagaagcggctgactgcgcgcagcatcagcacccccacctgcctggggggcagcccagccgctgagcgcccggccgacctgccaccagccgccgccctcccgcagcccgaggtcatcctgctagactcagacctggatgaacccatagacttgcgctgcgtcaagacgcgcagcgaggccggggagccgcccagctccctccaggtgaagcccgagacaccggcgtcggcggcggtggcggtggcggcggcagcggcacccaccacgacggcggagaagcctccagccgaggcccaggacgaacctgcagagtcgctgagcgagttcaagcccttctttgggaatataattatcaccgacgtcaccgcgaactgcctcaccgttactttcaaggagtacgtgacggtgtagccggagggcgtcggaaggggaagcgccattcccgcgggggggcggggagctgagcacctggggcctcggggcgggctcccctctcgccaacccgccaaccgcgagagacccaggctggcccccagggtgaggacgcccggagcggaggtaaccatgttccccctgcggcggctgtcagacctgggcggaggccccttccacgcggtgccggcggggctcgccctctcctgcccttccccgctggagatggacccccggaacggacagggcagctctgcgcccggcctcagagttctagtattatattttaaccgtgctaacttgtcaagtgctgactctactcccgtttgtacgtggtgttattattgaaatgtattgtttgagctcaaaaggcccgaccaccccccttcgggctgctatatatatatttatttgtaggtatttatatattgaaatataaaaacctagatttatggagtttcctctagatcatgttatattctatatcagacaaactattttcttttgacctttcttcccctccatccagtatttcggttgatttcattttctcccctctcttccccttccacgaactgcaataccagtaaccttggtatatattttttgatactgtacacatggatgtcttgtttctatgtgcaaaaaaaaaaaaaaaaaaaagtttgttaaaaggctacacgagctctctagaaactgctgctactagaaatgtctaaactataagcttccaactattacctgcttgaatgtaaatattaaatggagatgttgaaggtgcaaaaaaa

SEQ ID NO: 139897 - DNA, 873 bp, Artificial Sequence
  derived and/or modified sequence
atggagctgcccgccgtgggcgagcacgtgttcgccgtggagagcatcgagaagaagagaatcagaaagggcagagtggagtacctggtgaagtggagaggctggagccccaagtacaacacctgggagcccgaggagaacatcctggaccccagactgctgatcgccttccagaacagagagagacaggagcagctgatgggctacagaaagagaggccccaagcccaagcccctggtggtgcaggtgcccaccttcgccagaagaagcaacgtgctgaccggcctgcaggacagcagcaccgacaacagagccaagctggacctgggcgcccagggcaagggccagggccaccagtacgagctgaacagcaagaagcaccaccaccacgccgtgggcctgaacctgagccacgtgagaaagagatgcctgagcgagacccacggcgagagagagccctgcaagaagagactgaccgccagaagcatcagcacccccacctgcctgggcggcagccccgccgccgagagacccgccgacctgccccccgccgccgccctgccccagcccgaggtgatcctgctggacagcgacctggacgagcccatcgacctgagatgcgtgaagaccagaagcgaggccggcgagccccccagcagcctgcaggtgaagcccgagacccccgccagcgccgccgtggccgtggccgccgccgccgcccccaccaccaccgccgagaagccccccgccgaggcccaggacgagcccgccgagagcctgagcgagttcaagcccttcttcggcaacatcatcatcaccgacgtgaccgccaactgcctgaccgtgaccttcaaggagtacgtgaccgtgtag

SEQ ID NO: 139898 - DNA, 873 bp, Artificial Sequence
  derived and/or modified sequence
atggagctgccagctgttggcgagcacgtcttcgcggtggagagcatcgagaagaagcggatccgcaagggcagagtggagtatctggtgaaatggagaggctggtcgcccaaatataacacgtgggaaccggaggagaacatcctggaccccaggctgctgatcgccttccagaacagggaacggcaggagcagctgatgggatatcggaagagagggccgaagcccaaaccgctagtggtgcaggtgcctacctttgcccgtcgttccaatgtcctgaccggcctccaggactcctccactgacaaccgtgccaagctggatttgggcgcgcaggggaagggccaggggcatcagtacgagctcaacagcaagaagcaccaccaccacgccgtcggcctgaatctctcccacgtgcgcaagcgctgcctctccgagacccacggcgagcgcgagccctgcaagaagcggctgactgcgcgcagcatcagcacccccacctgcctggggggcagcccagccgctgagcgcccggccgacctgccaccagccgccgccctcccgcagcccgaggtcatcctgctagactcagacctggatgaacccatagacttgcgctgcgtcaagacgcgcagcgaggccggggagccgcccagctccctccaggtgaagcccgagacaccggcgtcggcggcggtggcggtggcggcggcagcggcacccaccacgacggcggagaagcctccagccgaggcccaggacgaacctgcagagtcgctgagcgagttcaagcccttctttgggaatataattatcaccgacgtcaccgcgaactgcctcaccgttactttcaaggagtacgtgacggtgtag

SEQ ID NO: 139899 - DNA, 1683 bp, Artificial Sequence
  derived and/or modified sequence
atggaactgcccgctgtgggcgaacacgtgttcgctgttgagagtatcgagaaaaagcggattcggaaagggagggttgagtatctcgtaaaatggcggggctggtcccccaagtacaacacctgggaaccggaagagaacattctggatcccagactgctcatcgcttttcagaatcgcgaacgacaggagcagttaatgggatatcggaaaaggggacctaaacctaagccactcgtcgtccaggtgccaacatttgcacgacgcagtaatgtactgacaggactccaggactcatccactgacaaccgcgctaaactcgatttgggcgcacagggaaagggccagggccatcagtacgagctgaactcaaaaaagcaccatcagtatcagccacactcaaaggagagagctgggaagccccctcccccaggcaaatctggaaagtactactatcagcttaattcaaaaaaacatcacccctatcaacctgatcccaagatgtatgacctccaataccaagggggacacaaggaggcaccttcccctacctgccccgacctgggggccaagtcccacccaccagacaagtgggctcagggcgctggcgcaaagggctacctgggagcagtcaagcccctggcgggcgctgccggcgcaccaggtaaagggagcgagaagggccctccaaatgggatgatgccagctccaaaggaggctgtgaccggcaatggcattgggggcaaaatgaaaatcgttaaaaataaaaacaaaaatggacggatcgtcatcgtgatgtccaagtatatggaaaacggtatgcaggctgtcaagattaaatcaggagaagtggccgaaggtgaggcacggagccccagccataagaagcgggctgctgacgaaagacatcctccagctgaccgcacgtttaaaaaggcggccggagccgaagagaagaaagtcgaggctcccccgaagaggcgcgaggaggaggtgtctggagtaagtgatcctcagcctcaggacgctggcagtagaaaactatccccgactaaggaagcctttggggagcagcctctgcagttgactacgaagcctgacctcttggcctgggaccctgcccggaacacacatccccccagtcaccatcctcaccctcatccccatcaccaccatcaccaccaccaccatcaccatcatgctgtcgggcttaacctgagccatgttcgtaaacgatgtctgtcagagacccacggcgagagggaaccatgcaaaaagaggctgacagcaaggtctatatcaacaccaacatgtctcggtggttccccggcggcagaacggcctgccgatctgccacccgccgccgccttgccccaacctgaggtgatcctgctggattcggatctggacgagccaatcgatctaaggtgtgtgaagacccggtctgaagctggcgaaccgccctcctcattgcaggtgaagccagagacccccgcttcagctgcagtcgctgtagctgccgcggcagcacccacaaccaccgccgaaaagccacccgccgaggctcaggacgaacctgctgagagtttatccgagttcaagccgttctttggcaacatcatcatcacagacgtaactgctaattgtctgaccgttacctttaaggagtacgtcacagtttag

SEQ ID NO: 139900 - DNA, 873 bp, Artificial Sequence
  derived and/or modified sequence
atggaactccctgcagtaggtgagcatgtttttgctgtcgaaagtatcgagaaaaagaggatcagaaagggaagagtagaatacctggtcaagtggcggggctggtcaccaaagtataacacatgggaacctgaagaaaacatactggatccaaggcttttaattgccttccagaacagggagaggcaggagcagctcatgggctatagaaagcggggcccgaagccaaagcccctggtcgttcaggttcccaccttcgctaggcggagcaatgtcctgacgggtctgcaggatagcagcacggataatcgtgccaagttggacctgggcgcgcaggggaaaggccaagggcaccaatatgaactgaattcgaaaaaacatcaccatcacgccgttggcttgaatctgagccacgttcggaagagatgcctctccgaaacccacggcgagagagagccatgtaaaaagcggctcaccgcaaggtcaatttctactcctacatgcctcggcggctcacccgcagccgagcggccagcggacctgcccccagctgccgcactgcctcaacccgaggttatcttgctcgatagtgacctggacgaaccaatcgatctcaggtgtgtgaaaactcggtcagaggctggcgagccgccaagcagtctccaagtcaaacccgagactcctgcgtcagccgctgtcgccgtggccgcggccgccgctccaacgaccaccgccgaaaagccacctgccgaggcacaagatgaacctgccgagagcctgagcgaatttaagccatttttcggaaatatcattataaccgatgtcacagcaaactgcttgaccgtgacattcaaagaatatgtgactgtctag

SEQ ID NO: 139901 - DNA, 1683 bp, Artificial Sequence
  derived and/or modified sequence
atggagctgcctgctgtgggggagcacgtgtttgctgtggagagcattgagaagaagaggatcaggaagggccgggtggagtacctggtgaagtggaggggctggagccccaagtacaacacctgggagcctgaggagaacatcctggacccccggctgctgattgccttccagaaccgggagcggcaggagcagctgatgggctacaggaagaggggccccaagcccaagcccctggtggtgcaggtgcccacctttgcccggcgcagcaatgtgctgaccggcctgcaggacagcagcacagacaacagagccaagctggacctgggcgcccagggcaagggccagggccaccagtatgagctgaacagcaagaagcaccaccagtaccagccccacagcaaggagcgggccggcaagcccccacctcctgggaagagcggcaagtactactaccagctgaacagcaagaagcaccacccctaccagcctgaccccaagatgtatgacctgcagtaccagggcggccacaaggaggcccccagccccacctgcccagacctgggcgccaagagccaccccccagacaagtgggcccagggcgctggggccaagggctacctgggcgctgtgaagcccctggccggggccgccggggcccctggaaaaggaagtgagaagggccccccaaatggcatgatgcctgcccccaaggaggccgtgactggaaatggcatcggcggcaagatgaagatcgtgaagaacaagaacaagaatggccgcatcgtcatcgtgatgagcaagtacatggagaatggcatgcaggccgtgaagatcaagtctggagaggtggccgagggggaggcccggagccccagccacaagaagagagctgctgatgagcggcaccccccagctgacaggaccttcaagaaggccgccggggctgaggagaagaaggtggaggccccacccaagagaagagaggaggaggtgtctggagtgtctgacccccagccccaggatgctggcagcaggaagctgagccccaccaaggaggcctttggagagcagcccctgcagctgaccaccaagccagacctgctggcctgggaccctgccaggaacacccacccccccagccaccacccccacccccacccccaccaccaccaccaccaccaccaccaccaccaccacgctgtgggcctgaacctgagccacgtgaggaagcgctgcctgtctgagacccacggggagcgggagccctgcaagaagaggctgacagcccggagcatcagcacccccacctgcctgggcggcagccctgctgctgagaggcctgctgacctgcccccagctgctgccctgccccagcctgaggtgatcctgctggacagcgacctggatgagcccatcgacctgcgctgtgtgaagaccaggtctgaggccggggagccccccagcagcctgcaggtgaagccagagaccccagccagcgctgctgtggccgtggccgctgctgctgcccccaccaccacagctgagaagcccccagctgaggcccaggatgagcctgctgagagcctgtctgagttcaagcccttctttggaaacatcatcatcacagatgtgacagccaactgcctgactgtgaccttcaaggagtatgtgacagtgtag

SEQ ID NO: 139902 - DNA, 873 bp, Artificial Sequence
  derived and/or modified sequence
atggagctgcctgctgtgggggagcacgtgtttgctgtggagagcattgagaagaagaggatcaggaagggccgggtggagtacctggtgaagtggaggggctggagccccaagtacaacacctgggagcctgaggagaacatcctggacccccggctgctgattgccttccagaaccgggagcggcaggagcagctgatgggctacaggaagaggggccccaagcccaagcccctggtggtgcaggtgcccacctttgcccggcgcagcaatgtgctgaccggcctgcaggacagcagcacagacaacagagccaagctggacctgggcgcccagggcaagggccagggccaccagtatgagctgaacagcaagaagcaccaccaccacgctgtgggcctgaacctgagccacgtgaggaagcgctgcctgtctgagacccacggggagcgggagccctgcaagaagaggctgacagcccggagcatcagcacccccacctgcctgggcggcagccctgctgctgagaggcctgctgacctgcccccagctgctgccctgccccagcctgaggtgatcctgctggacagcgacctggatgagcccatcgacctgcgctgtgtgaagaccaggtctgaggccggggagccccccagcagcctgcaggtgaagccagagaccccagccagcgctgctgtggccgtggccgctgctgctgcccccaccaccacagctgagaagcccccagctgaggcccaggatgagcctgctgagagcctgtctgagttcaagcccttctttggaaacatcatcatcacagatgtgacagccaactgcctgactgtgaccttcaaggagtatgtgacagtgtag

SEQ ID NO: 139903 - DNA, 1683 bp, Artificial Sequence
  derived and/or modified sequence
atggagctgcccgccgtgggcgagcacgtgttcgccgtggagagcattgagaagaagcgcatccgaaaagggagggtagaatacctggtgaaatggaggggctggtcgcctaaatataatacttgggaacccgaggagaatatcttggatccccggcttctgattgctttccagaaccgcgaaagacaagagcagctcatggggtacagaaaaagagggccaaaacccaagccgctggttgtccaggtgcctacattcgctagaagaagtaacgtgctaacgggactgcaagacagctccacagacaaccgggcgaagctggatttaggcgcccagggcaagggtcaggggcaccaatacgaacttaactcaaagaagcatcaccagtatcaaccacacagcaaggagagagctggaaaacctccgccacctggcaagtctggaaaatactattaccagctcaactctaagaagcatcatccttatcagccagatcccaaaatgtacgacctacagtatcagggagggcacaaggaggccccaagtcctacctgccctgatttgggagccaaatcgcatccccctgataaatgggcccagggcgcgggcgcaaaagggtacttaggggctgtgaaacccctcgctggggcagccggggcacctggcaaaggctctgagaaagggcccccaaatggaatgatgccagccccgaaggaagccgtgaccggtaacggcatcggtgggaaaatgaagattgtaaagaacaagaataagaacggccgaatcgtaatcgtaatgtcgaaatacatggagaacggaatgcaggctgtgaaaattaagtcaggtgaagtcgcggagggagaggctcggtcaccctctcataagaaaagagcggctgatgaaagacacccacctgccgatcgcacctttaagaaggctgcaggcgccgaggaaaagaaggttgaggcccctcctaagaggagggaagaggaagtgtccggggtgtccgacccgcagccacaggatgcagggtcacggaaactcagccctaccaaagaggccttcggagagcagcctctgcagctgacgactaaacccgacctgctggcgtgggacccggctaggaacacacaccctcctagtcaccaccctcacccccatccccatcatcaccaccatcaccaccaccatcaccaccatgctgtgggcttgaacctatctcatgtcagaaagcggtgtttatcagagacacacggcgaaagagaaccctgcaagaaacggctcactgccagaagtatctcaacgccaacttgtctgggaggaagccccgctgcagagcggccagccgacctgccacctgccgctgccctaccccagcccgaggtcatactgctcgacagcgacctcgacgagcccattgacctgcggtgtgtcaaaaccaggtcagaggcaggtgagcctcctagttctcttcaggtaaaacctgagacgcctgcaagcgctgctgttgctgtcgctgctgccgctgcgccgacgactactgccgagaagccccccgccgaagcacaagacgagcctgctgaatcactttcagagttcaaacccttctttgggaatatcataattaccgacgtcaccgccaactgtttgaccgtgacatttaaagagtacgtgaccgtctag

SEQ ID NO: 139904 - DNA, 873 bp, Artificial Sequence
  derived and/or modified sequence
atggagctgcccgccgtgggcgagcacgtgttcgccgtggagagcatcgagaaaaagcgaatccgaaagggtagagtcgagtacttggtgaaatggagaggatggagtcccaaatataatacctgggagcccgaggaaaacatcctggatccgaggctactgatcgcatttcagaatagggagcgtcaagaacagttaatgggctaccggaaaaggggaccaaaaccaaaacctcttgtggtacaggtgccaacgtttgcacgtagatctaatgtcttgaccggcctacaggactcctccacagacaatcgggcaaagttggacctcggagcccaggggaaggggcagggccaccagtacgaactgaatagcaaaaaacatcatcatcatgcagttggtcttaatctgtcccacgtcagaaagcgctgcctgtctgagactcatggtgagcgagagccctgtaagaagagactgaccgccaggagtatcagcacgcctacatgcctcggagggagtccagcggcggaacgccctgcggacttacctcctgccgcagctttgcctcaacccgaagtgatactgctcgactctgatctcgacgagccgatcgacctgcgttgcgtgaaaactagatccgaggcaggcgagcctcctagctcacttcaggtgaaaccggaaacccctgccagtgctgcagtggctgtggccgcagctgccgccccaaccacaaccgccgaaaagcctccggccgaggcccaagatgaacctgctgagagtctaagcgagtttaaaccattctttggcaatatcattatcactgacgtgaccgcaaattgcctgaccgtgaccttcaaagagtacgtgaccgtttag

SEQ ID NO: 139905 - DNA, 1683 bp, Artificial Sequence
  derived and/or modified sequence
atggagctgcccgcagtcggcgagcatgtcttcgcggtcgagagcatcgaaaagaagaggattcggaagggccgtgtcgaatacctagtgaagtggcgtggctggtctccaaaatacaatacctgggagccggaagagaacatactggacccacgcctcctgattgcttttcaaaacagggagagacaggaacagctgatgggataccgaaaaagaggcccaaagccaaaaccactcgtggtgcaagtgcctacctttgctagacgtagcaacgtgcttactggtctgcaggactctagtacggacaacagggcaaagctggacctgggggcacagggtaaaggtcaggggcatcagtatgaactcaattctaagaaacaccaccaataccagcctcacagtaaggagcgggctggcaagccccctccacccggaaaatccggaaagtactattaccagttaaattccaagaagcaccacccctatcagcccgaccctaagatgtatgatctgcaatatcagggcggacacaaagaagctcctagccccacctgtccagacctcggggctaaaagccacccaccagacaagtgggctcagggggctggagcgaaggggtatctaggggctgtgaaaccactcgcaggcgctgccggagcgcctgggaagggtagcgagaagggcccaccaaacggtatgatgccagctccaaaggaggccgtaaccggaaatggtattggcggtaaaatgaagatcgtgaagaataagaacaagaacgggagaatcgtgatcgtgatgagcaagtatatggaaaatggcatgcaggctgtgaagattaagtctggggaagtagccgagggagaggccaggtctccttcccacaagaagcgcgctgcggatgaacgccaccctccagctgacaggacctttaagaaggccgcaggagctgaggagaagaaggtcgaagccccacccaagcgccgagaggaagaggtcagcggggtttctgacccacagccgcaggatgctgggagcaggaagctttcccctactaaggaggccttcggggaacaacccttacagctgacgacaaaacctgatctcctggcttgggacccagcgagaaacacccatcctccatctcaccatcctcacccgcacccacatcatcaccaccaccatcaccaccatcaccaccacgccgtgggattgaacttgtcccacgttcgcaaacgttgtctgtccgaaacccatggagaaagagagccttgtaaaaaacgcctcacagccaggagtatctccactcccacatgtttaggcggttcacccgctgccgaacggccagcagatctccctccggctgcagccctgccccagccagaggtgatcttacttgattcagatcttgatgagcccattgacctccgatgcgtgaaaacgcgctcagaggccggtgaaccaccatcttctctccaggtgaagccagaaactcctgcatctgccgctgtcgccgtggccgctgccgcagcccctacgacgacggcagaaaaacctccagctgaagctcaggacgaacccgctgagtctttgtccgaatttaaaccatttttcgggaacattatcattaccgatgtcaccgctaattgtctaactgtgacgttcaaagagtatgtcaccgtttag

SEQ ID NO: 139906 - DNA, 873 bp, Artificial Sequence
  derived and/or modified sequence
atggaacttccagctgttggcgagcatgtgtttgcggtggaaagtatcgaaaagaagaggatccgcaaaggcagggtggaatatttggtgaaatggagaggatggtcaccaaagtacaatacctgggagcccgaggagaatatccttgatccaaggctgttaatcgcctttcagaaccgagagaggcaggaacagttaatgggctaccgtaagaggggccctaaaccaaaacctctcgtggtgcaggtgccaacattcgcccgaagaagcaacgttctgaccggcctgcaggatagttcaaccgataaccgagctaagctcgacctgggcgcacaagggaagggccaaggacatcagtacgagctcaacagtaagaaacaccatcatcacgcagtcggactgaacctgagccacgtgagaaagagatgcctgagtgaaacccatggcgagcgggagccttgtaagaaaagactgaccgcacgctccatctcaaccccaacgtgcctgggcggaagtcctgccgcagagcggcctgcggaccttccaccggctgccgcactcccacagccagaagtgatcctgttagattctgacctcgatgaaccgatcgatcttcgctgcgtgaaaacacggtctgaggctggcgaaccaccctcgtccctccaggttaagccagagactccggctagcgctgcagttgcagttgccgctgctgctgctcccactaccaccgccgagaaacccccagcagaagcccaggatgagccagctgagtcgctgtctgaattcaagcctttctttggaaatataataattacggatgtgacggccaactgcttaaccgtgaccttcaaagaatatgtcaccgtctag

SEQ ID NO: 139907 - DNA, 2664 bp, Artificial Sequence
  derived and/or modified sequence
cgagcgcgagccgggagccggggcgggcgcgggcagcggcgggccggccgggctgtgcggggcgagcggcggcggcggcgggggcgcttcggccggggcggcagctgggcgccggcgggagctagcagcgtctgcagccgcgccggccgccagcgccccggcgcgctccggctcggccatggagctgccagctgttggcgagcacgtcttcgcggtggagagcatcgagaagaagcggatccgcaagggcagagtggagtatctggtgaaatggagaggctggtcgcccaaatataacacgtgggaaccggaggagaacatcctggaccccaggctgctgatcgccttccagaacagggaacggcaggagcagctgatgggatatcggaagagagggccgaagcccaaaccgctagtggtgcaggtgcctacctttgcccgtcgttccaatgtcctgaccggcctccaggactcctccactgacaaccgtgccaagctggatttgggcgcgcaggggaagggccaggggcatcagtacgagctcaacagcaagaagcaccaccagtaccagccgcacagcaaggagcgggcgggcaagcccccgccgccgggcaagagcggcaagtactactaccagctcaacagcaagaagcaccacccctaccagcccgaccccaaaatgtacgacctgcagtaccagggcggccacaaggaggcgcccagccccacctgcccggacctgggggccaagagccacccgcccgacaagtgggcgcaaggtgcgggggccaaaggctacctgggggcggtgaagcccctggccggtgcggcgggtgctccaggcaaaggctccgagaagggcccccccaacggaatgatgccggcccccaaagaggctgtgacgggcaacgggattgggggcaagatgaagatagtcaagaacaagaacaagaacggacgcatcgtgatcgtgatgagcaaatacatggagaacggcatgcaggcggtgaagatcaagtccggcgaggtggcagagggggaggctcgctcccccagccacaagaagcgggcagccgacgagcgccaccctcctgccgacaggacttttaaaaaggcggcgggcgcagaggagaagaaggtggaggcgccgcccaagaggagggaggaggaggtgtccggggttagcgatccgcagccccaggatgccggctcccgcaagctgtccccgaccaaggaggcctttggagagcagcccctgcagctcaccaccaagcccgacctgcttgcctgggacccggcccggaacacgcacccgccctcacaccacccgcacccgcacccccatcaccaccaccaccaccaccaccaccaccaccacgccgtcggcctgaatctctcccacgtgcgcaagcgctgcctctccgagacccacggcgagcgcgagccctgcaagaagcggctgactgcgcgcagcatcagcacccccacctgcctggggggcagcccagccgctgagcgcccggccgacctgccaccagccgccgccctcccgcagcccgaggtcatcctgctagactcagacctggatgaacccatagacttgcgctgcgtcaagacgcgcagcgaggccggggagccgcccagctccctccaggtgaagcccgagacaccggcgtcggcggcggtggcggtggcggcggcagcggcacccaccacgacggcggagaagcctccagccgaggcccaggacgaacctgcagagtcgctgagcgagttcaagcccttctttgggaatataattatcaccgacgtcaccgcgaactgcctcaccgttactttcaaggagtacgtgacggtgtagccggagggcgtcggaaggggaagcgccattcccgcgggggggcggggagctgagcacctggggcctcggggcgggctcccctctcgccaacccgccaaccgcgagagacccaggctggcccccagggtgaggacgcccggagcggaggtaaccatgttccccctgcggcggctgtcagacctgggcggaggccccttccacgcggtgccggcggggctcgccctctcctgcccttccccgctggagatggacccccggaacggacagggcagctctgcgcccggcctcagagttctagtattatattttaaccgtgctaacttgtcaagtgctgactctactcccgtttgtacgtggtgttattattgaaatgtattgtttgagctcaaaaggcccgaccaccccccttcgggctgctatatatatatttatttgtaggtatttatatattgaaatataaaaacctagatttatggagtttcctctagatcatgttatattctatatcagacaaactattttcttttgacctttcttcccctccatccagtatttcggttgatttcattttctcccctctcttccccttccacgaactgcaataccagtaaccttggtatatattttttgatactgtacacatggatgtcttgtttctatgtgcaaaaaaaaaaaaaaaaaaaagtttgttaaaaggctacacgagctctctagaaactgctgctactagaaatgtctaaactataagcttccaactattacctgcttgaatgtaaatattaaatggagatgttgaaggtgca

SEQ ID NO: 139908 - DNA, 1683 bp, Artificial Sequence
  derived and/or modified sequence
atggagctgcccgccgtgggcgagcacgtgttcgccgtggagagcatcgagaagaagagaatcagaaagggcagagtggagtacctggtgaagtggagaggctggagccccaagtacaacacctgggagcccgaggagaacatcctggaccccagactgctgatcgccttccagaacagagagagacaggagcagctgatgggctacagaaagagaggccccaagcccaagcccctggtggtgcaggtgcccaccttcgccagaagaagcaacgtgctgaccggcctgcaggacagcagcaccgacaacagagccaagctggacctgggcgcccagggcaagggccagggccaccagtacgagctgaacagcaagaagcaccaccagtaccagccccacagcaaggagagagccggcaagccccccccccccggcaagagcggcaagtactactaccagctgaacagcaagaagcaccacccctaccagcccgaccccaagatgtacgacctgcagtaccagggcggccacaaggaggcccccagccccacctgccccgacctgggcgccaagagccacccccccgacaagtgggcccagggcgccggcgccaagggctacctgggcgccgtgaagcccctggccggcgccgccggcgcccccggcaagggcagcgagaagggcccccccaacggcatgatgcccgcccccaaggaggccgtgaccggcaacggcatcggcggcaagatgaagatcgtgaagaacaagaacaagaacggcagaatcgtgatcgtgatgagcaagtacatggagaacggcatgcaggccgtgaagatcaagagcggcgaggtggccgagggcgaggccagaagccccagccacaagaagagagccgccgacgagagacacccccccgccgacagaaccttcaagaaggccgccggcgccgaggagaagaaggtggaggccccccccaagagaagagaggaggaggtgagcggcgtgagcgacccccagccccaggacgccggcagcagaaagctgagccccaccaaggaggccttcggcgagcagcccctgcagctgaccaccaagcccgacctgctggcctgggaccccgccagaaacacccacccccccagccaccacccccacccccacccccaccaccaccaccaccaccaccaccaccaccaccacgccgtgggcctgaacctgagccacgtgagaaagagatgcctgagcgagacccacggcgagagagagccctgcaagaagagactgaccgccagaagcatcagcacccccacctgcctgggcggcagccccgccgccgagagacccgccgacctgccccccgccgccgccctgccccagcccgaggtgatcctgctggacagcgacctggacgagcccatcgacctgagatgcgtgaagaccagaagcgaggccggcgagccccccagcagcctgcaggtgaagcccgagacccccgccagcgccgccgtggccgtggccgccgccgccgcccccaccaccaccgccgagaagccccccgccgaggcccaggacgagcccgccgagagcctgagcgagttcaagcccttcttcggcaacatcatcatcaccgacgtgaccgccaactgcctgaccgtgaccttcaaggagtacgtgaccgtgtag

SEQ ID NO: 139909 - protein, 370 aa, Artificial Sequence
  derived and/or modified sequence
MLGAVEGPRWKQAEDIRDIYDFRDVLGTGAFSEVILAEDKRTQKLVAIKCIAKEALEGKEGSMENEIAVLHKIKHPNIVALDDIYESGGHLYLIMQLVSGGELFDRIVEKGFYTERDASRLIFQVLDAVKYLHDLGIVHRDLKPENLLYYSLDEDSKIMISDFGLSKMEDPGSVLSTACGTPGYVAPEVLAQKPYSKAVDCWSIGVIAYILLCGYPPFYDENDAKLFEQILKAEYEFDSPYWDDISDSAKDFIRHLMEKDPEKRFTCEQALQHPWIAGDTALDKNIHQSVSEQIKKNFAKSKWKQAFNATAVVRHMRKLQLGTSQEGQGQTASHGELLTPVAGGPAAGCCCRDCCVEPGTELSPTLPHQL

SEQ ID NO: 139910 - DNA, 1113 bp, Artificial Sequence
  derived and/or modified sequence
atgcttggggctgtggagggcccgcgatggaagcaggccgaggacatccgcgacatctacgatttccgtgatgtgctgggtaccggtgcctttagcgaagtcatactggcagaagataagaggactcagaagctggtggcaatcaagtgcatcgcgaaagaagcattagagggcaaggagggaagtatggagaacgagatcgctgtgctccacaaaattaagcatccaaatattgttgcgctggatgatatctacgaaagcggcggtcatctgtaccttatcatgcagctagtatctgggggagaactctttgaccggattgtggagaagggattttacaccgagagagacgccagtcggttgatttttcaagtgttagatgcagttaaataccttcacgacctcggcatagtccatcgagacctgaagcccgagaaccttctttactattcattagacgaggatagtaaaatcatgatctccgacttcggtttgtccaagatggaagatccgggctctgtgttaagcacggcttgtgggacaccaggctacgtcgctcccgaggtgttggctcagaaaccgtacagcaaggcggtggactgttggtccattggcgtgatcgcatacatattgctgtgtggttatcccccattttacgacgaaaatgatgcgaagttgttcgaacagatcttgaaggccgagtatgagttcgactccccctactgggacgatatctccgatagcgccaaagattttatcagacacttgatggaaaaagaccctgaaaagagatttacatgtgagcaggccctgcagcacccgtggattgctggagataccgcactggacaaaaatatccaccagagcgtgtcagagcaaataaagaagaacttcgctaaaagcaagtggaaacaggccttcaacgccaccgctgtggtccggcatatgcggaagcttcagctgggtacgtctcaggagggtcagggccagaccgcctcacatggcgaactgctgactccagttgccggcggacccgccgctggttgttgctgccgagactgttgtgtggagcccggaacggaactgtcccctacactgccccaccagctgtag

SEQ ID NO: 139911 - DNA, 1113 bp, Artificial Sequence
  derived and/or modified sequence
atgctgggcgctgtggagggcccccgctggaagcaggccgaggacatccgggacatctatgacttcagagatgtgctgggcaccggggccttcagcgaggtgatcctggccgaggacaagaggacccagaagctggtggccatcaagtgcatcgccaaggaggccctggagggcaaggagggctccatggagaatgaaattgctgtgctgcacaagatcaagcaccccaacatcgtggccctggatgacatctatgaaagtggcggccacctgtacctgatcatgcagctggtgtctggaggagagctgtttgacagaattgtggagaagggcttctacacagaaagagatgccagccgcctcatcttccaggtgctggatgctgtgaagtacctgcatgacctgggcatcgtgcaccgggacctgaagccagagaacctgctgtactacagcctggatgaggacagcaagatcatgatcagtgactttggcctgagcaagatggaggaccccggctctgtgctgagcacagcctgtggcaccccaggctacgtggcccctgaggtgctggcccagaagccctacagcaaggctgtggactgctggagcattggagtgattgcctacatcctgctgtgtggctacccacccttctatgatgaaaatgatgccaagctgtttgagcagatcctgaaggccgagtatgaatttgacagcccctactgggatgacatcagtgacagcgccaaggacttcatccgccacctgatggagaaggaccctgagaagcgcttcacctgtgagcaggccctgcagcacccctggattgctggggacacagccctggacaagaacatccaccagagcgtgtctgagcagatcaagaagaactttgccaagagcaagtggaagcaggccttcaatgccacagctgtggtgcgccacatgaggaagctgcagctgggcaccagccaggagggccagggccagacagccagccacggggagctgctgacccctgtggccggcggccctgctgctggctgctgctgccgggactgctgcgtggagcccggcacagagctgagccccaccctgccccaccagctgtag

SEQ ID NO: 139912 - DNA, 1113 bp, Artificial Sequence
  derived and/or modified sequence
atgctgggcgccgtggagggcccccggtggaagcaggccgaggacattcgggacatttacgactttagagacgtgctcgggacgggcgcattctcggaggtgattctagctgaagataagcgaacacagaaactggtggccatcaagtgcattgctaaggaggcattagaaggaaaggagggttcaatggaaaacgaaattgccgttctgcacaagattaagcatccaaacatcgttgccttggatgacatctatgaaagcggaggtcacctgtacctcattatgcagctggtgtccggtggtgagcttttcgaccggattgtggagaaggggttttacacagagcgtgatgcatcacggctaatttttcaggttcttgacgcagttaaatatctgcacgacctggggattgtgcacagagacttaaagcccgaaaatttgttgtactattccctcgatgaagattctaagatcatgatctccgatttcggactcagtaagatggaagatcctgggtccgtcctcagcacggcctgtggaacccccggctacgtagcccccgaggtgctggctcagaagccatactctaaggctgtggactgctggtccatcggtgttattgcatacatccttctatgcgggtatccccccttctacgacgagaacgatgcgaagctttttgaacagatattgaaggcagaatatgagttcgatagtccttattgggatgacataagcgactcagcgaaagattttatcagacacctgatggagaaggatcccgagaagcgctttacttgcgaacaagcgttgcagcatccatggattgcaggagatactgcactagataaaaacatccaccagtctgtgagcgagcaaattaaaaagaactttgccaagtctaagtggaagcaagcttttaacgcaactgccgtagttcggcatatgcggaagcttcaattagggaccagtcaagaaggacagggccagacagcaagccatggtgagctactcactccggtagcgggggggccagcggccgggtgttgctgtagagactgctgtgtggaacctggaaccgagctgagtcctacgctaccacaccagctgtag

SEQ ID NO: 139913 - DNA, 1113 bp, Artificial Sequence
  derived and/or modified sequence
atgctgggagctgtggaaggcccaagatggaagcaggccgaagacattcgggatatctacgattttagggatgtattaggaaccggagccttctctgaggtgatcctggccgaagacaagcgaacgcagaagctcgtggcaatcaaatgcattgccaaggaagctttggagggcaaggaaggcagcatggaaaatgagattgctgtcctgcataagatcaaacacccgaacatcgtggctctcgacgacatctatgaatccggaggacatctgtacctcatcatgcaattagtgtccgggggagagttgttcgatcggatagtcgaaaaagggttttataccgagagggacgcctcgaggttgatttttcaggtgctcgacgccgttaagtatttgcatgacctagggattgtacatcgggacctcaaaccagagaacctcctctattattctcttgatgaggactccaagatcatgatctcagattttgggctgtcaaaaatggaggacccaggatccgtgcttagcacagcgtgcggcacaccaggctacgtggcacccgaagtgctagcccagaaaccatattctaaggctgtggattgctggtctattggcgttattgcatatattctgctctgtgggtacccgcctttttatgatgaaaatgacgcaaagctgttcgaacaaattctgaaagcagagtacgaattcgatagcccctactgggatgatattagtgactctgctaaagacttcatccgccacctgatggagaaggaccccgagaaacggtttacttgcgaacaagcgttgcagcatccctggatcgccggagatacagccctcgacaagaatattcaccaaagcgtctcagagcaaatcaagaagaacttcgcgaagtcgaaatggaaacaggctttcaacgccacagcagtggtgcgacacatgagaaaattacaactcggtacctctcaagaaggacagggacagacagcctcccacggggaactgttaacccccgttgcaggtggccctgctgccggatgttgctgccgcgattgttgcgtggaacctgggaccgagttgagcccaacacttccccatcaactatag

SEQ ID NO: 139914 - DNA, 1488 bp, Artificial Sequence
  derived and/or modified sequence
ggagagagccgccgagccgagccgagccccagctccagcaagagcgcgggcgggtggcccaggcacgcagcggtgaggaccgcggccacagctcggcgccaaccaccgcgggcctcccagccagccccgcggcggggcagccgcaggagccctggctgtggtcggggggcagtgggccatgctgggggcagtggaaggccccaggtggaagcaggcggaggacattagagacatctacgacttccgagatgttctgggcacgggggccttctcggaggtgatcctggcagaagataagaggacgcagaagctggtggccatcaaatgcattgccaaggaggccctggagggcaaggaaggcagcatggagaatgagattgctgtcctgcacaagatcaagcaccccaacattgtagccctggatgacatctatgagagtgggggccacctctacctcatcatgcagctggtgtcgggtggggagctctttgaccgtattgtggaaaaaggcttctacacggagcgggacgccagccgcctcatcttccaggtgctggatgctgtgaaatacctgcatgacctgggcattgtacaccgggatctcaagccagagaatctgctgtactacagcctggatgaagactccaaaatcatgatctccgactttggcctctccaagatggaggacccgggcagtgtgctctccaccgcctgtggaactccgggatacgtggcccctgaagtcctggcccagaagccctacagcaaggctgtggattgctggtccataggtgtcatcgcctacatcttgctctgcggttaccctcccttctatgacgagaatgatgccaaactctttgaacagattttgaaggccgagtacgagtttgactctccttactgggacgacatctctgactctgccaaagatttcatccggcacttgatggagaaggacccagagaaaagattcacctgtgagcaggccttgcagcacccatggattgcaggagatacagctctagataagaatatccaccagtcggtgagtgagcagatcaagaagaactttgccaagagcaagtggaagcaagccttcaatgccacggctgtggtgcggcacatgaggaaactgcagctgggcaccagccaggaggggcaggggcagacggcgagccatggggagctgctgacaccagtggctggggggccggcagctggctgttgctgtcgagactgctgcgtggagccgggcacagaactgtcccccacactgccccaccagctctagggccctggacctcgggtcatgatcctctgcgtgggagggcttgggggcagcctgctccccttccctccctgaaccgggagtttctctgccctgtcccctcctcacctgcttccctaccactcctcactgcattttccatacaaatgtttctattttattgttccttcttgtaataaagggaagataaaaccatcctt

SEQ ID NO: 139915 - DNA, 1113 bp, Artificial Sequence
  derived and/or modified sequence
atgctgggcgccgtggagggccccagatggaagcaggccgaggacatcagagacatctacgacttcagagacgtgctgggcaccggcgccttcagcgaggtgatcctggccgaggacaagagaacccagaagctggtggccatcaagtgcatcgccaaggaggccctggagggcaaggagggcagcatggagaacgagatcgccgtgctgcacaagatcaagcaccccaacatcgtggccctggacgacatctacgagagcggcggccacctgtacctgatcatgcagctggtgagcggcggcgagctgttcgacagaatcgtggagaagggcttctacaccgagagagacgccagcagactgatcttccaggtgctggacgccgtgaagtacctgcacgacctgggcatcgtgcacagagacctgaagcccgagaacctgctgtactacagcctggacgaggacagcaagatcatgatcagcgacttcggcctgagcaagatggaggaccccggcagcgtgctgagcaccgcctgcggcacccccggctacgtggcccccgaggtgctggcccagaagccctacagcaaggccgtggactgctggagcatcggcgtgatcgcctacatcctgctgtgcggctacccccccttctacgacgagaacgacgccaagctgttcgagcagatcctgaaggccgagtacgagttcgacagcccctactgggacgacatcagcgacagcgccaaggacttcatcagacacctgatggagaaggaccccgagaagagattcacctgcgagcaggccctgcagcacccctggatcgccggcgacaccgccctggacaagaacatccaccagagcgtgagcgagcagatcaagaagaacttcgccaagagcaagtggaagcaggccttcaacgccaccgccgtggtgagacacatgagaaagctgcagctgggcaccagccaggagggccagggccagaccgccagccacggcgagctgctgacccccgtggccggcggccccgccgccggctgctgctgcagagactgctgcgtggagcccggcaccgagctgagccccaccctgccccaccagctgtag

SEQ ID NO: 139916 - protein, 584 aa, Artificial Sequence
  derived and/or modified sequence
MGNQMSVPQRVEDQENEPEAETYQDNASALNGVPVVVSTHTVQHLEEVDLGISVKTDNVATSSPETTEISAVADANGKNLGKEAKPEAPAAKSRFFLMLSRPVPGRTGDQAADSSLGSVKLDVSSNKAPANKDPSESWTLPVAAGPGQDTDKTPGHAPAQDKVLSAARDPTLLPPETGGAGGEAPSKPKDSSFFDKFFKLDKGQEKVPGDSQQEAKRAEHQDKVDEVPGLSGQSDDVPAGKDIVDGKEKEGQELGTADCSVPGDPEGLETAKDDSQAAAIAENNNSIMSFFKTLVSPNKAETKKDPEDTGAEKSPTTSADLKSDKANFTSQETQGAGKNSKGCNPSGHTQSVTTPEPAKEGTKEKSGPTSLPLGKLFWKKSVKEDSVPTGAEENVVCESPVEIIKSKEVESALQTVDLNEGDAAPEPTEAKLKREESKPRTSLMAFLRQMSVKGDGGITHSEEINGKDSSCQTSDSTEKTITPPEPEPTGAPQKGKEGSSKDKKSAAEMNKQKSNKQEAKEPAQCTEQATVDTNSLQNGDKLQKRPEKRQQSLGGFFKGLGPKRMLDAQVQTDPVSIGPVGKSK

SEQ ID NO: 139917 - protein, 164 aa, Artificial Sequence
  derived and/or modified sequence
MLSRPVPGRTGDQAADSSLGSVKLDVSSNKAPANKDPSESWTLPVAAGPGQDTDKTPGHAPAQDKVLSAARDPTLLPPETGGAGGEAPSKPKDSSFFDKFFKLDKGQEKVPGDSQQEAKRAEHQDKVDEVPGLSGQSDDVPAGKVSVPRCIHLVLNACSGALMG

SEQ ID NO: 139918 - DNA, 1755 bp, Artificial Sequence
  derived and/or modified sequence
atgggtaatcagatgtcggttccacaacgggtggaagaccaggagaacgagcccgaagccgagacctaccaggacaacgcatctgccttgaacggtgttccagtggttgtgtctacgcacacggtccagcacctggaggaagttgatcttggaatctcagttaaaactgataatgtggccacgtcctcgcctgaaaccacggagatctcagcagttgcggacgccaacggcaaaaatttgggaaaggaagccaagccagaagctcccgccgcaaagtcacgattttttcttatgctgagccgtcccgttcccggtcggacgggtgatcaggcggctgatagctcgttaggaagcgttaagctggatgtatcatcgaacaaagccccagccaataaagatcccagtgagtcttggaccttaccagtagcggcaggaccgggccaggatactgacaagacaccaggccacgctcccgcccaagacaaagtgctctctgcagcgcgtgaccccacactgttgcctccagaaactggcggagccgggggggaagctccttccaaacccaaagacagttctttctttgataaattcttcaagcttgataagggccaagagaaggttccaggagactcgcagcaggaggccaagagagccgaacatcaggataaggtggatgaagtgcctgggctaagtggtcagagcgatgacgtgcccgctggaaaagatattgtggatggcaaggagaaggaaggccaagaactgggaacggcagactgctcagttccaggcgaccctgagggcctggagactgctaaagacgacagtcaggcggcggctattgccgagaataataactctattatgtctttctttaaaactctcgtgagccctaataaggctgaaacaaagaaggatccggaggacaccggagccgaaaagtcaccaaccacttcagccgatctgaagtctgacaaagctaatttcacatctcaggagacacagggggctggaaagaatagcaagggatgcaaccccagcggccacacccaaagtgtaaccacacccgagcccgcaaaagaaggcactaaggagaaatcagggccaacttcactcccactcggcaagctgttttggaaaaaatcggtcaaagaagacagtgtgcctacgggcgctgaggaaaatgtcgtgtgtgagtcacctgtagagatcattaaatcaaaagaggtagaatcagccctgcagaccgtagatctgaacgagggcgatgccgctccggaacccacagaagccaaacttaaacgggaggagtccaagccaaggaccagtcttatggctttcctgcgtcaaatgagcgttaagggcgatgggggtatcactcactcagaggagattaatggcaaggactcaagttgtcagacgtctgacagcaccgagaaaaccatcaccccaccagagccggaaccaactggggcaccacagaagggcaaagagggatcctcaaaggataaaaagagcgcagccgaaatgaataagcagaagtctaataagcaagaagccaaagagccggctcagtgtaccgaacaggcaacggtggacaccaactcccttcaaaacggtgacaagctgcagaagagacccgagaagcgccagcagagcttggggggatttttcaagggactgggccctaaacgcatgttggatgcgcaggtgcagacagaccccgtcagtatcggacctgtgggaaagagcaagtag

SEQ ID NO: 139919 - DNA, 1755 bp, Artificial Sequence
  derived and/or modified sequence
atgggcaaccagatgtctgtgccccagagggtggaggaccaggagaatgaacctgaggccgagacctaccaggacaatgccagcgccctgaatggagtgcctgtggtggtgtccacccacacagtgcagcacctggaggaggtggacctgggcatctctgtgaagacagacaacgtggccaccagcagccctgagaccacagagatctctgctgtggctgatgccaacgggaagaacctgggcaaggaggccaagccagaggccccagctgccaagagccgcttcttcctgatgctgagcaggcctgtgcccggccgcactggagaccaggccgctgacagcagcctgggctctgtgaagctggatgtgagcagcaacaaggccccagccaacaaggaccccagcgagagctggaccctgcctgtggccgccggccctggccaggacacagacaagaccccaggccacgccccagcccaggacaaggtgctgtctgctgcccgggaccccaccctgctgcccccagagactggaggagctggaggagaggcccccagcaagcccaaggacagcagcttctttgacaagttcttcaagctggacaagggccaggagaaggtgcctggggacagccagcaggaggccaagagagctgagcaccaggacaaggtggatgaggtgcccggcctgagcggccagagtgatgatgtgcctgctgggaaggacatcgtggatggcaaggagaaggagggccaggagctgggcacagctgactgcagcgtgcctggggaccctgagggcctggagacagccaaggatgacagccaggccgccgccatcgccgagaacaacaacagcatcatgtccttcttcaagaccctggtgagccccaacaaggccgagaccaagaaggaccctgaagatactggagctgagaagagccccaccaccagcgctgacctgaagagtgacaaggccaacttcaccagccaggagacccagggcgctgggaagaacagcaagggctgcaaccccagcggccacacccagagcgtgaccaccccagagcccgccaaggagggcaccaaggagaagagcggccccaccagcctgcccctgggcaagctgttctggaagaagtctgtgaaggaggacagcgtgcccactggagcagaagaaaatgtggtgtgtgagagccctgtggagatcatcaagagcaaggaggtggagagcgccctgcagacagtggacctgaatgaaggagatgctgcccctgagcccacagaggccaagctgaagcgggaggagagcaagcccaggaccagcctgatggccttcctgcggcagatgtctgtgaagggagatggcggcatcacccacagcgaggagatcaatggcaaggacagcagctgccagaccagtgacagcacagagaagaccatcaccccacctgagcctgagcccactggagccccccagaagggcaaggagggcagcagcaaggacaagaagtctgctgctgagatgaacaagcagaagagcaacaagcaggaggccaaggagcccgcccagtgcacagagcaggccaccgtggacaccaacagcctgcagaatggagacaagctgcagaagaggcctgagaagaggcagcagagcctgggcggcttcttcaagggcctgggccccaagaggatgctggatgcccaggtgcagacagatcctgtgtccatcggccctgtgggcaagagcaagtag

SEQ ID NO: 139920 - DNA, 1755 bp, Artificial Sequence
  derived and/or modified sequence
atgggcaaccagatgagcgtgccccagcgggtggaggaccaggagaatgagcccgaggcagagacttaccaggacaatgcgtctgcattgaatggcgtgccagtagtggtgtcaacacacaccgtgcagcacttagaagaggttgatctggggatttcggttaaaaccgacaatgtggccacctcatcacctgaaactacagagatatccgcagttgcggacgctaacgggaagaacctggggaaggaagctaaacccgaagctccggcggcgaagagcaggttttttctgatgctgtccagaccggtgcccggcaggacgggcgaccaggccgctgacagttccctgggcagcgtcaagctggatgtttcgtcaaataaagccccagccaacaaggaccctagcgagtcttggacactccccgtggctgctggccctggacaggacacagacaagacccctggccatgccccagcccaggacaaggttctttcggcggcccgggaccctactctgttacctcctgaaacggggggggctggaggtgaggctccttcaaagcctaaggatagctccttcttcgacaagttttttaagcttgacaaggggcaggagaaagtgcccggagattcccagcaggaagctaaacgggcagaacaccaggataaggttgacgaggtgcctggacttagcgggcagtcagatgacgtaccagctggaaaagatattgtggatgggaaggaaaaagagggccaggagcttgggactgctgactgctctgtgcctggggacccagagggcctcgagactgccaaagatgactcacaggctgccgccatagcagaaaataataattctatcatgagtttctttaagaccttggtgagtccgaacaaagctgagaccaagaaggacccagaggataccggggccgaaaaatctcccacaacatccgcagacctcaaatccgacaaggccaactttacttctcaggaaacacagggcgcgggtaagaattccaaaggctgcaacccttctggccacacccaatcggtcactactcctgaacccgccaaggaagggaccaaggagaaaagtggacccaccagtctgccccttgggaagctcttctggaagaaatccgtaaaggaagattccgtgccgacaggcgccgaagaaaatgttgtgtgcgagtccccggtggagatcataaaatctaaggaagtcgaatccgctctgcagactgtggaccttaatgagggcgacgcagcaccggaaccaaccgaagccaagctaaagcgggaggagagcaagccgagaacgtcgctcatggcattcctgcgccagatgagcgtgaaaggcgatggagggatcacccactcggaggagattaacgggaaggacagttcctgtcagacttccgactcgactgagaaaacgattactccacctgaacccgagccaacaggggctccacaaaagggaaaggagggctcttccaaagacaagaaaagcgctgcagagatgaataaacagaagagcaataaacaggaagccaaggagcctgcccagtgcaccgaacaggccaccgtcgacacgaacagtctgcagaatggtgacaagctccagaaacgccctgagaagcgccagcaatcgttgggcggattttttaaggggctggggcccaaacgcatgctggacgcacaagtgcagactgacccggtttctatcggaccagttggtaagtctaaatag

SEQ ID NO: 139921 - DNA, 1755 bp, Artificial Sequence
  derived and/or modified sequence
atgggaaatcagatgtccgttcctcaacgggtggaagaccaggagaatgagcctgaggcagagacatatcaggacaatgcatcggcccttaacggggtacctgtcgtggtctccacacataccgttcaacatcttgaagaggtggacttgggaatatctgtgaaaaccgacaacgttgccaccagctcccccgaaaccaccgaaattagtgcagtagcagacgccaatggaaaaaacttaggaaaggaggcgaagccagaggcacccgcagctaaaagcaggttcttcctgatgcttagtaggccggtgcccggacgcacaggcgaccaagctgcggactcctccctcggttctgtcaaactggatgtatcctcgaataaggcacctgctaataaggacccctcagagagctggacccttccagtggccgctggccctggacaggatacggataaaacccctggtcacgctccggctcaggataaggtactcagcgccgctcgggaccctacactgctgccgccagagacagggggtgccggaggagaagcacctagcaaaccaaaggattcctcgtttttcgacaaattttttaaattagataaaggtcaggagaaggtacctggtgattcccaacaggaggctaagcgcgctgaacaccaggacaaggtggacgaggtgccgggactgtccggtcaaagtgatgatgtgccagctggcaaagacatcgtcgacggcaaggaaaaagaaggccaagagcttgggaccgctgattgttccgtccctggggatccagaaggcctagaaactgccaaagacgacagtcaggccgctgcaatcgccgagaataacaactctatcatgagcttctttaaaaccctggtgtctcccaacaaggcggaaaccaaaaaggaccccgaagacaccggcgctgaaaagagtcctaccactagtgccgatctgaagtctgacaaggctaacttcacttctcaggaaacccagggggctgggaaaaattccaagggctgtaacccaagcggtcatacccagagcgtaacaactccagagcctgccaaggaaggtacaaaagagaaaagtggcccaactagtctgcccctcgggaaactgttttggaaaaagagtgtcaaggaggactcagtgcctacaggggctgaagagaacgtagtctgcgagtcacccgtagaaatcatcaagtctaaagaggtggagagcgcgctgcagaccgtggatctcaatgagggtgacgctgcaccagagccgacagaagccaaattgaagcgtgaagaatccaaaccaagaacctccctgatggcattcttaagacagatgagcgtaaagggagatggagggatcactcactctgaggaaataaatggaaaagattcttcgtgccaaactagtgacagcacagaaaaaaccatcaccccaccggagccagagccaacaggggcaccgcaaaaaggcaaagagggatcatccaaggacaagaagtccgctgcagaaatgaacaaacagaagagtaataagcaagaggctaaggagccagcccagtgtaccgagcaggcaaccgttgatacgaactccttgcagaacggggataaacttcagaagcgccctgagaagcggcagcaaagcttggggggatttttcaagggtttggggcctaagcggatgctagacgcccaggtgcaaacagaccctgtctctattgggcctgtaggaaagtctaaatag

SEQ ID NO: 139922 - DNA, 3303 bp, Artificial Sequence
  derived and/or modified sequence
gtattcagccagcaggctctgcacaaggaagcaaagtgcagggagccaggctccaccgacagccaggcactgggcagcacgcactggagacccaggaccctgtgcaggagcagctccgggtgacacgaggggactgaagatactcccacaggggctcagcaggagcaatgggtaaccaaatgagtgttccccaaagagttgaagaccaagagaatgaaccagaagcagagacttaccaggacaacgcgtctgctctgaacggggttccagtggtggtgtcgacccacacagttcagcacttagaggaagtcgacttgggaataagtgtcaagacggataatgtggccacttcttcccccgagacaacggagataagtgctgttgcggatgccaacggaaagaatcttgggaaagaggccaaacccgaggcaccagctgctaaatctcgttttttcttgatgctctctcggcctgtaccaggacgtaccggagaccaagccgcagattcatcccttggatcagtgaagcttgatgtcagctccaataaagctccagcgaacaaagacccaagtgagagctggacacttccggtggcagctggaccggggcaggacacagataaaaccccagggcacgccccggcccaagacaaggtcctctctgccgccagggatcccacgcttctcccacctgagacagggggagcaggaggagaagctccctccaagcccaaggactccagcttttttgacaaattcttcaagctggacaagggacaggaaaaggtgccaggtgacagccaacaggaagccaagagggcagagcatcaagacaaggtggatgaggttcctggcttatcagggcagtccgatgatgtccctgcagggaaggacatagttgacggcaaggaaaaagaaggacaagaacttggaactgcggattgctctgtccctggggacccagaaggactggagactgcaaaggacgattcccaggcagcagctatagcagagaataataattccatcatgagtttctttaaaactctggtttcacctaacaaagctgaaacaaaaaaggacccagaagacacgggtgctgaaaagtcacccaccacttcagctgaccttaagtcagacaaagccaactttacatcccaggagacccaaggggctggcaagaattccaaaggatgcaacccatcggggcacacacagtccgtgacaacccctgaacctgcgaaggaaggcaccaaggagaaatcaggacccacctctctgcctctgggcaaactgttttggaaaaagtcagttaaagaggactcagtccccacaggtgcggaggagaatgtggtgtgtgagtcaccagtagagattataaagtccaaggaagtagaatcagccttacaaacagtggacctcaacgaaggagatgctgcacctgaacccacagaagcgaaactcaaaagagaagaaagcaaaccaagaacctctctgatggcgtttctcagacaaatgtcagtgaaaggggatggagggatcacccactcagaagaaataaatgggaaagactccagctgccaaacatcagactccacagaaaagactatcacaccgccagagcctgaaccaacaggagcaccacagaagggtaaagagggctcctcgaaggacaagaagtcagcagccgagatgaacaagcagaagagcaacaagcaggaagccaaagaaccagcccagtgcacagagcaggccacggtggacacgaactcactgcagaatggggacaagctccaaaagagacctgagaagcggcagcagtcccttgggggcttctttaaaggcctgggaccaaagcggatgttggatgctcaagtgcaaacagacccagtatccatcggaccagttggcaaatccaagtaaacaaatcagcacggttcccaccaggttctcctgccaccaagatgtgttctccttactccatctcctccccaaacacgctccatgtatatattcttctgatggccagcaaatgaaattctgcctagaaattaagcccgagctgttgtatattgaggtgtattatttacgtctctggtccagtcttttctggcaaataacagtaaagatggtttagcaggtcacctagttgggtcagaagagtcgatgatcaccaagcaggaaagggagggaatagaggaatgtgttcgggttaagtgatgaaaatggcagtggtggccgggcgtggtggctctcgcctgtaatctcagcactttgggaggccgaggcaggtggatcacctgaggtcaggagttcaagactagcctggccaacatcatgaaaccccgtctctactaaaaatacaaaaattagccaggcatggtggcacacacctgtagtcccagctactcgggagcccaacgcacgagaaccgcttgtacccaggaggtggaggttgcagtgagccgaagttgcaccattgcactccaccctgggcgacagagcaagattctatcaaaaaaaaaaaaaggcagtggcaagtaagttatagaagagaaatgctgctagaaggaattaagcgttgtagtaaatgcgtgcttatcctctaagcttgaagaagggagacgaaaatccatttgtttaaattcacatctcaaggagggagaacccgggctgtgttgggtggttgccaatttcctagaacggaatgtgtggggtatagaaaaaggaatgaataagcgttgtttttcaaatagggtccttgtaagttattgatgagagggaaaagattgactggggagggcttaaaatgatttgggaaaacaattgcttttgaggctcagtgacaacggcaaagattacaacttaaaaaaaaaaaataaataaaaaataaaggaagttgcacggttattttgcaacacaagggggcggcaaggtccccatttttatcctgtaatactgtatccctaacaaagatttggtctctgctatcttacattattaatgtttctcagatggctgaggggctcgcttcatctgttccgtctgacacttatctcaagtgtgtctgtcattcctaatgttctcaggatgtgctctgataaaaccctccccataacctcagttaataaaaatttacagaagacttctcaaatacctgagttgtttttaatacctgtacaaaggagtaaataggaccctgagtctattaaaatgtaattcaaagtagcatatgattgactgacagtcatgtaaactgtatctttctttttctgatttaataaaaaatacatttacttctaaa

SEQ ID NO: 139923 - DNA, 1755 bp, Artificial Sequence
  derived and/or modified sequence
atgggcaaccagatgagcgtgccccagagagtggaggaccaggagaacgagcccgaggccgagacctaccaggacaacgccagcgccctgaacggcgtgcccgtggtggtgagcacccacaccgtgcagcacctggaggaggtggacctgggcatcagcgtgaagaccgacaacgtggccaccagcagccccgagaccaccgagatcagcgccgtggccgacgccaacggcaagaacctgggcaaggaggccaagcccgaggcccccgccgccaagagcagattcttcctgatgctgagcagacccgtgcccggcagaaccggcgaccaggccgccgacagcagcctgggcagcgtgaagctggacgtgagcagcaacaaggcccccgccaacaaggaccccagcgagagctggaccctgcccgtggccgccggccccggccaggacaccgacaagacccccggccacgcccccgcccaggacaaggtgctgagcgccgccagagaccccaccctgctgccccccgagaccggcggcgccggcggcgaggcccccagcaagcccaaggacagcagcttcttcgacaagttcttcaagctggacaagggccaggagaaggtgcccggcgacagccagcaggaggccaagagagccgagcaccaggacaaggtggacgaggtgcccggcctgagcggccagagcgacgacgtgcccgccggcaaggacatcgtggacggcaaggagaaggagggccaggagctgggcaccgccgactgcagcgtgcccggcgaccccgagggcctggagaccgccaaggacgacagccaggccgccgccatcgccgagaacaacaacagcatcatgagcttcttcaagaccctggtgagccccaacaaggccgagaccaagaaggaccccgaggacaccggcgccgagaagagccccaccaccagcgccgacctgaagagcgacaaggccaacttcaccagccaggagacccagggcgccggcaagaacagcaagggctgcaaccccagcggccacacccagagcgtgaccacccccgagcccgccaaggagggcaccaaggagaagagcggccccaccagcctgcccctgggcaagctgttctggaagaagagcgtgaaggaggacagcgtgcccaccggcgccgaggagaacgtggtgtgcgagagccccgtggagatcatcaagagcaaggaggtggagagcgccctgcagaccgtggacctgaacgagggcgacgccgcccccgagcccaccgaggccaagctgaagagagaggagagcaagcccagaaccagcctgatggccttcctgagacagatgagcgtgaagggcgacggcggcatcacccacagcgaggagatcaacggcaaggacagcagctgccagaccagcgacagcaccgagaagaccatcaccccccccgagcccgagcccaccggcgccccccagaagggcaaggagggcagcagcaaggacaagaagagcgccgccgagatgaacaagcagaagagcaacaagcaggaggccaaggagcccgcccagtgcaccgagcaggccaccgtggacaccaacagcctgcagaacggcgacaagctgcagaagagacccgagaagagacagcagagcctgggcggcttcttcaagggcctgggccccaagagaatgctggacgcccaggtgcagaccgaccccgtgagcatcggccccgtgggcaagagcaagtag

SEQ ID NO: 139924 - protein, 279 aa, Artificial Sequence
  derived and/or modified sequence
MHCHAELRLSSPGQLKAARRRYKTFMIDEILSKETCDYFEKLSLYSVCPSLVVRPKPLHSCTGSPSLRAYPLLSVITRQPTVISHLVPATPGIAQALSCHQVTEAVSAEAPGGEALASSESETEQPTPRQKKPRRSRTIFTELQLMGLEKKFQKQKYLSTPDRLDLAQSLGLTQLQVKTWYQNRRMKWKKMVLKGGQEAPTKPKGRPKKNSIPTSEEIEAEEKMNSQAQGQEQLEPSQGQEELCEAQEPKARDVPLEMAEPPDPPQELPIPSSEPPPLS

SEQ ID NO: 139925 - DNA, 1767 bp, Artificial Sequence
  derived and/or modified sequence
cgggcactcgcagccgcgctcgggccggcggacgctcgcgccggctcaccatgcactgccacgccgagctgaggctgagctcgcccggccagctcaaagcagccaggcggcgctacaagactttcatgatcgacgagatcctctccaaggagacctgcgattactttgagaaactttccctctactccgtgtgcccgtcgctggtcgtgcgacccaagcccctgcattcctgtacgggctccccttccctgcgggcatatccgctcctctcggtgatcacccgccagcccactgtcatctcccacctggtccctgccaccccgggaatcgcccaggcactgtcctgccaccaggtcaccgaggcggtctctgctgaggccccagggggcgaggccctagccagcagcgagtcagagacggaacagcccacgccccgacagaagaagccccgccggagtcgcaccatcttcaccgagctgcagctcatgggcctggagaagaaattccagaagcagaagtatttgtcaaccccagacaggttggacttggctcagtctctgggactcactcagctgcaggtgaagacctggtatcagaatcgcaggatgaaatggaagaaaatggttcttaaaggtggacaggaagcacccacaaaacccaaaggtcgccccaagaagaactccatccccacatcagaagagattgaagctgaagagaagatgaacagccaggcccagggtcaggagcagctggagccctctcaggggcaggaggagctctgtgaagcacaggaaccgaaagcacgtgatgtccccttagagatggcagagccaccagacccgccccaggagttgccaataccctcttcggaacccccaccattaagctaaagtaaaacccttttgagggaagagggagactggggagaagggaaaagagagaaggcagggagagtagggagagaaaaccttccagcagcccagtaaactgcgggcgaagagatctacccgtctccctccctcccacagttaccattggccttgtcatcgcaagcatttgacaaagacttgcttgtcttgggcctgtcacctcctgaaaggctgctttagctgtggatgcccttgattaagggagagagcgcctaggagctgcctgccccagctggggtgacggctgtagggctgggtctatgttgcaagccctatatcctagcatgcagtggaaagtgcttagctctctccctcctgacctctgggcagccagtcatcaaagcagagagacgtggcggcatgtgggcagcatgcccaggttccttgctgactcagcacttatttctgtagttttaaaaaagaatttaatgtttttggttgtatttttttgggggggtgagggtgggcaaaaacatgggggtagttctgagttgttagaaatgtttctgaatcaagtttgtttgaagacacgtgtgcctttgtacccattataagatggtcataagacccaagaactgataagctttggttttttttttgttttgttttgttttttgcttcatttacccattcatgcctagggttccattattggaaccctaagcttgtgggagttatttctatcctactgctcaaggtcatcaccaagatctgatttttcataaaaaacatttgtgaccttcggcataaatgggttaaggtgccatccctgaaactgcaatgcagatatgttcagataacttttattttttaattaaaaataaatctttcaaaagga

SEQ ID NO: 139926 - DNA, 840 bp, Artificial Sequence
  derived and/or modified sequence
atgcactgccatgccgagcttcgcctctcttctcccgggcaactcaaggctgctaggcggaggtataaaacctttatgattgatgaaattttgagcaaggagacgtgtgactacttcgagaaactgtcattatattcggtgtgtcctagcctcgtagtgcgcccaaagcctttacacagctgcacagggtcccctagcctgagggcttatccccttttgtcagtgattactcggcagccaacagtcatctcgcacttagtgcctgccacaccaggaattgcacaggcgctttcttgtcaccaggtaacagaagctgtatcagccgaagcacctgggggcgaagccctcgcatcaagcgagagtgagacagaacagcctacaccaagacagaaaaagccccgccgatcaaggaccatttttaccgagctgcagctgatgggcctggagaaaaaattccagaaacagaaatacttatcaactcccgatcgtttggacctggcacagagtctggggttgacccaactgcaggttaaaacctggtaccaaaaccggcgaatgaaatggaaaaagatggtccttaaaggcggacaagaagcccctacaaagccaaaagggaggccgaagaaaaatagcatccccactagcgaagagatcgaggccgaagagaaaatgaattctcaggcccagggacaggagcagctggagcccagtcagggtcaggaggaactctgtgaggctcaggagcccaaggcccgtgacgtacctctcgagatggccgagcctcctgacccgccacaggagcttccgattcctagcagcgagcctccccctttaagttag

SEQ ID NO: 139927 - DNA, 840 bp, Artificial Sequence
  derived and/or modified sequence
atgcactgccacgccgagctgcggctgagcagccctggccagctgaaggccgcccggcggcgctacaagaccttcatgattgatgagatcctgagcaaggagacctgtgactactttgagaagctgagcctgtacagcgtgtgccccagcctggtggtgcggcccaagcccctgcacagctgcaccggcagccccagcctgcgggcctaccccctgctgagcgtcatcacccggcagcccaccgtcatcagccacctggtgcctgccaccccaggcatcgcccaggccctgagctgccaccaggtgacagaagctgtgtctgctgaggcccctggaggagaggccctggccagcagcgagagcgagacagagcagcccaccccccggcagaagaagccccggcgcagcaggaccatcttcacagagctgcagctgatgggcctggagaagaagttccagaagcagaagtacctgagcaccccagaccggctggacctggcccagagcctgggcctgacccagctgcaggtgaagacctggtaccagaacagaaggatgaagtggaagaagatggtgctgaagggcggccaggaggcccccaccaagcccaagggccggcccaagaagaacagcatccccaccagcgaggagattgaggccgaggagaagatgaacagccaggcccagggccaggagcagctggagcccagccagggccaggaggagctgtgtgaggcccaggagcccaaggccagagatgtgcccctggagatggccgagcccccagaccccccccaggagctgcccatccccagcagcgagcccccacccctgtcctag

SEQ ID NO: 139928 - DNA, 840 bp, Artificial Sequence
  derived and/or modified sequence
atgcactgccacgccgagctgcggctgagcagccccggccagctgaaagcagcccgtaggcgctataagaccttcatgatcgatgagatcctcagcaaggagacatgcgactactttgaaaagctgagcctttacagtgtgtgtcccagcctggtcgttcgcccaaagcctctccattcttgcacaggatctccttcactgcgagcctatcccctgctctcggtgatcaccagacagccgacggtaatcagtcacttggtgcccgcaacccctgggatcgcgcaggctctgtcatgccaccaggtgaccgaagcagtctctgcagaagctccaggtggggaagcactggcaagtagtgaatctgaaacagaacagcctacacctcgtcagaaaaagcctcggcgcagcagaacgatttttaccgagcttcagctgatgggtctggagaagaagtttcagaaacagaaatacctttccacacccgatagactggacctggctcagagcctgggcctgacccagctacaagtcaaaacctggtaccagaacaggaggatgaaatggaagaagatggtgctcaagggcggtcaggaagcccctaccaagcccaaagggaggccaaaaaaaaacagcatacctaccagcgaagagatcgaagctgaggaaaaaatgaacagccaggcacaaggccaggaacagctggaacctagccaaggccaagaagaactctgcgaagcacaggaacccaaggctagggatgttcccctggaaatggccgaacctcctgaccctcctcaggaactccccatcccatcttctgagcctcccccactctcttag

SEQ ID NO: 139929 - DNA, 840 bp, Artificial Sequence
  derived and/or modified sequence
atgcattgtcacgccgagttgcggttgagcagcccaggtcaattgaaggctgccagaaggaggtacaaaacttttatgattgacgaaatcctatctaaggagacctgcgattatttcgaaaagctgtcactgtatagcgtctgtccaagcctcgtcgtgcggcctaaaccacttcactcatgcacaggctcaccgtcactgcgagcctacccactactgagtgtgataactagacaaccaaccgtgatatctcacctagtgccagcaacgccagggatcgcacaggccctctcatgccatcaggtgaccgaagcggtttccgccgaggctcccggaggcgaggcgctggcaagctcagaatctgaaactgaacagcctactcccaggcaaaaaaagcccagaaggtccagaacgatattcaccgagcttcagctgatgggactggagaaaaagttccagaaacagaaatatctcagtacaccagaccgcctggaccttgcccagagcctgggtctgactcagttgcaagttaaaacctggtaccaaaatagacgcatgaagtggaagaagatggtgctgaaggggggacaggaagctccaacaaagcctaaaggccgaccaaaaaaaaatagtataccaacatcagaagaaatagaggccgaagagaagatgaatagccaagcacagggccaggaacagctggaaccaagccagggacaggaggagttgtgcgaagctcaggagcctaaagccagagatgtgcctctcgagatggccgaaccccctgatcctccgcaagagctgccaatcccgagcagtgagcccccacctctgtcatag

SEQ ID NO: 139930 - DNA, 1810 bp, Artificial Sequence
  derived and/or modified sequence
ggggcccaggccccgccgtcgcgccagccccgcggccccagcgggccgggcactcgcagccgcgctcgggccggcggacgctcgcgccggctcaccatgcactgccacgccgagctgaggctgagctcgcccggccagctcaaagcagccaggcggcgctacaagactttcatgatcgacgagatcctctccaaggagacctgcgattactttgagaaactttccctctactccgtgtgcccgtcgctggtcgtgcgacccaagcccctgcattcctgtacgggctccccttccctgcgggcatatccgctcctctcggtgatcacccgccagcccactgtcatctcccacctggtccctgccaccccgggaatcgcccaggcactgtcctgccaccaggtcaccgaggcggtctctgctgaggccccagggggcgaggccctagccagcagcgagtcagagacggaacagcccacgccccgacagaagaagccccgccggagtcgcaccatcttcaccgagctgcagctcatgggcctggagaagaaattccagaagcagaagtatttgtcaaccccagacaggttggacttggctcagtctctgggactcactcagctgcaggtgaagacctggtatcagaatcgcaggatgaaatggaagaaaatggttcttaaaggtggacaggaagcacccacaaaacccaaaggtcgccccaagaagaactccatccccacatcagaagagattgaagctgaagagaagatgaacagccaggcccagggtcaggagcagctggagccctctcaggggcaggaggagctctgtgaagcacaggaaccgaaagcacgtgatgtccccttagagatggcagagccaccagacccgccccaggagttgccaataccctcttcggaacccccaccattaagctaaagtaaaacccttttgagggaagagggagactggggagaagggaaaagagagaaggcagggagagtagggagagaaaaccttccagcagcccagtaaactgcgggcgaagagatctacccgtctccctccctcccacagttaccattggccttgtcatcgcaagcatttgacaaagacttgcttgtcttgggcctgtcacctcctgaaaggctgctttagctgtggatgcccttgattaagggagagagcgcctaggagctgcctgccccagctggggtgacggctgtagggctgggtctatgttgcaagccctatatcctagcatgcagtggaaagtgcttagctctctccctcctgacctctgggcagccagtcatcaaagcagagagacgtggcggcatgtgggcagcatgcccaggttccttgctgactcagcacttatttctgtagttttaaaaaagaatttaatgtttttggttgtatttttttgggggggtgagggtgggcaaaaacatgggggtagttctgagttgttagaaatgtttctgaatcaagtttgtttgaagacacgtgtgcctttgtacccattataagatggtcataagacccaagaactgataagctttggttttttttttgttttgttttgttttttgcttcatttacccattcatgcctagggttccattattggaaccctaagcttgtgggagttatttctatcctactgctcaaggtcatcaccaagatctgatttttcataaaaaacatttgtgaccttcggcataaatgggttaaggtgccatccctgaaactgcaatgcagatatgttcagataacttttattttttaattaaaaataaatctttcaaaa

SEQ ID NO: 139931 - DNA, 840 bp, Artificial Sequence
  derived and/or modified sequence
atgcactgccacgccgagctgagactgagcagccccggccagctgaaggccgccagaagaagatacaagaccttcatgatcgacgagatcctgagcaaggagacctgcgactacttcgagaagctgagcctgtacagcgtgtgccccagcctggtggtgagacccaagcccctgcacagctgcaccggcagccccagcctgagagcctaccccctgctgagcgtgatcaccagacagcccaccgtgatcagccacctggtgcccgccacccccggcatcgcccaggccctgagctgccaccaggtgaccgaggccgtgagcgccgaggcccccggcggcgaggccctggccagcagcgagagcgagaccgagcagcccacccccagacagaagaagcccagaagaagcagaaccatcttcaccgagctgcagctgatgggcctggagaagaagttccagaagcagaagtacctgagcacccccgacagactggacctggcccagagcctgggcctgacccagctgcaggtgaagacctggtaccagaacagaagaatgaagtggaagaagatggtgctgaagggcggccaggaggcccccaccaagcccaagggcagacccaagaagaacagcatccccaccagcgaggagatcgaggccgaggagaagatgaacagccaggcccagggccaggagcagctggagcccagccagggccaggaggagctgtgcgaggcccaggagcccaaggccagagacgtgcccctggagatggccgagccccccgaccccccccaggagctgcccatccccagcagcgagcccccccccctgagctag

SEQ ID NO: 139932 - protein, 658 aa, Artificial Sequence
  derived and/or modified sequence
MAEAAAAAGGTGLGAGASYGSAADRDRDPDPDRAGRRLRVLSGHLLGRPREALSTNECKARRAASAATAAPTATPAAQESGTIPKKRQEVMKWNGWGYNDSKFIFNKKGQIELTGKRYPLSGMGLPTFKEWIQNTLGVNVEHKTTSKASLNPSDTPPSVVNEDFLHDLKETNISYSQEADDRVFRAHGHCLHEIFLLREGMFERIPDIVLWPTCHDDVVKIVNLACKYNLCIIPIGGGTSVSYGLMCPADETRTIISLDTSQMNRILWVDENNLTAHVEAGITGQELERQLKESGYCTGHEPDSLEFSTVGGWVSTRASGMKKNIYGNIEDLVVHIKMVTPRGIIEKSCQGPRMSTGPDIHHFIMGSEGTLGVITEATIKIRPVPEYQKYGSVAFPNFEQGVACLREIAKQRCAPASIRLMDNKQFQFGHALKPQVSSIFTSFLDGLKKFYITKFKGFDPNQLSVATLLFEGDREKVLQHEKQVYDIAAKFGGLAAGEDNGQRGYLLTYVIAYIRDLALEYYVLGESFETSAPWDRVVDLCRNVKERITRECKEKGVQFAPFSTCRVTQTYDAGACIYFYFAFNYRGISDPLTVFEQTEAAAREEILANGGSLSHHHGVGKLRKQWLKESISDVGFGMLKSVKEYVDPNNIFGNRNLL

SEQ ID NO: 139933 - protein, 321 aa, Artificial Sequence
  derived and/or modified sequence
MDPKYPWSKCGHKTTSKASLNPSDTPPSVVNEDFLHDLKETNISYSQEADDRVFRAHGHCLHEIFLLREGMFERIPDIVLWPTCHDDVVKIVNLACKYNLCIIPIGGGTSVSYGLMCPADETRTIISLDTSQMNRILWVDENNLTAHVEAGITGQELERQLKESGYCTGHEPDSLEFSTVGGWVSTRASGMKKNIYGNIEDLVVHIKMVTPRGIIEKSCQGPRMSTGPDIHHFIMGSEGTLGVITEATIKIRPVPEYQKYGSVAFPNFEQGVACLREIAKQRCAPASIRLMDNKQFQFGHALKPQVSSIFTSFLDGLKKFY

SEQ ID NO: 139934 - DNA, 1977 bp, Artificial Sequence
  derived and/or modified sequence
atggcagaagcagccgcggccgccggcggaacaggactgggtgccggcgcatcctatggaagcgccgcggatagagatcgcgatcccgaccctgatagggccggacgacgcctgcgggtcctgtctggtcacttgttgggccgaccaagagaggctctgtctaccaatgagtgcaaggctcggcgagctgcgagcgccgctacggctgcaccgacagctacccccgccgcacaggagtctggaactattccaaaaaagagacaagaagttatgaaatggaacggatggggctataacgattccaagttcattttcaataaaaaagggcagattgaattgaccgggaaaagatatccactgtctggaatgggactcccgacctttaaagagtggatccagaacaccttaggagttaatgtcgaacataagactacatccaaggctagtctgaatccgtctgatacacctccctccgttgtcaatgaagattttctgcacgatctgaaagagaccaatatctcgtacagccaagaagcggacgacagggtctttagggcacatggccactgtctgcatgagatattcttgttgcgggaaggtatgtttgaacggatcccagacatcgtactttggcctacctgccatgatgatgtcgtgaagatcgttaatcttgcctgcaagtataacctctgtattatccccataggcggtgggacatccgtgtcatacggactcatgtgtcccgccgatgaaactagaactatcatcagtctggacacttcccagatgaatcggatactttgggtggatgagaataacctaactgcccacgtcgaagcaggtatcactgggcaagaactggagagacagctcaaagaaagcggctactgtaccggacacgaacctgatagcctggagttttctacagtcggcggctgggtctcgacgagagcctctggaatgaaaaaaaacatctacggcaatatagaagatctcgtggtgcatatcaagatggtgactccacgcggtatcatcgaaaagtcttgtcagggaccacgaatgtcaacagggcctgatatccatcatttcatcatgggttccgagggtactctgggagtgattactgaggcaactatcaagatcagacccgttcctgagtaccagaaatatggctcggtcgctttcccgaactttgaacaaggggtcgcttgtctgcgggagatagcgaagcagcgatgcgccccagcatctattcgcctgatggataataagcagttccagtttggccatgcactgaaaccacaggtgtcgtcgatttttaccagctttctggatgggctcaaaaagttctacatcaccaagttcaagggcttcgatccgaaccagctatccgtagcgacgctgctcttcgagggtgatagggaaaaggtgttacaacacgagaagcaggtctatgatatcgctgctaagttcggcgggttggccgctggcgaagacaacggtcagcggggttatctactgacatacgtgattgcatatatacgtgatttggctttggagtattatgtgttgggagagagcttcgagacgtccgcaccttgggaccgcgtcgtcgatctgtgtagaaacgtgaaggaaagaattactcgggagtgcaaagaaaagggcgtacaatttgcaccattcagcacttgccgggtgacccagacatacgatgccggagcctgcatttacttttacttcgcctttaactacaggggaatatccgatcctcttacagtcttcgaacagacagaggccgcagccagagaggagattcttgccaacggggggagtctgagccaccaccacggcgtgggaaaactgagaaagcagtggttgaaagaatccatttcggatgtcggctttggcatgttgaaatcggtgaaggagtatgtagacccgaataacattttcgggaacaggaatcttctctag

SEQ ID NO: 139935 - DNA, 1977 bp, Artificial Sequence
  derived and/or modified sequence
atggccgaggccgctgctgctgctgggggcaccggcctgggcgctggggccagctatggcagcgctgctgaccgggaccgggaccctgaccctgaccgggccggccggcggctgcgggtgctgagcggccacctgctgggccggccccgggaggccctgagcaccaatgaatgcaaggccaggagagctgccagcgctgccacagctgcccccacagccaccccagctgcccaggagagcggcaccatccccaagaagaggcaggaggtgatgaagtggaatggctggggctacaatgacagcaagttcatcttcaacaagaagggccagatcgagctgaccgggaagcgctaccccctgagcggcatgggcctgcccaccttcaaggagtggatccagaacaccctgggcgtgaatgtggagcacaagaccaccagcaaggccagcctgaaccccagcgacaccccacccagcgtggtgaatgaagacttcctgcatgacctgaaggagaccaacatctcctacagccaggaggctgatgacagagtcttccgggcccacggccactgcctgcacgagatcttcctgctgcgggagggcatgtttgagcgcatcccagacatcgtgctgtggcccacctgccatgatgatgtggtgaagatcgtgaacctggcctgcaagtacaacctgtgcatcatccccatcggcggcggcacctctgtgtcctatggcctgatgtgcccagcagatgagaccaggaccatcatcagcctggacaccagccagatgaaccgcatcctgtgggtggatgagaacaacctgacagcccacgtggaggccggcatcaccggccaggagctggagcggcagctgaaggagagcggctactgcaccggccacgagccagacagcctggagttcagcacagtgggcggctgggtgtccacccgggccagcggcatgaagaagaacatctacggcaacatcgaggacctggtggtgcacatcaagatggtgaccccccggggcatcatcgagaagagctgccagggccccaggatgagcacaggccctgacatccaccacttcatcatgggcagcgagggcaccctgggcgtcatcacagaggccaccatcaagatccggcctgtgcctgagtaccagaagtatggctctgtggccttccccaactttgagcagggcgtggcctgcctgcgggagatcgccaagcagagatgtgccccagccagcatccggctgatggacaacaagcagttccagtttggccacgccctgaagccccaggtgagcagcatcttcaccagcttcctggatggcctgaagaagttctacatcaccaagttcaagggctttgaccccaaccagctgtctgtggccaccctgctgtttgaaggagaccgggagaaggtgctgcagcacgagaagcaggtgtatgacattgctgccaagtttggaggcctggccgccggggaggacaatggccagaggggctacctgctgacctacgtgattgcctacatccgggacctggccctggagtactacgtgctgggggagagctttgagaccagcgccccctgggacagagtggtggacctgtgcagaaatgtgaaggagcgcatcacccgggagtgcaaggagaagggcgtgcagtttgcccccttcagcacctgccgggtgacccagacctatgatgctggggcctgcatctacttctactttgccttcaactaccggggcatcagtgaccccctgactgtgtttgagcagacagaggccgccgcccgggaggagatcctggccaatggaggcagcctgagccaccaccacggcgtgggcaagctgaggaagcagtggctgaaggagagcatcagtgatgtgggcttcggcatgctgaagtctgtgaaggagtatgtggaccccaacaacatcttcggcaacagaaacctgctgtag

SEQ ID NO: 139936 - DNA, 7764 bp, Artificial Sequence
  derived and/or modified sequence
gtgaagctccagacgcatggcacccgccgccaagtcgccgcggtggctgccgggatgcgccgcagcgaatggtcgcgccgggcgccgctctgagtgacctttcacccgcgcccagcggttccgggcggcagcacaaggcggtagccatggcggaggcggcggctgcagcgggtgggactggcttgggcgcgggcgcgagctacgggtctgcagcggaccgggaccgggacccggacccggaccgcgccgggcggaggctgcgggttctctctggccatctgctgggccggccccgggaggctctgagtaccaatgagtgcaaagcgcggagagccgcgtcggcggccacggcagcgcccacggccactcccgccgcgcaggagtcgggcaccatcccaaagaagcggcaagaagttatgaaatggaatggatggggatataatgattctaaattcatcttcaataagaagggccaaattgaattgactgggaaaaggtaccctcttagtggcatgggtttaccaacatttaaagaatggatccaaaatacccttggagtaaatgtggagcataaaactacctctaaagcatccttaaatcctagtgatacacctccttctgttgtaaatgaagattttcttcatgaccttaaagaaactaatatttcatattcacaagaggcagatgatcgagtatttagagctcatggtcattgtcttcatgagatatttttgctcagggaaggaatgtttgagcgaattcctgatatagttttatggccaacatgccatgatgatgtagttaagattgtgaatctagcttgcaaatataatctttgtatcataccaattggtggaggaacaagtgtttcatatggcctgatgtgtcctgcagatgagacaagaacaattatttctttggacacttcacaaatgaatcgaattctctgggttgatgagaacaatttgacagctcatgtagaggctggcataacaggacaagagttggaaagacagcttaaagaaagtggttattgtacaggtcatgaaccagattccctggagttcagtactgtaggaggatgggtatctactcgcgcatcaggcatgaagaagaatatctatggcaatatcgaggacctggtggttcatataaaaatggtaacacctagaggtataatagaaaaaagctgtcaaggacctcgtatgtcaacaggccctgatatccatcacttcatcatgggatctgaaggaactcttggtgtaataacagaagctacaataaaaatcagaccagtccctgaataccaaaagtatggctcagtagctttccctaattttgaacaaggagtagcctgtttaagagaaattgcaaaacagagatgtgctccggcatctattcgcctcatggacaacaagcagtttcagtttggtcatgctcttaaacctcaggtttcctctatttttacatcatttttggacggattaaaaaagttttatattacaaagtttaaaggatttgacccaaatcagctaagtgtagccacattactgtttgagggggatcgtgagaaggttcttcaacatgaaaaacaagtgtatgatattgctgcaaaatttggtgggttggcagctggagaagataatggacagagaggttatttgctgacctatgttattgcatacattcgagacttggctttggaatactatgtattaggagaatcttttgagacttctgctccttgggacagggtggtagatctctgtagaaatgtaaaagaaagaataacaagggaatgcaaagagaagggtgttcagtttgctcctttttctacatgcagggtgacgcagacttacgatgcaggtgcttgtatctacttctattttgcctttaactacaggggaattagtgacccactgaccgtatttgaacaaactgaggcagctgctagagaagaaatccttgctaatggagggagcctgtcacatcaccatggagtgggcaagttacggaagcaatggctaaaggaaagtatctctgatgtcggctttgggatgctgaagtctgtcaaggaatatgtggaccccaataacatctttggaaacagaaaccttttataaatccattagtaccattacaaaaaaatgtcaattttttttttaagttttcaactgtggttatactagtaatcaaatatatcatggactatattttggatacatttgtttctttggtttaaaataagtttgttttcattctgtagtttgttttgtttctacatctatggattgacagatagtattcctaaatctctctcattgtaggtacatcattttacattcagcggttgtcatttcaaattttagtcaggcagcacaaagctgtcaattattccagaggaagctgctgccagctgttttgtattgttgcttcctcttggggaacaaagacagatttggtatcattgattgctcagctagcctctttttaaaagaacgtttctgggaatcagatgtctagggaaggattccactgaggagtgatacacgtgtacattgtttaagagcatagtctagtgtgagtaggccattaaggggaaggatattcatgaaagaatttaggcaacctgttatttagaaagccttcacgtctgtaaggtgcttggcctacttttttttttaaattagtatacatgcataaaaccttgtatcatcaatatacaaattattctgttaggggacatgtttttgttctccatgtttctgtttctattgtggtatgagttgtatttgtatcactgagataacctattgttatattctaattcattgataatatgttttgtaagaaaagctgacatccttcattgcaagtgaagaacaggtttaccatgaaatgaatgcctttattcaacttagagtcctaatgtttctgatttcacattcttgttgctgaaatgcagaagaaacagctacagcaagagcagaaggaaaactcttagacttaatgtctccaattgcaagaattgtttcactaaagaaacagtcatcattcaactactgaatttgaaagcctcagcagtttcaatgacaaaaatcatttttgattttttaaaattaatcccaatggcatgataaattttcatataaaaagtaaagtttcaatttagtttttaataatggtttaatgccttttttgaataactggtttaacctaattttttttaaatgtaatgtattaatgcatataccataatcaaaagtttgaaatatcctgtttcttaaataatgagaacattaatcacatttagcaagcatttgtacattcaaacctggatattaaagtgaaatgattactttgaatcactgtctgccaaggttcatgattcacattttgagatggattcttttcttaatgcaatacctaacttttgataattttttaaaactaatatttgatcagataatgtaagtcaaaatgcagacgatcctttaaaaggatgcattgtctgtgtatgtagcaacagctccaaagtatttttgggcagtttgataccttttatatctgaagtagccttaaccagaaaaatggtaatttaaaattgacaaaatgatatttttaagacttcaaaatgataaataatttttaactattaaaattggcctcaaactaataaatctgtaattaaattagaattaaatatcagtttaacaacaaaatgaaatatttattttttagaagctgcctctcttcattggtcatttatttttaattataaaatttccaacagatctttgctttaagcccttgatatttgacctagttggacacttgatgaggaagttgcctctagaattataaaaatctcagctttataaaatgcatctgttcacgaaggtaatttctttaattggtgatcaaaatataaaattaaggtactaatgtctcactggaagtatatatatatatatatatatatgtatgcatgtgtgtgtgtgtatatatatatatatatatatgtatatgtttctgagtaatttttaaaaaataaaacaggttaataagaagatccattcctttgcatgtgattgttataacattctttcccagggagttcaatttcagcaacctcagaaatccatacttgatattaggaaactgtaaatgtaacacctgaaattattatgttcactattctacatgaaccttatggaaattcatgatttatgtctttgtttttctttttccaagtatatgcaggactccccaaccttgattttataatggtgactgcattttgtaggtggaatcatttctaccgaaatcattttgaaacacaagaatattgatcagtactgtttcactctgatttagtaaatcagaaagcctccccctacccccagcccccactttcacataccttctgggaggtgcctcagtatagacttggtatctgtgaaggactgagttcatgaatatgcacagaagcacttaaaccatgcctcttatttctataatatctgaaaatggcttcataaaagttaagtcaggagaacactgtttacatgacacttcttaactcatttttaatgtttatttttaatttcaaaaacttgttgcctatttggttttcagtactgcataacactgactttcttaaattagtcatagttgcaataatttacttaaatttggtaatgtcacatttgggttggggtttcagtgggaatagtaacttgccgctagtgagaaatggcattgaatactaaagactcaatatgaacaggctttatagacccttagagaaactgttgccttaatgtttggtgcaatttctagtagtgcataagtgaatttagtcttatgataagtaactttgagctgtttttagcttagtaagaattgtggaaaccacatgtttattgtgcccatcattttacacaaagaaaagaggattatattatttcttctaaggaagtaggagttttcttcctaaaagtgcttacatattgtagtactattacttaaaagttatttatgaagttgggagccttctagtttgcctgtgttgatgtattttgaaaacaaaattgcaataaaggatgagcttccatcggtgtgtatggtataccagatacagatggttgcaaggaaaccttttcccccactagaatagtctattagtaactgctaagtcctagcttgcatttttgaaaatgcctttctgcatgttagcacccagactttcctttgtcatattcctttatagctacaacttaactgtagcttatcagagaagctctgtagtcctacactgaagtgtgttcccttggctgttcatatggggctgggtttggttgaacttccattctgtataaatgctagaacacagttactacagattgattcacaaactgcatgtgctggtgcttgaggcagccaaaatggaatgctgtggaaagcatatctatatcttaaaaaacactcagacaggagttaaggacagctttaataatttttttgtttaccacttaatctttatcaactttgattttagttagggcttagctcatggttgaagaaaagtggaaaataacaagtgcccatttaggtttgaagaatccagaatgttttacctttgactttatgagttatagaagcttggctttgctctaggcttcatgttcccaaatgagccatctgtcagtatattcacttaattcttactaatttcagtttcctgtaaaggaaacaacttacatattgatgcttaaatccagaaagtgtaaaaggttttcttaaactgttaaaatatagtgtctgatataaaggatgtaagttactcagctttctgctccctaagccaaacagtgtttgtcttcagtgtgaaatttaactgtaaaaactacttgtaatgtcaagagattatagatcatattattaataaaatggacctgggtctaatattttttttcttcaaagggagtgtgaagctgtttattcttttatttgcatatgagtttttcttttagttttagtttttcatgttcatatttccactgatttgaaaacacaaaatttatttttataattttgttgcttgtagcataatcaagtgcaaaatcaagtgcaacctacttgtgactaaatctctttggatttatagctgaggatattgttagctaggttttgtcaatccctaatcattttttaaaatcaatgctgtattcccaggaggctttgagactcctatgaacctgaagcactcccttttgaaccttggaagatcctcaaagagtgagcactcttgtgctcttctaatcataattaattccttaacaaatcagagtaaggaccactgacatatagaaccctcaagccaaagaaccatcacagaatttagtaactttagttctgtgaacatgaaaagatttcttttttggtttccaaaggagattatttatttttccacaaggaaaaacatcttgcagagactctgaattccaaatctgagtgagaaagaaaaggaaaaaaatctgtttcatggtggatttctaagcaacatatatacatgtttttaagacaaccttttgttggcagtgtttttcctgaacaccatatgcaccctaggaaacatgtttttcctttaatcttgttcacatatcagaaaaggacatgaaatgctcatactggcatacaagtttctataagtagttattttttgagctacttatactatatccccaaaagctcacagtgccttgttgggattttttttttccatgaactagccattattttaaatgagtgggagagggtaagtctttagacagaggtcattcagcagttcaagactattcctcttcaagaacatgtcaggaattaagcagttatatgtggaaacactggtaattctttccacagtgttgttttggataatctgttctagtatatttaactaattgtatggtggacctgtactctgatacacatcgaatcagtcaatgggatttgtatgtgcttttccttcctacattttcattcctactgccccaacctagtagccctaagttgtggcttggtgggtttggcattgagcctcaagacactcactacattctttctggatgtttgctcacaggctccctgaggagcagaacctgtggagctggggagtgcgggtggtttctattcctaatattgtgtgtcagtcctttttcgtgtgatggtgccttcagaataacgaatatttctgttctggacaatgattaaatcttatgagaaatatatgtaggttatattaattcttgtccatttttgctaagcctgtgaaatactttggctctgatacaacttaacttgaataatatcttatcctgagtcttcctccaaggcagtacatattcctgccaggactgtagtaatcctttgggaactacatgtgagtaagcacttgtatgtaagccattatactgctgtaactaatgcatacaaacaattcttctctttacatttatagtctaaaaggggatatgcagtgggaaggaaaattcctgagagattccagcatagctttgtcaattccgactgagccatactgttttccacaagggctcaacacatagtcagtattccgtgctttcagtgtgtgttcagattctcctcttactggttttcttagactgtattgttctataagcaaatgcccatgtgtgatttttaagatgtgctggggaaaaataaatcaataccacaaccacc

SEQ ID NO: 139937 - DNA, 1977 bp, Artificial Sequence
  derived and/or modified sequence
atggccgaggccgccgccgccgccggcggcaccggcctgggcgccggcgcctcctatggatccgccgcggaccgggaccgggaccctgatccagacagagcgggcaggagattgagagtgcttagcgggcatttactggggcgtccccgggaggcattgtccactaatgaatgcaaggcgaggcgcgctgcttcagcagccaccgccgctcctacagccactcctgcagcccaggagtccgggaccattcctaaaaaaagacaggaagtcatgaaatggaatggctggggctacaacgattctaagttcatcttcaataagaaaggacagatcgagctaacaggaaaacgatatccgcttagcgggatgggcctgcccacttttaaggaatggatccagaacactctgggtgtaaatgtggaacataaaacaacaagcaaggcctctctgaaccccagtgatacaccgccatctgtggtcaatgaggattttttgcatgacctgaaggagaccaacatcagttattcacaagaggcagacgatcgagtgtttcgagctcatggccactgcctgcatgaaatctttctgctcagggaaggtatgttcgagcggattcccgacatagtcttgtggcctacgtgccatgatgatgtcgtcaagattgtcaatctagcctgtaaatataatctgtgtatcatcccaattgggggtggcaccagcgtcagttatggtcttatgtgcccagccgacgaaacgaggactatcatctcacttgacacttcccagatgaacaggatcctgtgggtggatgaaaataatctgacagcacacgtggaggccggcatcactggacaggagcttgagcggcagctcaaagaatccggatactgcaccgggcatgaacccgactcacttgaattttctacagtgggagggtgggtctccactagagctagtggcatgaagaagaacatctatggcaatatcgaagatctggtggtgcacattaagatggtaactcctcggggaattatcgagaagtcatgccagggcccgagaatgtctacgggaccggatatacaccatttcatcatgggcagcgaagggacgctgggggtgattactgaagcgaccattaaaatcagacccgtccctgagtaccagaagtacggatccgtagcctttcccaacttcgagcagggggtagcctgcttgcgggaaattgctaagcagaggtgcgcgcctgcgagcatcagactaatggataataagcaattccaattcggacacgcccttaagcctcaagtttcaagtattttcacttcattcctggacgggcttaagaaattctatatcacaaagtttaaagggtttgacccaaatcaactgtcggtcgccactcttttgtttgaaggcgacagagagaaggtgctacagcacgagaagcaggtctacgatattgccgcgaaattcgggggcctggcagcaggcgaggacaacggccagcgcggctatctcctcacttatgtaatagcatatatccgggatctggctttggaatactacgtgttaggcgaatctttcgagacatccgccccctgggacagggtcgtggatttatgtaggaatgtgaaggagaggatcacaagagagtgtaaggagaaaggggtccagttcgcccccttcagcacctgcagggtaacccagacctacgacgctggcgcatgtatttatttttatttcgcttttaattacagggggatcagcgacccattgaccgttttcgaacaaacggaagcagccgcccgggaagaaatcctagccaatgggggaagtctgagccatcaccacggggtggggaagttgcgcaaacagtggttaaaggaatcaatcagcgacgtgggcttcggcatgcttaaatctgtgaaggagtacgtggatccaaataatattttcgggaatagaaacctgctctag

SEQ ID NO: 139938 - DNA, 1977 bp, Artificial Sequence
  derived and/or modified sequence
atggcagaagcggctgctgcagccggtgggaccgggttaggagcaggtgcctcatacggttcagccgcagatagagatcgcgacccagacccagaccgggctggcagacgcttacgcgtcctgtcaggtcacctgctgggcagacccagggaagccctcagcaccaatgaatgcaaggcacgccgagccgcttctgctgctacagccgctcctacagctacccccgcagcacaggagtctggcactatcccaaagaagcggcaggaagtgatgaagtggaacgggtggggctataacgacagcaagtttatctttaataagaaaggacagatagaactcaccggaaagaggtatcccctgagcggcatggggttgcccacgttcaaggagtggatccagaacaccctgggagttaatgtggaacataagaccacctccaaggcatccttgaacccgagcgacactccgcctagcgtggtgaatgaggattttctgcatgacctgaaagagaccaatatctcttacagccaggaggcagatgacagagtctttcgcgctcatggacactgcctgcatgaaatatttctgttaagagaaggcatgttcgaacgtatccctgatattgtactgtggccgacatgccacgacgacgtggttaaaattgtcaacttagcatgcaaatacaatctgtgtatcatcccgatcgggggaggaacaagtgtaagctatggcttgatgtgtcctgcggatgaaacaaggactatcattagcctggatacaagtcagatgaacaggattctgtgggtagacgagaacaacttgacagctcatgttgaggcgggtatcaccggccaggaattggagagacagctgaaggaatcgggctattgcactggtcacgagccagactctctggaattctccaccgtaggaggctgggtctccacccgagccagcggcatgaagaaaaatatctatggtaacattgaagatttggttgttcatatcaaaatggtaacgccccgaggtattatcgaaaaaagctgtcaggggccacgcatgtcaacaggacctgatatccaccactttattatgggcagcgagggcacgctgggggtcatcaccgaggccaccatcaagattcgtcctgtacccgagtaccagaaatacgggagcgtcgcgtttcctaacttcgagcagggggtggcctgccttagggagattgcaaagcagcggtgcgcccctgcatctatccggttgatggacaataaacagtttcaattcggccacgcacttaagcctcaggtatccagtatcttcacttctttcctagatgggcttaagaagttttacatcaccaagttcaaaggcttcgaccccaatcagttgagtgtggccaccttgttattcgagggggaccgtgagaaggtgctgcagcacgaaaagcaggtatatgatatagcagccaagtttggcggactggctgccggtgaggacaacggacagcgaggatacttgttgacctacgtgatcgcctatatcagggacctggctctcgaatactacgtgctcggtgagtcattcgagacttccgccccttgggatagagttgtggacctctgtcggaatgtgaaggagcgcattaccagggaatgtaaggaaaagggcgtccagtttgcaccattcagcacttgtagagtgacacagacatacgatgcaggtgcctgcatttatttctatttcgcctttaattataggggaatctcagatccgctcacggtttttgagcaaaccgaggctgccgctagggaggaaatcttagcaaacggcggatccctatcgcatcaccacggtgtgggtaagttgcgcaagcagtggcttaaggagtctatcagtgacgtgggattcgggatgctgaaaagcgttaaagagtacgtggacccaaataacatctttggcaaccgaaatctcctgtag

SEQ ID NO: 139939 - DNA, 1977 bp, Artificial Sequence
  derived and/or modified sequence
atggccgaggccgccgccgccgccggcggcaccggcctgggcgccggcgccagctacggcagcgccgccgacagagacagagaccccgaccccgacagagccggcagaagactgagagtgctgagcggccacctgctgggcagacccagagaggccctgagcaccaacgagtgcaaggccagaagagccgccagcgccgccaccgccgcccccaccgccacccccgccgcccaggagagcggcaccatccccaagaagagacaggaggtgatgaagtggaacggctggggctacaacgacagcaagttcatcttcaacaagaagggccagatcgagctgaccggcaagagataccccctgagcggcatgggcctgcccaccttcaaggagtggatccagaacaccctgggcgtgaacgtggagcacaagaccaccagcaaggccagcctgaaccccagcgacaccccccccagcgtggtgaacgaggacttcctgcacgacctgaaggagaccaacatcagctacagccaggaggccgacgacagagtgttcagagcccacggccactgcctgcacgagatcttcctgctgagagagggcatgttcgagagaatccccgacatcgtgctgtggcccacctgccacgacgacgtggtgaagatcgtgaacctggcctgcaagtacaacctgtgcatcatccccatcggcggcggcaccagcgtgagctacggcctgatgtgccccgccgacgagaccagaaccatcatcagcctggacaccagccagatgaacagaatcctgtgggtggacgagaacaacctgaccgcccacgtggaggccggcatcaccggccaggagctggagagacagctgaaggagagcggctactgcaccggccacgagcccgacagcctggagttcagcaccgtgggcggctgggtgagcaccagagccagcggcatgaagaagaacatctacggcaacatcgaggacctggtggtgcacatcaagatggtgacccccagaggcatcatcgagaagagctgccagggccccagaatgagcaccggccccgacatccaccacttcatcatgggcagcgagggcaccctgggcgtgatcaccgaggccaccatcaagatcagacccgtgcccgagtaccagaagtacggcagcgtggccttccccaacttcgagcagggcgtggcctgcctgagagagatcgccaagcagagatgcgcccccgccagcatcagactgatggacaacaagcagttccagttcggccacgccctgaagccccaggtgagcagcatcttcaccagcttcctggacggcctgaagaagttctacatcaccaagttcaagggcttcgaccccaaccagctgagcgtggccaccctgctgttcgagggcgacagagagaaggtgctgcagcacgagaagcaggtgtacgacatcgccgccaagttcggcggcctggccgccggcgaggacaacggccagagaggctacctgctgacctacgtgatcgcctacatcagagacctggccctggagtactacgtgctgggcgagagcttcgagaccagcgccccctgggacagagtggtggacctgtgcagaaacgtgaaggagagaatcaccagagagtgcaaggagaagggcgtgcagttcgcccccttcagcacctgcagagtgacccagacctacgacgccggcgcctgcatctacttctacttcgccttcaactacagaggcatcagcgaccccctgaccgtgttcgagcagaccgaggccgccgccagagaggagatcctggccaacggcggcagcctgagccaccaccacggcgtgggcaagctgagaaagcagtggctgaaggagagcatcagcgacgtgggcttcggcatgctgaagagcgtgaaggagtacgtggaccccaacaacatcttcggcaacagaaacctgctgtag

SEQ ID NO: 139940 - protein, 160 aa, Artificial Sequence
  derived and/or modified sequence
MEGAALLRVSVLCIWMSALFLGVGVRAEEAGARVQQNVPSGTDTGDPQSKPLGDWAAGTMDPESSIFIEDAIKYFKEKVSTQNLLLLLTDNEAWNGFVAAAELPRNEADELRKALDNLARQMIMKDKNWHDKGQQYRNWFLKEFPRLKSELEDNIRRLRA

SEQ ID NO: 139941 - protein, 141 aa, Artificial Sequence
  derived and/or modified sequence
MEGAALLRVSVLCIWMSALFLGVGVRAEEAGARVQQNVPSGTDTGDPQSKPLGDWAAGTMDPGPAGSRGDSGEPCTLRPACRGQRQHGGASRISAEGPAPMPRRRTPSTAHLRVPKTSRRNLLCMRAVSLLRMPLSISRKK

SEQ ID NO: 139942 - DNA, 1197 bp, Artificial Sequence
  derived and/or modified sequence
atggagggcgccgctcttctccgagtgagtgtgctatgcatatggatgtctgccttattcctaggcgtcggggtgagagccgaagaagctggtgctagagtgcagcagaatgtgccatccgggaccgatacaggggatccccagagtaagcctttaggcgactgggctgcgggcaccatggatcccgagtctagtatattcatagaagacgccatcaaatacttcaaggagaaggttagcactcagaacctccttcttttgctcaccgataatgaagcctggaatggcttcgtggccgcggcggaattgcctagaaatgaggcagacgagttgcgtaaagccctggataatcttgcaagacagatgatcatgaaggacaaaaattggcatgacaagggacaacagtatagaaactggtttctcaaagaatttcctcgcttgaagtctgagctcgaggacaatattcgaaggctcagggcgctagctgatggagtgcagaaggtccacaaaggtacaactatagccaacgttgtcagcggttctctttccattagcagtggtatactgactctggtgggcatgggactggctccttttactgaagggggatcccttgtgttactagaaccaggaatggagctcgggataacagctgcactcacaggtataacatcgtccaccatggactatgggaagaaatggtggacgcaggcacaggctcatgacctggtcattaaaagtctggacaagctgaaggaggttagggaattcttgggcgagaacatcagcaattttttgagtctcgctggaaatacgtaccagctcacccggggaatcggtaaagatattcgagccctgagacgcgcaagagccaacctgcaatctgtgccgcacgcctccgccagcagaccgcgagtcaccgagcccatttctgcagagtctggcgagcaagttgaacgagtaaacgaaccatctatcctagagatgtctcggggagtgaaactcaccgacgtggcacctgtgtcgtttttcttggtcctcgacgttgtgtacctggtctacgagtcaaaacatctgcacgagggggccaaatcagaaaccgctgaggaactcaagaaggtcgcccaggagttggaggagaagctcaacatcctcaacaacaactacaaaattctccaggcagatcaagagctatag

SEQ ID NO: 139943 - DNA, 1197 bp, Artificial Sequence
  derived and/or modified sequence
atggagggtgcagccttattacgggtctctgtcctgtgcatttggatgagcgctctttttctcggggtgggtgtcagggctgaggaggctggtgcccgagtacagcagaatgtcccctccggaactgatacaggcgacccacagtccaaacccctaggggactgggcagctggcaccatggaccccgagtcctcaattttcatagaggatgcaatcaaatacttcaaagagaaggtgtccacacaaaatctgctgttgctactcaccgataacgaggcgtggaacgggttcgtcgcagccgccgagctaccccggaacgaagctgatgagctgcggaaagcacttgataacttagcacgccaaatgataatgaaagacaagaactggcatgacaagggtcaacaatatcgcaattggtttctaaaggagtttcctcggcttaaatccgagttggaagacaatataaggaggctcagagctctggcggacggggtacagaaagttcataagggcaccacgattgcaaatgtggtgtccggaagcttatccatcagctcgggaattctgacgctggtggggatggggttggccccatttactgaagggggctccctggtactgctggagcccggaatggagctggggattactgcggctcttactggcatcacatcgagtacaatggactacggaaagaagtggtggacccaagcacaggctcatgatctagtcatcaagagtctggacaagctgaaagaggtgcgtgagttccttggggaaaatataagcaacttcctcagcctagctggcaacacatatcagctaacgagaggcatcgggaaagacattagagctctccggagggccagagcgaacctgcagtccgtaccccacgcttccgcaagtcgacctcgagtcactgagccaatcagtgcagagagtggcgaacaggtcgaaagagttaacgagccgagtattttggagatgtcaagaggggtgaaactgaccgacgtggccccggttagcttcttcttggttctggacgttgtgtacctggtctatgagagcaagcacctgcacgaaggggccaagtcagagaccgctgaggaactgaagaaagtggctcaggagctggaggaaaaactcaacattctcaataataattacaagattctacaagctgaccaagaactgtag

SEQ ID NO: 139944 - DNA, 1197 bp, Artificial Sequence
  derived and/or modified sequence
atggagggggctgccctcctcagggtgtctgtgctgtgtatttggatgagtgctctatttctgggagttggggttagagccgaagaggccggcgcacgtgtacaacagaacgtgccctcaggaacagacacaggggacccccagtcaaagccgcttggagattgggcagccggcactatggatcccgagtccagcattttcatcgaagacgctataaaatactttaaagagaaagtctccacccagaatctgctgctgttgctgacggacaatgaggcctggaacggatttgtcgccgctgccgaattgcctaggaacgaggctgacgagctccggaaagcgctggacaatctggcaaggcagatgattatgaaggacaaaaattggcatgataagggccagcaataccgcaattggttcctgaaggagttcccccgcctgaagtctgagctagaggataatatccggcggcttagagctctcgcagacggagtccagaaggtgcataaagggactacaatcgccaacgtggtgtccggcagcctgtcaatcagttcagggatactgactctggtcggaatggggctggctcctttcacagagggaggctccttagttctgcttgagccaggcatggaacttggcattaccgctgccttaacaggaataaccagctccactatggactacggtaagaaatggtggacacaggcccaggcacacgatctcgttataaagtccctagataagctcaaggaggtccgagaattccttggggaaaatatctcaaatttcctttctctggctggaaacacttatcagctgactcgaggcattggaaaggacatcagggccctgcgcagggcccgggcgaatcttcagtccgtgccacatgcttctgcctccagaccacgcgtgaccgaacccatatccgccgagagtggggaacaggtggaacgcgtcaacgaaccctccattctggaaatgtctcgcggggtaaagctaactgacgtcgctccagtgtcattttttctagtgctggacgtggtgtacctggtctatgaaagcaagcatttacatgaaggagctaagagcgaaaccgccgaagagctcaaaaaggtggcccaagagctcgaggaaaaattgaacatcctcaataataactacaaaatccttcaggctgaccaggagctgtag

SEQ ID NO: 139945 - DNA, 1197 bp, Artificial Sequence
  derived and/or modified sequence
atggaaggtgcagccctccttagagtcagcgtgctgtgtatttggatgtccgccctttttctgggcgtcggagtgagggctgaagaagccggcgcaagggtccagcagaacgttccctctggtaccgataccggagatccccagtcaaagcccctgggagattgggccgccggcaccatggaccccgagagtagcatctttattgaggacgcaattaagtactttaaggagaaagtgtcgactcagaatcttcttctgctactgacagacaacgaagcatggaacggttttgtcgctgctgcggagctgcctagaaacgaggccgacgagctgcgcaaggctctggacaaccttgccagacaaatgatcatgaaagacaagaactggcacgacaaagggcagcagtacaggaactggttcctcaaggaattcccccgcctcaaaagcgagcttgaggacaatattcgtaggcttcgcgctctggccgacggggtgcagaaagttcacaaaggcaccaccattgcaaatgtagtgagcggctccctaagcatttccagtgggatcttaaccctggttggcatgggtttagcaccttttaccgaaggcggaagccttgtgctactcgagcccgggatggagctgggtatcaccgctgctctcacaggtatcacctccagtacaatggattacggaaaaaagtggtggactcaagcccaggcccatgatctggtcattaagtccctggataaacttaaagaggttagggagtttctaggggaaaatatttctaacttcctgtccctggcaggcaacacctatcagctgactagaggaattggaaaggatattagggccctgagacgagctagagccaacctacagagcgttccccacgcttcggcatcaagaccacgagtgacagagcccatctctgctgagtctggggagcaagtggagcgggtcaatgagccaagtatcctggagatgtctagaggcgtgaagctcacagatgtggctccagtgtccttcttcctagtgttagacgtggtgtatctcgtgtacgagagcaagcacctgcatgagggcgcgaaaagtgagaccgccgaagaattgaagaaagtggcccaggagttggaggaaaaactcaatatcctgaacaataattataagatcctgcaggctgaccaggagctctag

SEQ ID NO: 139946 - DNA, 483 bp, Artificial Sequence
  derived and/or modified sequence
atggagggagctgccctgctgagagtaagcgtgttgtgcatctggatgtcggcgctgttcttgggcgttggggtgcgtgccgaggaggctggagctagagtccagcagaacgtcccttccggcaccgacactggcgatcctcagagtaaaccactgggtgattgggccgctggaaccatggatccagagtcatcaatattcattgaggacgcaatcaagtacttcaaggagaaggtgtccactcagaatctgctgctgctgttgacggataacgaggcctggaacggcttcgtggcagccgcggaactgcccaggaatgaggctgacgagctgagaaaggccctcgacaatttggccaggcagatgattatgaaagataagaattggcacgataagggtcagcagtataggaactggttcctgaaggagttccctcgactaaaatctgagctcgaggataatatcagacgtctccgggcatag

SEQ ID NO: 139947 - DNA, 426 bp, Artificial Sequence
  derived and/or modified sequence
atggaaggagctgctctgttgagagtcagcgtgttgtgcatttggatgtcagcgctctttctcggagtaggcgtccgggcagaagaggccggggctcgagtccaacaaaacgtgccatctggaacagatactggcgaccctcagtccaagcctctgggagattgggccgctggcaccatggatccaggcccagctggcagccggggagacagtggagagccttgcactttaaggcctgcttgcaggggacagcggcagcatggcggggcaagcagaatttccgcggaaggacccgccccaatgccaagacggcgcaccccttccacggcccatctgcgcgtcccaaaaaccagccgaaggaacctcctttgtatgcgtgctgtgtcactgctgcgaatgcctttatcaatatctcgcaagaaatag

SEQ ID NO: 139948 - DNA, 426 bp, Artificial Sequence
  derived and/or modified sequence
atggagggcgctgccctgctgcgcgtctccgtattgtgcatctggatgtcggcactgtttctcggagtcggtgtgcgcgcagaggaggcgggggccagagttcagcagaacgttccaagcgggacggataccggggatccgcagtcaaaaccattgggcgactgggctgctggcacgatggatccagggcctgccggcagccggggggattccggagaaccatgtacattacgtccggcttgccgagggcaacggcagcacggaggcgcaagccgaatctccgccgaagggcctgcgccaatgccacgtaggcggacaccttcgaccgctcacctgagggtgcccaagaccagcaggcgcaacctgctttgcatgagagccgtgtcgctgctgcggatgccccttagtatatcaaggaaaaagtag

SEQ ID NO: 139949 - DNA, 1197 bp, Artificial Sequence
  derived and/or modified sequence
atggagggcgccgccctgctgcgggtgtctgtgctgtgcatctggatgtctgccctcttcctgggcgtgggcgtgcgggcagaggaggccggggcccgggtgcagcagaatgtgcccagcggcacagacaccggggacccccagagcaagcccctgggggactgggccgccggcaccatggaccctgagagcagcatcttcattgaagatgccatcaagtacttcaaggagaaggtgtccacccagaacctgctgctgctgctgacagacaatgaggcctggaatggatttgtggccgctgctgagctgcccagaaatgaagcagatgagctgaggaaggccctggacaacctggcccggcagatgatcatgaaggacaagaactggcatgacaagggccagcagtacagaaactggttcctgaaggagttcccccggctgaagtctgagctggaggacaacatccggcggctgcgggccctggctgatggagtgcagaaggtgcacaagggcaccaccatcgccaacgtggtgtctggcagcctgagcatcagcagcggcatcctgaccctggtgggcatgggcctggcccccttcacagagggcggcagcctggtgctgctggagcccggcatggagctgggcatcacagctgccctgaccggcatcaccagcagcaccatggactatggcaagaagtggtggacccaggcccaggcccatgacctggtgatcaagagcctggacaagctgaaggaggtgcgggagttcctgggggagaacatcagcaacttcctgagcctggccggcaacacctaccagctgacccggggcatcggcaaggacatccgggccctgcggcgggcccgggccaacctgcagagcgtgccccacgccagcgccagccggccccgggtgacagagcccatctctgctgagagcggggagcaggtggagcgggtgaatgagcccagcatcctggagatgagccggggcgtgaagctgacagatgtggcccctgtgtccttcttcctggtgctggatgtggtgtacctggtgtatgagagcaagcacctgcacgagggcgccaagtcagaaacagctgaggagctgaagaaggtggcccaggagctggaggagaagctgaacatcctgaacaacaactacaagatcctgcaggccgaccaggagctgtag

SEQ ID NO: 139950 - DNA, 483 bp, Artificial Sequence
  derived and/or modified sequence
atggagggcgccgccctgctgcgggtgtctgtgctgtgcatctggatgtctgccctcttcctgggcgtgggcgtgcgggcagaggaggccggggcccgggtgcagcagaatgtgcccagcggcacagacaccggggacccccagagcaagcccctgggggactgggccgccggcaccatggaccctgagagcagcatcttcattgaagatgccatcaagtacttcaaggagaaggtgtccacccagaacctgctgctgctgctgacagacaatgaggcctggaatggatttgtggccgctgctgagctgcccagaaatgaagcagatgagctgaggaaggccctggacaacctggcccggcagatgatcatgaaggacaagaactggcatgacaagggccagcagtacagaaactggttcctgaaggagttcccccggctgaagtctgagctggaggacaacatccggcggctgcgggcctag

SEQ ID NO: 139951 - DNA, 426 bp, Artificial Sequence
  derived and/or modified sequence
atggagggcgccgccctgctgcgggtgtctgtgctgtgcatctggatgtctgccctcttcctgggcgtgggcgtgcgggcagaggaggccggggcccgggtgcagcagaatgtgcccagcggcacagacaccggggacccccagagcaagcccctgggggactgggccgccggcaccatggaccccggccctgctggcagcagaggagacagcggggagccctgcaccctgcggcctgcctgccggggccagaggcagcacggcggggccagccgcatctctgctgagggccctgcccccatgcccaggaggaggacccccagcacagcccacctgcgggtgcccaagaccagcagaagaaacctgctgtgcatgagagctgtgtccctgctgaggatgcccctgagcatcagcaggaagaagtag

SEQ ID NO: 139952 - DNA, 1197 bp, Artificial Sequence
  derived and/or modified sequence
atggagggcgccgccctgctgcgggtgagcgtgctgtgcatctggatgtccgctctctttctaggagtgggcgttagggcagaggaggccggggctcgtgtgcagcagaacgtcccctccggaactgacaccggcgatcctcagtcaaagcccctgggcgactgggcagcgggaaccatggatccggaatcctcaatctttatagaagacgctattaagtactttaaggagaaggtgtcgactcaaaacttacttttgttgctgaccgacaatgaagcctggaacggctttgtcgccgccgccgaactaccgaggaacgaagccgatgagctccgaaaggccttagacaatttggccaggcagatgatcatgaaagacaagaattggcatgataagggccaacagtacaggaactggtttctgaaagagtttccgcgccttaaatcagagctggaagacaatatcagacgcctcagagcccttgcagacggtgtgcaaaaagttcacaaaggcactacaatagccaatgtcgtttcgggttcgctctctattagttccgggatcctgacgcttgtaggcatggggctggcccccttcacagaggggggttctctagtattactggaaccgggtatggaactcggcattaccgccgccctgacggggatcaccagctccaccatggattacggaaaaaaatggtggacccaggcacaggcgcacgaccttgtaattaagtccctcgacaaactaaaggaggttagagagttcttaggagagaatattagcaatttcttgagcttggctggtaacacctaccagctgacacgcggtatcggcaaggacataagagcactcagaagggcgcgcgcaaatctgcagtctgtaccccacgcatcagctagcaggccccgggtaacagagccaatatccgcagaaagtggcgaacaggtggaaagggtgaatgaaccttcaattttagagatgtcccgcggcgtaaagttgacagacgttgctccagtttcattttttttggtgcttgacgtggtctacctcgtgtacgaaagcaagcaccttcacgagggcgccaagagcgaaactgcagaggaacttaagaaagtagcccaagagctcgaggagaagctgaatattttgaataataactataagatcctgcaggctgatcaggaactgtag

SEQ ID NO: 139953 - DNA, 1197 bp, Artificial Sequence
  derived and/or modified sequence
atggagggcgccgccctgctgcgggtgagcgtgctgtgcatctggatgtccgcacttttcctaggcgtcggcgtaagggctgaagaggcaggtgctcgagtccagcagaatgtgccaagcggcacggatactggggacccgcagagcaaacccttgggtgattgggcagccggaacaatggatcccgaatccagcatttttatagaagatgccatcaaatatttcaaggaaaaagtctctacccaaaatttgctcctcctgcttacagataatgaagcatggaacggtttcgtggccgccgcagaattgcctcgcaatgaggccgacgagctgcggaaggctctcgacaatctggcacggcagatgatcatgaaggataagaactggcacgacaaaggccaacagtaccgaaattggtttctgaaagaattccctcgcctaaaatcagaattggaagataacatacgacgactccgcgcccttgctgatggcgtgcagaaggtgcacaaaggtactaccatcgccaatgttgtaagtgggtccctgtctattagcagtggcatactgactctggtgggcatgggactggcacccttcaccgaagggggttcactggttttgctggagcccggaatggaactgggcatcaccgctgcgctgaccggtattactagtagtacaatggattatggcaagaagtggtggacacaggcacaagcccacgatctggtgatcaagagtctggataagttgaaggaggttcgggagttcttaggtgagaacatctcaaactttctatcgctggccggaaatacataccagctgacacggggaatagggaaagatatccgcgcgctgagacgcgcaagagccaacctgcagtccgtccctcacgcatctgcttcccgccctcgggtaacagagccgatctcagccgaaagcggcgagcaggtggagcgggtgaatgaaccttcaatcctagagatgagcaggggggtcaagctgacggacgtagcccccgtgagcttttttctggtgctggatgtcgtttacttagtatacgaaagcaaacatcttcatgagggcgcaaaaagcgagaccgccgaagagctgaagaaagtcgcccaggagctggaagaaaagttgaatatcctcaataacaattacaagattctgcaggctgaccaggagctctag

SEQ ID NO: 139954 - DNA, 1197 bp, Artificial Sequence
  derived and/or modified sequence
atggagggcgccgccctgctgcgggtgagcgtgctgtgcatctggatgagcgcattattcctgggagtgggcgttcgggccgaggaggctggagccagagtgcaacagaacgtgcctagcggcactgacactggcgacccccagtctaaacccttgggagattgggcagccggtacaatggatcccgagagttccatcttcatcgaagatgccataaagtacttcaaagagaaggtttctactcaaaacctgctgctgctgctgacggataatgaagcctggaatggatttgtggcagccgcggaattgcctcggaatgaggctgatgagctgagaaaggcactggacaatttggccagacagatgatcatgaaagataagaattggcacgacaaagggcaacagtacagaaattggttcctgaaggaatttcctcgactcaaatctgagctagaggataacattcgcagattgagggctctggccgatggcgtgcagaaagtccacaagggcacgacaattgctaacgtggtgtcaggcagcctaagtatctcatctggtatcctaaccctggtcgggatggggttagcaccttttacggagggcggctccttggttctgctggaaccaggaatggagctgggaattactgctgctctgactggcataacgtcctccaccatggattacggaaagaagtggtggacccaggcacaggcccacgatcttgtgatcaagagcctggataaattgaaggaggtcagggagttcctgggagagaatattagtaatttcttaagtctggccggaaacacttaccagctgaccaggggaattggcaaggatattcgcgcgttaaggagggcccgagctaatcttcagtccgttcctcatgcaagcgcaagccggccccgcgtgacggagccaatcagcgccgaaagcggggaacaagtcgaacgggtgaacgagcccagtatcctcgaaatgtctcggggcgttaaattgacagatgtcgcacctgtcagcttctttcttgtgcttgacgtagtataccttgtttatgaatccaagcacttacatgagggggccaagtccgagactgccgaggaactcaaaaaagtggcacaagagctcgaggagaagttaaatattctgaacaataattacaaaattctacaggctgaccaggaactgtag

SEQ ID NO: 139955 - DNA, 1197 bp, Artificial Sequence
  derived and/or modified sequence
atggagggcgccgccctgctgcgggtgagcgtgctgtgcatctggatgtccgctttgtttctgggcgtgggggttcgtgctgaggaggcgggagctcgggtgcagcagaacgtcccgagcggaaccgacactggcgatccacaaagtaaaccactaggagactgggctgccggcactatggacccagaaagttccattttcatcgaagatgccattaaatactttaaggaaaaagtgagcacgcaaaacctgctgctgctgctgacagacaatgaggcctggaatggatttgtggccgctgctgagctgccacgaaacgaagcagacgagctgaggaaggccctcgataatctggctcggcagatgatcatgaaggacaagaattggcacgataagggtcagcaatatagaaattggttcttgaaggaattccctaggctgaaatccgaactggaggataatattaggaggctcagagccctggcagacggagtgcagaaggtgcacaaaggcactactatcgctaatgtggtgtcagggagcctctcaatcagcagcgggatcctgacattggtgggcatgggcctcgccccatttacagagggcgggagtctggtcctgctcgagccggggatggagcttggcataacagcggctttgactggcataacaagcagcacgatggactacggaaaaaagtggtggacccaggcccaggctcacgacctggtcattaagtcgttagataaactaaaggaagtgcgagagtttctgggtgagaacatctcgaatttcctctcactagcagggaacacctatcaactcacacgtggaatagggaaggatatcagagcactaagacgggcccgtgctaacttgcaaagtgtgccgcacgcctctgcatctcggccgcgtgttacagagcctatcagcgccgaaagcggagagcaagtggagcgggtcaacgagcccagtattctcgagatgtcaagaggtgtgaaactcactgacgtcgcacccgtatccttttttctggttctggacgtggtgtatctcgtgtacgaaagtaagcacttacacgagggggctaagtccgagactgccgaagagttaaagaaggtggcacaggagctggaggagaagctgaatatactgaacaataactataaaatactacaggccgatcaggagctgtag

SEQ ID NO: 139956 - DNA, 483 bp, Artificial Sequence
  derived and/or modified sequence
atggagggcgccgccctgctgcgggtgagcgtgctgtgcatctggatgtcggcgctatttcttggggttggcgtccgggccgaggaagcaggagcgagggtgcagcaaaacgttcctagtgggactgacacaggagatccacagtccaaaccactgggcgactgggccgctggaacaatggaccccgaaagcagtatctttatcgaagacgccatcaagtacttcaaagagaaggtgtcgacccaaaacctgctccttctgttaaccgacaacgaggcatggaatggctttgtcgccgctgccgagctgcccaggaatgaggccgacgaactgagaaaggccctggataatcttgccagacagatgattatgaaagataagaactggcatgataaaggacagcagtataggaattggtttctgaaagagttccctaggctaaaaagcgagttggaagacaacattcgccgcctgagagcctag

SEQ ID NO: 139957 - DNA, 426 bp, Artificial Sequence
  derived and/or modified sequence
atggagggcgccgccctgctgcgggtgagcgtgctgtgcatctggatgagcgccctgttcctgggggttggcgtgcgggccgaagaggcaggcgctcgtgtacagcagaacgtgccttccggtaccgacaccggagatccgcaaagtaagccactgggcgactgggcagctggaactatggaccccggtccggccgggagccgcggagatagtggggagccatgcacccttaggcctgcatgcagaggccaacggcagcacggcggcgctagccgcattagtgctgagggcccagcacccatgccgagacggcgcacaccaagcaccgcccatcttcgcgtgcccaagaccagccgccgcaacctcctctgcatgcgagcagtaagccttctgaggatgccgctgtctatatctaggaagaagtag

SEQ ID NO: 139958 - DNA, 426 bp, Artificial Sequence
  derived and/or modified sequence
atggagggcgccgccctgctgcgggtgagcgtgctgtgcatctggatgagcgcattgttcttaggggtgggtgtgcgggccgaagaggcgggtgcccgggttcagcaaaacgtgccttcggggaccgatactggcgacccccaaagcaagcctcttggtgattgggccgcaggtaccatggacccaggcccagccgggtctaggggagattcaggggaaccatgcacactgagacctgcttgccgtggccagcgacagcatggcggggcctcaaggatttcagcagaggggcctgccccaatgcctaggagaaggaccccgtctaccgcgcacttgagagttcctaagacttctaggcggaatctgctgtgtatgcgcgctgtgtccctgctgcgaatgcccctctctattagccggaaaaaatag

SEQ ID NO: 139959 - DNA, 1197 bp, Artificial Sequence
  derived and/or modified sequence
atggaaggcgctgccctgctgagggtttccgtcctttgtatctggatgtcagccctcttcctgggcgtgggcgtgagggctgaagaagccggtgcacgagtgcagcaaaacgtgcctagtgggacagatacaggagaccctcagtctaagcccctgggtgattgggccgcaggaacgatggacccagaaagcagcatttttatagaagatgcaatcaagtatttcaaggaaaaggtgagcactcaaaacctcctcctgctgcttaccgacaacgaagcgtggaacgggttcgtggcggctgctgaactgccacgaaacgaagccgacgagctgaggaaggcactggataatctggcacggcagatgataatgaaagataaaaattggcacgacaagggtcagcaatataggaattggtttctaaaagagtttcctaggctgaaatccgaacttgaggataacatcagacgcctgagggcactcgcagacggagtgcagaaggtccataaaggaaccaccattgcaaatgtggtttccgggagtttgtccataagttcaggaattctgaccctggtcggcatgggcttggctccctttaccgaaggcggatcgttagtgttattggagcccggtatggaactggggattactgccgcactgacagggattacaagctctactatggattatgggaagaagtggtggacacaggcccaggcccatgatctcgtaattaagagccttgacaagcttaaggaggtgcgagaatttctcggggagaacattagcaacttcctgtccctggctggtaatacctaccagttaactaggggaattggaaaagacattcgtgcattacggcgtgcccgtgctaacctgcagagtgtaccccatgcaagcgccagccgccctagggtgaccgaaccgatcagtgccgaaagcggcgagcaggtcgagcgggtcaatgagccgtctatcttggagatgagcaggggtgtaaagctaactgacgtggccccagtctcttttttcctcgtgctggatgtcgtatacctcgtttacgagtccaagcacctacatgaaggagcaaagtcagaaacggctgaggagctgaagaaggtggcccaggagctggaagaaaagcttaatatcctcaataataattataagattctgcaggctgaccaagaactctag

SEQ ID NO: 139960 - DNA, 1197 bp, Artificial Sequence
  derived and/or modified sequence
atggagggcgctgcgctgttaagggtgtctgtgctttgtatttggatgagcgcactgtttctgggcgtgggcgtccgagctgaggaggccggagctcgcgtacagcagaatgtcccctccggtaccgacacgggggaccctcaaagcaaacctctgggggactgggccgctggaaccatggaccctgagtcctccatcttcatcgaagatgccattaagtacttcaaggaaaaagtgtcaactcagaacctcctcctgctgctaaccgataatgaggcctggaatggcttcgttgccgctgccgagctgccgagaaatgaggccgatgaactaagaaaagccctggacaacttagctcgccagatgattatgaaggacaaaaactggcatgacaaaggccagcagtaccggaattggttcttgaaagagttcccccgtctgaagtccgaactggaggataacatcaggcgcctcagagcgctcgccgatggggtacagaaggtacacaagggaactaccatagcaaatgtggttagcgggtcgctctctatttcaagcggaattctgactctggtgggcatgggattagccccttttacggagggtggctcccttgtgctgttggagcctgggatggagttggggatcacagccgctcttacaggcatcacctcctctaccatggattacgggaagaaatggtggacgcaagcacaggcccatgatctggtgattaagtcactcgataagctgaaggaagtccgcgaatttctaggtgagaacatttccaattttctgtccctcgccggtaatacataccaactaacccgcggaattggaaaagacatccgcgctcttaggagggcccgagctaatctccagtccgttcctcacgcatctgcatcgcggcctagagtaactgagcctatttccgccgagtccggagagcaggtcgaacgcgtcaatgagccatcaatcttggagatgtcacgcggagtgaagctgacggatgtggcgccagtgtcttttttcctggtcctagacgtagtctatcttgtctatgaatccaagcacctccacgagggggctaaatccgagaccgccgaggagctgaagaaggtagcacaagaactcgaagaaaagctcaatatcctcaataacaattacaagatcctgcaggccgaccaagagttatag

SEQ ID NO: 139961 - DNA, 1197 bp, Artificial Sequence
  derived and/or modified sequence
atggaaggggcagcactcctgagagtctccgtgctttgcatctggatgagcgccttattcctgggtgtgggagttcgggctgaagaggccggagctcgcgtgcaacaaaatgtgccctccggaactgacaccggagatccccagtcaaaacctctgggagattgggcagccggaaccatggatcccgaaagcagcatttttatcgaggatgccatcaaatacttcaaagagaaggtgtctacccagaatctgctgctcctgctaaccgacaatgaggcttggaatggtttcgtggcagcggctgaactaccccgaaacgaggccgatgagttgagaaaggccctggataacttagcaaggcagatgatcatgaaggacaaaaattggcacgacaaaggccaacagtataggaactggtttcttaaggaattcccgaggcttaaatctgagctcgaagataacatcagaagattgcgcgcactcgccgacggagtccagaaggtgcataagggaaccacaatagctaatgtcgtgagcgggtccctgtctatctcctcaggaatactaacactggtgggcatgggactggcaccctttaccgagggcggaagcctggtcctgcttgagccgggaatggagctagggatcaccgcggctctgaccgggatcacatcctctactatggattatgggaaaaaatggtggactcaggctcaagcccacgatctagttattaagagcttagataaactgaaagaagtcagagagtttctcggcgaaaatatttccaactttcttagcctggccggaaatacctatcagctcacaaggggcatcggcaaagatatcagagcgctgcgcagagccagagccaatcttcagtcagttcctcatgcgtccgccagccgccctagggtgaccgagccgattagcgctgaatcaggtgagcaggtggagagagtcaatgaaccaagcatcctggagatgtccaggggcgtcaaactgacggacgttgcacctgtttctttttttctcgtccttgacgttgtttacttggtgtacgaatctaaacacctgcacgaaggtgctaaatctgaaaccgccgaggagttgaagaaggtagcccaagaacttgaggagaaactcaatatactgaataataactacaagattcttcaggcagatcaggagttgtag

SEQ ID NO: 139962 - DNA, 1197 bp, Artificial Sequence
  derived and/or modified sequence
atggagggagccgctctgctgcgtgtttccgtcctttgtatctggatgtctgccctgttcttaggagtgggcgttagggctgaggaggcaggtgccagggtgcagcagaacgtgccctcaggcacagatactggagatccccagagcaaaccccttggcgattgggcggctggcaccatggacccagaaagctcgattttcatcgaggacgcgattaagtactttaaggagaaggtctccacgcagaacctgctccttctccttactgacaacgaggcatggaatggcttcgtcgccgctgccgagctgccacgcaacgaggcggacgagttgaggaaggccctggacaatcttgcccgtcaaatgatcatgaaagacaagaattggcacgacaagggacaacagtatagaaactggttccttaaggagtttcctagactgaaatccgaactcgaagataatattagaaggctaagagcccttgcagatggagtccaaaaagtccataagggcacaaccattgcaaacgtcgtgagcgggagcctctctatcagtagtggaatcctcacactggttggcatggggcttgctcctttcactgaggggggaagtctggtgctgttggaacccggaatggagctcggaattacagcagcactgacggggattacaagcagcaccatggactatggaaagaagtggtggacccaagcccaggcgcacgacctggtgataaaatccctggacaagttgaaggaggtccgcgaatttctgggcgaaaatatttctaactttctaagtcttgccggaaacacctatcagctgacccggggaattggtaaagatatcagagcgctccgtcgtgccagggccaacctgcagtccgttccccacgcttcagcaagccgacccagagtgactgaaccaataagtgctgagtctggcgaacaggttgaacgggtgaacgagcctagtatacttgagatgtctaggggcgttaaactgacggatgtcgcacccgtgagcttcttcttagttctcgatgtggtctatctggtctacgagagcaagcacctgcatgaaggagcaaagtcagaaaccgcggaggaactcaagaaagtggcgcaggagttagaggagaaattaaatatcctgaacaataactataagatcctgcaggccgaccaggagttatag

SEQ ID NO: 139963 - DNA, 483 bp, Artificial Sequence
  derived and/or modified sequence
atggagggggctgctctcctaagggtgagtgtcctgtgtatttggatgtctgccctgttcttgggtgtaggggtgagggctgaggaggctggtgcacgcgtgcagcagaacgtgccctcgggcacggataccggcgaccctcaaagtaagcctctgggcgactgggccgctggaactatggatcctgaatcgtctatctttatagaagacgcaataaaatactttaaggagaaagtttctactcagaatctgttgctgctcctgactgataacgaggcatggaatgggtttgtggctgcagctgagttacctcggaacgaagctgatgagctgagaaaggctcttgacaatctcgcccgacagatgatcatgaaggacaaaaattggcacgataagggtcagcagtaccggaactggtttctcaaagaatttcctcgcctgaagagcgagctggaggataatatccggaggctccgagcctag

SEQ ID NO: 139964 - DNA, 426 bp, Artificial Sequence
  derived and/or modified sequence
atggaaggggcagccctgctgagggttagtgtgctgtgcatttggatgtctgcacttttcctgggggttggagtgcgtgctgaggaggccggagcaagggttcagcaaaacgtcccctcaggaacggatactggagacccgcagagcaaaccactaggggattgggccgctggcactatggaccctgggcctgccggttctaggggcgattcaggcgagccttgtaccctgaggcccgcttgccgtggtcagagacagcatggaggcgcatccaggatctccgccgaaggacccgcacccatgcccagacgaaggactcccagtaccgcacatctgcgcgtgcctaagacctcgcggagaaatttgctgtgcatgagagccgtaagcctgttgagaatgccactttcaatctcccgcaagaagtag

SEQ ID NO: 139965 - DNA, 426 bp, Artificial Sequence
  derived and/or modified sequence
atggagggtgccgcacttctgcgcgtgtcagtgctctgtatttggatgtccgctttgttcctgggggttggcgtcagagccgaggaagccggtgccagggtgcagcagaatgtcccaagcgggacagatacaggcgatccacagtctaagcccctgggagactgggccgcaggcactatggacccgggtccggcaggaagccggggtgactccggagagccctgtaccctgaggcctgcttgccggggtcagcggcagcatggcggagcatcccggatttctgcagaggggcctgccccaatgcctaggagaaggaccccatcgacagcccacttacgggttccaaagacgtcccgcaggaacctactgtgtatgcgtgctgtctctctccttcgcatgccgctgtctatttctcgcaagaagtag

SEQ ID NO: 139966 - DNA, 577 bp, Artificial Sequence
  derived and/or modified sequence
ggtatatctgggaggccggaggacgtgtctggttattacacagatgcacagctggacgtgggatccacacagctcagaacagttggatcttgctcagtctctgtcagaggaagatcccttgaaaagactactgagagccagtaagactgaaagaatggacatcttcatatcctgttagtttgagtgtgaatttgtacagttttcatacagagtggctctaggacaagaggaccctgccttggtgtgagagtgagggaagaggaagctggaacgagggttaaggaaaaccttccagtctggacagtgactggagagctccaaggaaagcccctcggtaacccagccgctggcaccatgaacccagagagcagtatctttattgaggattaccttaagtatttccaggaccaagtgagcagagagaatctgctacaactgctgactgatgatgaagcctggaatggattcgtggctgctgctgaactgcccagggatgaggcagatgagctccgtaaagctctgaacaagcttgcaagtcacatggtcatgaaggacaaaaaccgccacgataaagacc

SEQ ID NO: 139967 - DNA, 1197 bp, Artificial Sequence
  derived and/or modified sequence
atggaaggagcagctttattacgggtgagcgtgttatgcatctggatgtctgccctttttctgggcgttggcgtgcgcgcagaggaggccggtgcccgtgttcagcaaaacgttccctctggcactgacaccggagacccccaaagcaaacccctaggagattgggcagcgggaacgatggaccctgaatctagcatcttcattgaagatgccatcaaatacttcaaagagaaagtgagtacacaaaatctgctcttgttgcttaccgacaatgaagcgtggaatggattcgtagcagcggcagagctgcctaggaacgaggctgacgaactgcggaaggcactcgacaatcttgcacgtcagatgatcatgaaggacaaaaactggcatgacaaggggcagcagtaccgcaattggttcctcaaagaatttccacgtctcaaaagcgagcttgaagataacatacgcaggctccgcgccctggcagatggcgttcagaaagttcacaaagggacaaccatcgccaacgtagtgtccggatccttatcaattagcagcggaatactgacactcgtcggaatgggtttagccccattcactgagggcggaagcctggttctgctcgagccaggcatggaattaggaattacggcagctttgacaggcattacgagctccaccatggactatgggaagaagtggtggacacaggcccaggcccacgacctggtgatcaagagcttggacaaactgaaggaagtgagggagtttctaggggaaaacatctcaaattttttgagtctggccgggaatacatatcagctcacaagagggattgggaaagatattcgagcgctaagacgggccagggcaaacttacagtctgtgccacatgcatcagcaagtcgtcctcgcgtaaccgaacctataagtgcagagtcaggtgagcaggtggaaagagtcaacgaaccatctattttggagatgtccaggggagtgaaactcaccgatgtcgctcccgtttccttctttttggtcctggatgtagtatatctggtgtacgaatctaaacacctccacgaaggggcaaagagtgaaactgccgaggagcttaagaaggtagcacaagagctggaagagaagctgaacatcctgaataataattataaaatccttcaggccgatcaggagttatag

SEQ ID NO: 139968 - DNA, 1197 bp, Artificial Sequence
  derived and/or modified sequence
atggagggagcagcactccttagggtttcagtgctatgtatatggatgtctgcacttttccttggcgtcggcgtgcgcgcagaagaggctggtgccagggtacagcaaaatgtcccgtcaggtacagacaccggtgatccacagagcaaacctttaggagactgggctgccggcactatggacccagagtcctcaatttttatcgaagacgcaatcaagtactttaaggaaaaggtatccacccaaaatcttctattattgctgaccgacaatgaggcctggaatggatttgttgccgccgccgaactgcctaggaacgaagcagatgagctcagaaaggccctcgataatttagcccggcagatgattatgaaagacaagaattggcacgacaaaggacaacaatacagaaactggttcctgaaggagttcccgaggcttaaatctgaattggaggacaacatacgcagactaagagcactggccgacggagtccaaaaagtgcacaagggcacgactattgcaaacgtcgtcagcggcagtctgtcaatctcgtctggaattctgaccctcgtggggatgggactggcccccttcaccgaaggtggttccctggtgcttctggaaccaggaatggagttgggcattacagccgccttgacaggaatcacttcttcaaccatggactacgggaaaaagtggtggacccaagcccaggcccacgatctcgtcatcaagtccctggacaagcttaaagaagtcagagagtttctcggagaaaacatctctaattttttaagtctggccggtaatacctaccagttaacacgagggatcggcaaggatattagggctttaaggagggccagggccaatcttcagagcgtgccacacgcctccgcgtctaggcctcgagtaaccgaacctataagtgctgaaagcggagagcaggtggaaagggtgaatgagccctccatactggaaatgtcacgcggagtgaagctgacggacgtggcaccagtgtctttttttcttgtgctggatgtcgtctatctggtgtacgaatctaaacacctgcacgaaggcgcaaaatcggagactgctgaggaactgaagaaggttgcacaggagctcgaggaaaaactgaacatcctgaataataattataagattttgcaggccgaccaggagctctag

SEQ ID NO: 139969 - DNA, 1197 bp, Artificial Sequence
  derived and/or modified sequence
atggagggcgcggctctgttgcgagtctctgtgctgtgcatctggatgagtgctttattcctcggggtgggcgtacgagccgaagaggctggagcacgcgttcagcagaatgtgccctccgggaccgatactggcgatccacagagtaagcccctcggagactgggctgccggtactatggatcccgaatcatcaatttttatagaggatgctattaagtacttcaaggaaaaggtttccacccagaatctattattgctcctcaccgacaatgaagcttggaacgggttcgtagccgccgcagaactcccaaggaacgaagccgatgaactcaggaaagctctggacaacctagcgcgtcagatgattatgaaagataaaaactggcacgacaaaggacagcagtatcgaaattggtttctgaaagagtttccgcggctgaaaagcgagctcgaggataacataaggcggttacgagcactggcagacggtgtacagaaggtgcataagggcacaactatagctaacgtcgtctcaggctcactgtcaatttcctcaggcatccttacactggtgggtatgggacttgccccctttacagaaggtggctctctggtcctgcttgaaccagggatggaactcggcatcacagccgccctgacaggaatcacgtcttccactatggattacgggaagaaatggtggacacaggcccaggcacacgacttagtgataaaaagcttagacaaacttaaggaagtccgggaattcttaggcgaaaacatctctaattttttatccctggcggggaacacatatcagctgacgcgcggaattggaaaggacatcagagcgcttagaagagcccgcgctaacctccagtccgtcccccatgctagcgctagccgccccagagtcaccgagcccatctccgctgaatccggagagcaagtcgaacgggtgaatgaacccagtatccttgaaatgtcccgtggcgtaaaactgaccgatgtggcgcctgtttccttttttctggtgttggatgttgtttatctcgtttacgagagtaagcatctccatgaaggtgccaaatccgagactgccgaggagctgaagaaagttgcccaggaactggaggaaaaactcaatattctgaacaataattacaagattctgcaagccgaccaggagctatag

SEQ ID NO: 139970 - DNA, 1197 bp, Artificial Sequence
  derived and/or modified sequence
atggaaggtgcggcactgcttagggtctctgtcctgtgcatatggatgagtgcattatttttaggtgtaggagtaagagctgaagaagccggagccagagttcagcaaaacgtgccttcaggtacagacaccggagacccgcagtccaaacctctgggcgattgggccgcaggcactatggaccctgagtcaagcattttcattgaagacgcaattaagtacttcaaagagaaagtgtcaacccagaacctccttttgctgctcacggataacgaagcatggaacgggttcgtcgctgctgctgagctgcccagaaatgaagctgacgaattgcgtaaagcccttgacaatcttgctcgccaaatgatcatgaaggataagaattggcacgacaaaggccagcaatatcgaaactggtttctgaaggagttcccaagattaaaatctgagttagaagacaatattcgtcgtcttagggccttggccgacggggttcaaaaggtccacaaagggacaacaatcgctaacgtcgtctccggatcactatctatcagcagcggtatcctgacacttgtgggcatggggcttgcaccctttacagaaggagggtcactcgtacttctggaaccaggaatggaactgggcatcactgctgccttgactggaatcactagttccacaatggattacgggaaaaagtggtggacccaggcccaagctcacgacttggtgattaagagcctggacaagctaaaggaggtgcgcgagtttctcggggagaatatttctaactttttatctctggcaggaaatacctatcagctgactcgcggcattggcaaagacattagggcattacggcgggcccgcgctaacctccagagcgtcccccatgcaagtgcaagccggccgagggtgacagagccaatcagtgctgagtcaggcgaacaggtggagcgcgtgaacgaaccctcaatcctcgaaatgtcgcgcggcgtgaagttaacagacgttgctccggtgtccttcttccttgtcctcgacgtggtatatctggtctacgaatctaagcatctccacgaaggggcgaaaagcgagaccgctgaggagttaaagaaagtggcccaggagctagaggaaaagctgaacattctgaataataactataaaattttgcaagctgaccaagaactctag

SEQ ID NO: 139971 - DNA, 483 bp, Artificial Sequence
  derived and/or modified sequence
atggagggagcagccctgttgagagttagcgtgttatgtatttggatgtcagccctgtttctgggggtcggagttagagctgaagaagcgggagcaagggttcaacagaacgtaccctcagggacggacaccggagaccctcaatccaaacctctgggtgattgggccgccggaactatggatcccgagagctccatctttattgaggacgccatcaaatattttaaagagaaagtttccacccagaatctgctcttgctactcacagataacgaggcttggaatggcttcgtcgctgctgcagagttgccaagaaacgaggctgatgagctgaggaaagccctggacaatctagcccgccaaatgatcatgaaagataagaattggcatgataagggccagcagtacagaaattggtttcttaaggagttccctagactgaagtcagagctggaagacaatatacgacgcctgagagcttag

SEQ ID NO: 139972 - DNA, 426 bp, Artificial Sequence
  derived and/or modified sequence
atggaaggagctgcgttattgcgtgtttccgtgctgtgcatatggatgagcgctctatttctcggggtcggcgtgagggcagaagaagcaggggccagagtgcagcagaatgttccctccgggaccgataccggagatccgcagagtaaacctctgggagactgggccgcaggcacaatggatcccggacccgcagggtctcgaggtgactcaggcgaaccgtgtacattgaggcctgcatgccgtggacagagacagcacggcggggcttcgcgtatcagtgccgaaggaccagccccgatgccacgtagacgtacgccatcgactgcgcacctccgtgtaccaaagacttcaagacgcaatctgctgtgcatgagggccgtgtcattactcagaatgcccctctccatcagcagaaagaagtag

SEQ ID NO: 139973 - DNA, 426 bp, Artificial Sequence
  derived and/or modified sequence
atggagggcgctgcattgctccgcgtgagcgtcctgtgtatttggatgagcgcactatttcttggagtcggagtccgagcagaagaagctggcgctagagtgcaacagaacgttccatctggcactgatactggagacccccaaagcaaacccctaggtgattgggccgccggcaccatggaccccggaccagcgggctctcggggagacagtggtgaaccctgtacactgcggccagcctgccgaggtcagcgacagcacggaggcgcaagcagaattagcgctgaaggccccgctcccatgccacgcagacgaaccccaagcactgcacacctgcgggttcccaagacatcccggcgtaatttgctgtgtatgcgggcggtgtcactgttacggatgcccttaagtattagccgtaagaagtag

SEQ ID NO: 139974 - DNA, 1197 bp, Artificial Sequence
  derived and/or modified sequence
atggaaggagcagctttattacgggtgagcgtgttatgcatctggatgtctgccctttttctgggcgttggcgtgcgcgcagaggaggccggtgcccgtgttcagcaaaacgttccctctggcactgacaccggagacccccaaagcaaacccctaggagattgggcagcgggaacgatggaccctgaatctagcatcttcattgaagatgccatcaaatacttcaaagagaaagtgagtacacaaaatctgctcttgttgcttaccgacaatgaagcgtggaatggattcgtagcagcggccgaattacccagaaatgaagcggatgaactgaggaaagcattggataaccttgcacggcagatgataatgaaggacaaaaattggcatgataaagggcaacagtaccgcaactggttcctaaaggagttccctaggctgaaaagcgagttggaagataatatccgaagactgagagcccttgctgacggagtgcagaaagtccacaaaggtacaactatagcgaacgtggtttcaggttccctttcaatcagttccggaatccttaccttggtaggcatggggttggcgcccttcacggaaggaggatcattggtgctgctcgagcctggtatggaattagggattaccgccgccctgacaggcatcactagctcgactatggattatgggaaaaagtggtggactcaagcccaggcacacgacttggtgattaaatcgttagataagttaaaggaagtgagagaattcctcggcgagaacattagtaacttcctttcactcgccggaaatacttatcagcttaccagaggcattggcaaagatatccgagctttgcgaagggccagagcaaacctgcagtctgttccgcatgcctcggcgagcagaccccgagtgaccgaacccatctcagctgagtccggtgaacaggtcgaaagagtgaatgagccaagcatcctcgaaatgtctagaggcgttaagctcaccgacgtggctccagtcagcttctttctcgtcttggatgtggtctatctggtctatgaatcgaaacacctccatgaaggcgccaaaagcgagacagccgaagagcttaagaaagtggcccaggagctggaagagaaactgaacatcttgaataataactacaaaattttacaggcggaccaagagctgtag

SEQ ID NO: 139975 - DNA, 1197 bp, Artificial Sequence
  derived and/or modified sequence
atggagggagcagcactccttagggtttcagtgctatgtatatggatgtctgcacttttccttggcgtcggcgtgcgcgcagaagaggctggtgccagggtacagcaaaatgtcccgtcaggtacagacaccggtgatccacagagcaaacctttaggagactgggctgccggcactatggacccagagtcctcaatttttatcgaagacgcaatcaagtactttaaggaaaaggtatccacccaaaatcttctattattgctgaccgacaatgaggcctggaatggatttgttgccgccgccgaactgcctaggaacgaagcagatgagctcagaaaggccctcgataatttagcccggcagatgattatgaaagacaagaattggcacgacaaaggacaacaatacagaaactggttcctgaaggagttcccgaggcttaaatctgaattggaggacaacatacgcagactaagagcactggccgacggagtccaaaaagtgcacaagggcacgactattgcaaacgtcgtcagcggcagtctgtcaatctcgtctggaattctgaccctcgtggggatgggactggcccccttcaccgaaggtggctcattggttctactggaacccggcatggaactgggaattacggcagcacttacaggcataacttcttcgactatggactacgggaagaagtggtggacacaggcacaggcacacgacctcgtcattaagtccctggacaagctgaaagaagtacgggaattcttaggagaaaatatttcgaacttcctctctcttgccggaaatacctaccagctcactcgcggaatcggaaaggatattagggcccttcgtcgagctcgcgctaaccttcagtcagttccccacgcctctgcttcacgcccccgggtcactgagcccatttcagctgagtctggtgaacaggtcgagagggttaacgaaccgagtattctggaaatgtcgcggggcgtcaaactgacagacgtggctccagtaagcttttttctggtgctcgatgtcgtgtatctggtctacgaatctaagcacttgcatgagggagcaaagtccgagacagccgaagaactgaaaaaggtcgcccaagaactggaagaaaagctcaatattctaaataacaactacaagatactccaggctgaccaagaactctag

SEQ ID NO: 139976 - DNA, 1197 bp, Artificial Sequence
  derived and/or modified sequence
atggaaggtgcagcattactacgcgttagtgttttatgtatctggatgtccgctctatttctgggcgtcggcgtgcgggcagaggaggccggcgccagagtccagcagaatgttcctagtggcaccgatactggggacccacaatcaaaacctctgggagactgggccgcgggtacgatggacccggaatcttcaattttcatcgaagatgcaattaaatatttcaaagaaaaggtgagtactcagaatcttctgttgctgttaaccgacaatgaggcatggaatggttttgtggccgcagcagaacttcctcgtaatgaggctgatgagctacggaaggccctggataatctggcacggcagatgattatgaaggataagaattggcatgacaaagggcagcagtataggaactggttcctgaaggaatttccaagacttaagagtgagcttgaagataatatcagacggctgcgggcactggcagatggagtacaaaaggtacataaagggacgacgattgccaatgtggttagcgggagcctctcgatcagtagcgggatcctcacgctcgtgggcatgggcttagccccttttacagaaggtggctctctggtcctgcttgaaccagggatggaactcggcatcacagccgccctgacaggaatcacgtcttccactatggattacgggaagaaatggtggacacaggcccaggcacacgacttagtgataaaaagcttagacaaacttaaggaagtccgggaattcttaggcgaaaacatctctaattttttatccctggcggggaacacatatcagctgacgcgcggaattggaaaggacatcagagcgcttagaagagcccgcgctaacctccagtccgtcccccatgctagcgccagtcgcccacgcgtcaccgaacctatttcagcggagtcaggcgagcaggtagaacgggttaacgaaccttccatactggaaatgtcaagaggcgtgaagctgacagacgttgctccagtcagtttcttcctggttttggacgtagtgtacctggtctatgagtccaaacatctccacgagggtgcaaaaagtgaaactgccgaagagttgaagaaggtcgcacaagagttggaggagaagttaaatatactgaataacaattacaaaattttgcaggctgatcaggagctgtag

SEQ ID NO: 139977 - DNA, 1197 bp, Artificial Sequence
  derived and/or modified sequence
atggagggcgctgccttactcagggtgagcgtcttatgtatttggatgtcggcattgtttctgggagtaggtgtccgagcggaagaagcaggtgcccgagtgcaacaaaacgtgccatctgggaccgatacgggagatcctcagagcaaaccactgggtgactgggctgctggaacaatggaccctgaaagttctatttttatcgaggacgcaatcaagtattttaaggagaaagtatccactcagaaccttctattattgttgactgataacgaggcatggaacgggtttgtagccgccgctgagctgcccagaaatgaagctgacgaattgcgtaaagcccttgacaatcttgctcgccaaatgatcatgaaggataagaattggcacgacaaaggccagcaatatcgaaactggtttctgaaggagttcccaagattaaaatctgagttagaagacaatattcgtcgtcttagggccttggccgacggggttcaaaaggtccacaaagggacaacaatcgctaacgtcgtctccggatcactatctatcagcagcggtatcctgacacttgtgggcatggggcttgcaccctttacagagggaggctccttggtactattagagccggggatggaactaggtatcactgccgctctcacagggatcacaagcagcacaatggactatgggaaaaagtggtggacccaggcccaagcacacgatcttgtcattaaatccctcgataaactgaaggaggtgcgggagtttctcggcgagaacattagcaattttctctccttagcaggaaatacctaccagcttacaaggggcatcggaaaggatattcgcgcccttagaagggctagagccaatctgcagtcagtgccacacgccagtgctagccgcccaagagtaaccgaacctattagcgcagagtcaggcgaacaagtggagcgagtaaatgagccaagcatactagaaatgagccgcggcgtgaagctgactgacgtggctcctgtgagcttctttctcgtgctggatgtagtgtaccttgtatatgaatccaagcatcttcacgagggcgcaaagagtgagacagcggaagagttgaaaaaggtggcacaagaactggaagaaaagctgaatatcctgaataacaactacaagatcttgcaagccgatcaggagctgtag

SEQ ID NO: 139978 - DNA, 483 bp, Artificial Sequence
  derived and/or modified sequence
atggagggcgccgccttgttgagggtgtcagtcctgtgcatttggatgtcagccttgtttctaggggtgggtgtgagagcagaagaagcaggagctcgagtccagcaaaacgtgccatccggtaccgacactggcgatcctcaatccaaacccctgggagactgggcagccgggaccatggatcccgagtccagcatatttatagaagacgcaattaaatacttcaaagaaaaagtgagcacacagaatctgcttttgctcctgacagacaacgaagcttggaacggatttgtggctgccgcagaactgccacggaacgaggctgatgagctaagaaaggctctggataatcttgcacggcagatgataatgaaagataagaattggcatgataaggggcagcaatatagaaactggtttctgaaagaattcccgcgcctgaagtcagaattagaagataacattagaaggctcagagcatag

SEQ ID NO: 139979 - DNA, 426 bp, Artificial Sequence
  derived and/or modified sequence
atggaaggagctgcgttattgcgtgtttccgtgctgtgcatatggatgagcgctctatttctcggggtcggcgtgagggcagaagaagcaggggccagagtgcagcagaatgttccctccgggaccgataccggagatccgcagagtaaacctctgggagactgggccgcaggcacaatggatcccggacccgcagggtctcgaggtgactcaggcgaaccgtgtacattgaggcctgcatgccgtggacagagacagcacggcggggcttcgcgtatcagtgccgaaggaccagccccgatgcctcgacgccgaaccccttccacggcccacctccgtgtccccaagacatcccgcaggaacttgctctgtatgcgcgccgtatccctcttacgaatgccactatccataagtcggaaaaagtag

SEQ ID NO: 139980 - DNA, 426 bp, Artificial Sequence
  derived and/or modified sequence
atggagggcgctgcattgctccgcgtgagcgtcctgtgtatttggatgagcgcactatttcttggagtcggagtccgagcagaagaagctggcgctagagtgcaacagaacgttccatctggcactgatactggagacccccaaagcaaacccctaggtgattgggccgccggcaccatggaccccggaccagcgggctctcggggagacagtggtgaaccctgtacactgcggccagcctgccgaggtcagcgacagcacggaggcgcaagcagaattagcgctgaaggccccgctcccatgccacggaggcgcacacccagtacagcccacttacgcgtcccaaaaacaagtcggaggaacctgctatgcatgcgggccgtatcattgctcagaatgcccctgtccatatctcgcaagaaatag

SEQ ID NO: 139981 - DNA, 1197 bp, Artificial Sequence
  derived and/or modified sequence
atggagggcgccgccctgctgagagtgagcgtgctgtgcatctggatgagcgccctgttcctgggcgtgggcgtgagagccgaggaggccggcgccagagtgcagcagaacgtgcccagcggcaccgacaccggcgacccccagagcaagcccctgggcgactgggccgccggcaccatggaccccgagagcagcatcttcatcgaggacgccatcaagtacttcaaggagaaggtgagcacccagaacctgctgctgctgctgaccgacaacgaggcctggaacggcttcgtggccgccgccgagctgcccagaaacgaggccgacgagctgagaaaggccctggacaacctggccagacagatgatcatgaaggacaagaactggcacgacaagggccagcagtacagaaactggttcctgaaggagttccccagactgaagagcgagctggaggacaacatcagaagactgagagccctggccgacggcgtgcagaaggtgcacaagggcaccaccatcgccaacgtggtgagcggcagcctgagcatcagcagcggcatcctgaccctggtgggcatgggcctggcccccttcaccgagggcggcagcctggtgctgctggagcccggcatggagctgggcatcaccgccgccctgaccggcatcaccagcagcaccatggactacggcaagaagtggtggacccaggcccaggcccacgacctggtgatcaagagcctggacaagctgaaggaggtgagagagttcctgggcgagaacatcagcaacttcctgagcctggccggcaacacctaccagctgaccagaggcatcggcaaggacatcagagccctgagaagagccagagccaacctgcagagcgtgccccacgccagcgccagcagacccagagtgaccgagcccatcagcgccgagagcggcgagcaggtggagagagtgaacgagcccagcatcctggagatgagcagaggcgtgaagctgaccgacgtggcccccgtgagcttcttcctggtgctggacgtggtgtacctggtgtacgagagcaagcacctgcacgagggcgccaagagcgagaccgccgaggagctgaagaaggtggcccaggagctggaggagaagctgaacatcctgaacaacaactacaagatcctgcaggccgaccaggagctgtag

SEQ ID NO: 139982 - DNA, 483 bp, Artificial Sequence
  derived and/or modified sequence
atggagggcgccgccctgctgagagtgagcgtgctgtgcatctggatgagcgccctgttcctgggcgtgggcgtgagagccgaggaggccggcgccagagtgcagcagaacgtgcccagcggcaccgacaccggcgacccccagagcaagcccctgggcgactgggccgccggcaccatggaccccgagagcagcatcttcatcgaggacgccatcaagtacttcaaggagaaggtgagcacccagaacctgctgctgctgctgaccgacaacgaggcctggaacggcttcgtggccgccgccgagctgcccagaaacgaggccgacgagctgagaaaggccctggacaacctggccagacagatgatcatgaaggacaagaactggcacgacaagggccagcagtacagaaactggttcctgaaggagttccccagactgaagagcgagctggaggacaacatcagaagactgagagcctag

SEQ ID NO: 139983 - DNA, 426 bp, Artificial Sequence
  derived and/or modified sequence
atggagggcgccgccctgctgagagtgagcgtgctgtgcatctggatgagcgccctgttcctgggcgtgggcgtgagagccgaggaggccggcgccagagtgcagcagaacgtgcccagcggcaccgacaccggcgacccccagagcaagcccctgggcgactgggccgccggcaccatggaccccggccccgccggcagcagaggcgacagcggcgagccctgcaccctgagacccgcctgcagaggccagagacagcacggcggcgccagcagaatcagcgccgagggccccgcccccatgcccagaagaagaacccccagcaccgcccacctgagagtgcccaagaccagcagaagaaacctgctgtgcatgagagccgtgagcctgctgagaatgcccctgagcatcagcagaaagaagtag

SEQ ID NO: 139984 - protein, 290 aa, Artificial Sequence
  derived and/or modified sequence
MGSSKKVTLSVLSREQSEGVGARVRRSIGRPELKNLDPFLLFDEFKGGRPGGFPDHPHRGFETVSYLLEGGSMAHEDFCGHTGKMNPGDLQWMTAGRGILHAEMPCSEEPAHGLQLWVNLRSSEKMVEPQYQELKSEEIPKPSKDGVTVAVISGEALGIKSKVYTRTPTLYLDFKLDPGAKHSQPIPKGWTSFIYTISGDVYIGPDDAQQKIEPHHTAVLGEGDSVQVENKDPKRSHFVLIAGEPLREPVIQHGPFVMNTNEEISQAILDFRNAKNGFERAKTWKSKIGN

SEQ ID NO: 139985 - DNA, 873 bp, Artificial Sequence
  derived and/or modified sequence
atgggcagcagcaagaaggtgaccctgagcgtgctgagcagagagcagagcgagggcgtgggcgccagagtgagaagaagcatcggcagacccgagctgaagaacctggaccccttcctgctgttcgacgagttcaagggcggcagacccggcggcttccccgaccacccccacagaggcttcgagaccgtgagctacctgctggagggcggcagcatggcccacgaggacttctgcggccacaccggcaagatgaaccccggcgacctgcagtggatgaccgccggcagaggcatcctgcacgccgagatgccctgcagcgaggagcccgcccacggcctgcagctgtgggtgaacctgagaagcagcgagaagatggtggagccccagtaccaggagctgaagagcgaggagatccccaagcccagcaaggacggcgtgaccgtggccgtgatcagcggcgaggccctgggcatcaagagcaaggtgtacaccagaacccccaccctgtacctggacttcaagctggaccccggcgccaagcacagccagcccatccccaagggctggaccagcttcatctacaccatcagcggcgacgtgtacatcggccccgacgacgcccagcagaagatcgagccccaccacaccgccgtgctgggcgagggcgacagcgtgcaggtggagaacaaggaccccaagagaagccacttcgtgctgatcgccggcgagcccctgagagagcccgtgatccagcacggccccttcgtgatgaacaccaacgaggagatcagccaggccatcctggacttcagaaacgccaagaacggcttcgagagagccaagacctggaagagcaagatcggcaactag

SEQ ID NO: 139986 - DNA, 873 bp, Artificial Sequence
  derived and/or modified sequence
atgggcagtagcaagaaggtgacactctctgtgctgagccgggagcagtctgagggggttggggcccgggtaagaaggtcaatagggcggccggagttaaaaaaccttgatccctttctgctctttgatgaattcaagggcggtcgccccggtggcttcccagatcatccccaccgcggcttcgagaccgttagttacctgctggaagggggaagcatggctcacgaggatttttgtggtcacacaggcaagatgaacccaggggacttgcagtggatgactgctggtagaggtatcttgcacgctgaaatgccctgctccgaagaacccgctcacggattacagctctgggttaaccttcgatcctccgagaaaatggtcgaaccccagtaccaggagttgaaatccgaggagattcccaagccgtccaaagacggggtgacagtggcggtaatcagcggagaggccctggggattaaaagcaaggtgtatacaaggacccctacattgtacctcgactttaagctggacccgggagccaagcacagtcagcccatacccaaaggctggacatctttcatttatactattagcggggacgtgtatattgggccagacgatgctcaacagaaaatagagccccaccacaccgccgtgctaggagaaggtgatagcgtgcaagtggagaacaaagatcctaaacggtctcatttcgtactcatcgcaggcgagcccctgagagaacctgtgatccagcacggtcctttcgtgatgaatacgaacgaggaaataagtcaggccattctcgactttcgcaatgccaagaacgggttcgagagagccaagacgtggaagagtaagataggaaattag

SEQ ID NO: 139987 - DNA, 873 bp, Artificial Sequence
  derived and/or modified sequence
atggggtcatccaaaaaagtgacactgagcgtattgtctagagagcaatctgaaggagtaggggcaagagtgcggcggtctatcggaagacctgagttaaagaatctagatccatttttacttttcgacgagttcaaaggtgggcgcccaggaggttttcccgaccatcctcataggggcttcgaaactgtgtcatacttactggaggggggatccatggcccacgaagacttctgtggacatactggcaagatgaaccctggggacctgcagtggatgaccgcaggtcgcggcattcttcacgcggaaatgccttgttccgaagagccagcccacggattacaactgtgggttaacctgagatcctctgagaaaatggtggagcctcagtaccaggaactgaaaagcgaggagattccaaagcctagcaaagacggtgtgactgttgcagtgattagcggcgaggccctgggaatcaaatctaaagtctacactcgcactccaacgctctacctcgacttcaagctagaccccggcgctaaacacagtcagcctataccaaagggctggacctcgttcatttacactattagcggcgacgtgtatatcgggccggacgatgcccaacagaagatcgagccccatcacacagccgtgctgggggaaggggacagcgttcaggtagaaaataaggaccccaagagatcacattttgttctgatagcaggagagcctctacgcgagccagtgatccagcatggaccttttgtcatgaatactaacgaagagatcagtcaggccatactggacttccgcaacgccaaaaatggctttgagagagctaaaacatggaagtcaaagattggcaattag

SEQ ID NO: 139988 - DNA, 873 bp, Artificial Sequence
  derived and/or modified sequence
atgggcagcagcaagaaggtgaccctgtctgtgctgagccgggagcagagcgagggcgtgggcgcccgggtgagaagaagcatcggccggcctgagctgaagaacctggaccccttcctgctgtttgatgagttcaagggcggccggcctgggggcttcccagaccacccccaccggggctttgaaacagtgtcctacctgctggagggcggctccatggcccacgaggacttctgtggccacacaggcaagatgaaccctggggacctgcagtggatgacagctggccggggcatcctgcacgccgagatgccctgcagcgaggagcccgcccacggcctgcagctgtgggtgaacctgcggagcagcgagaagatggtggagccccagtaccaggagctgaagtctgaggagatccccaagcccagcaaggatggagtgacagtggccgtcatctctggagaggccctgggcatcaagagcaaggtgtacaccaggacccccaccctgtacctggacttcaagctggaccccggggccaagcacagccagcccatccccaagggctggaccagcttcatctacaccatctctggagatgtgtacatcggcccagatgatgcccagcagaagattgagccccaccacacagctgtgctgggggagggggacagcgtgcaggtggagaacaaggaccccaagaggagccactttgtgctgattgctggggagcccctgcgggagcctgtgatccagcacggcccctttgtgatgaacaccaatgaggagatcagccaggccatcctggacttcagaaatgccaagaatggatttgagcgggccaagacctggaagagcaagattggcaactag

SEQ ID NO: 139989 - DNA, 1282 bp, Artificial Sequence
  derived and/or modified sequence
cctcccgcctcctctaggccgccggccgcgaagcgctgagtcacggtgaggctactggacccacactctcttaacctgccctccctgcactcgctcccggcggctcttcgcgtcacccccgccgctaaggctccaggtgccgctaccgcagcccctccatcctctacagctcagcatcagaacactctctttttagactccgatatggggtcctccaagaaagttactctctcagtgctcagccgggagcagtcggaaggggttggagcgagggtccggagaagcattggcagacccgagttaaaaaatctggatccgtttttactgtttgatgaatttaaaggaggtagaccaggaggatttcctgatcatccacatcgaggttttgaaacagtatcctacctcctggaagggggcagcatggcccatgaagacttctgtggacacactggtaaaatgaacccaggagatttgcagtggatgactgcgggccggggcattctgcacgctgagatgccttgctcagaggagccagcccatggcctacaactgtgggttaatttgaggagctcagagaagatggtggagcctcagtaccaggaactgaaaagtgaagaaatccctaaacccagtaaggatggtgtgacagttgctgtcatttctggagaagccctgggaataaagtccaaggtttacactcgcacaccaaccttatatttggacttcaaattggacccaggagccaaacattcccaacctatccctaaagggtggacaagcttcatttacacgatatctggagatgtgtatattgggcccgatgatgcacaacaaaaaatagaacctcatcacacagcagtgcttggagaaggtgacagtgtccaggtggagaacaaggatcccaagagaagccactttgtcttaattgctggggagccattaagagaaccagttatccaacatggtccatttgtgatgaacaccaatgaagagatttctcaagctattcttgatttcagaaacgcaaaaaatgggtttgaaagggccaaaacctggaaatcaaagattgggaactagtggaaagcggaagagcaggtcttgatgtgtcctagaattttgccatttctgagattgagccattgaaggcattccatttctaaagcttatttagccggtgcttctaaagaattccacactaacgtgataacatggtttttgtaacaataaatgtaggatatttcctggcacatgcaaataaacctaatcattgtttctttaaaaa

SEQ ID NO: 139990 - DNA, 1539 bp, Artificial Sequence
  derived and/or modified sequence
accgaccggagcgccgatcagagcacctgcccgggccacacatttcctcctggagcacagcaagtgccgcctaaattacccgagtgagcatctcttcccggcacgagaggcagggaggccaaagggccgccaagctggcctgggagaggcgtagggcggagcgagagtggagtgacattcccgagggcggagccccagggcctccgagacccgtagactcccgcctcccgcctcctctaggccgccggccgcgaagcgctgagtcacggtgaggctactggacccacactctcttaacctgccctccctgcactcgctcccggcggctcttcgcgtcacccccgccgctaaggctccaggtgccgctaccgcagcgtgagtacctggggctcctgcaggggtccactagccctccatcctctacagctcagcatcagaacactctctttttagactccgatatggggtcctccaagaaagttactctctcagtgctcagccgggagcagtcggaaggggttggagcgagggtccggagaagcattggcagacccgagttaaaaaatctggatccgtttttactgtttgatgaatttaaaggaggtagaccaggaggatttcctgatcatccacatcgaggttttgaaacagtatcctacctcctggaagggggcagcatggcccatgaagacttctgtggacacactggtaaaatgaacccaggagatttgcagtggatgactgcgggccggggcattctgcacgctgagatgccttgctcagaggagccagcccatggcctacaactgtgggttaatttgaggagctcagagaagatggtggagcctcagtaccaggaactgaaaagtgaagaaatccctaaacccagtaaggatggtgtgacagttgctgtcatttctggagaagccctgggaataaagtccaaggtttacactcgcacaccaaccttatatttggacttcaaattggacccaggagccaaacattcccaacctatccctaaagggtggacaagcttcatttacacgatatctggagatgtgtatattgggcccgatgatgcacaacaaaaaatagaacctcatcacacagcagtgcttggagaaggtgacagtgtccaggtggagaacaaggatcccaagagaagccactttgtcttaattgctggggagccattaagagaaccagttatccaacatggtccatttgtgatgaacaccaatgaagagatttctcaagctattcttgatttcagaaacgcaaaaaatgggtttgaaagggccaaaacctggaaatcaaagattgggaactagtggaaagcggaagagcaggtcttgatgtgtcctagaattttgccatttctgagattgagccattgaaggcattccatttctaaagcttatttagccggtgcttctaaagaattccacactaacgtgataacatggtttttgtaacaataaatgtaggatatttcctggcacatgcaaataaacctaatcattgtttctttaaaaa

SEQ ID NO: 139991 - DNA, 873 bp, Artificial Sequence
  derived and/or modified sequence
atgggcagcagcaagaaggtgaccctgagcgtgctgagccgggagcagagtgagggtgttggcgcccgcgtgcggaggtccattgggcgtccagagctgaagaatctagaccccttcctgctcttcgatgaattcaaaggcggccgccccggcggttttcctgaccacccacatagaggctttgagactgtatcataccttctggaggggggatctatggctcatgaggacttctgtggtcacaccggaaaaatgaatccaggtgacttgcagtggatgactgctggccgcgggattcttcatgccgagatgccttgttccgaagagcctgctcacggtctgcagctgtgggtaaaccttcggagctccgagaaaatggtggaaccacagtaccaggagttgaagagcgaggagatcccaaaaccatcaaaggacggagtgaccgtcgcagtgatcagcggcgaagcactgggaattaagtccaaggtatatactagaacgcctacactctacctggatttcaaattggatccaggtgcgaaacactcccaacccattcctaaaggttggacatcattcatttacaccattagtggggatgtgtacattggcccagacgacgctcaacagaagatagagccccatcacaccgccgtgctgggcgaaggagactccgtgcaggttgagaacaaggatcctaaacggtctcacttcgtgcttatagctggcgagcctctgcgagagcccgtaatacaacatggccctttcgtgatgaatacaaacgaggaaatcagtcaggccattctggacttcaggaatgctaagaacgggtttgagagagctaagacctggaaatctaagataggcaactag

SEQ ID NO: 139992 - DNA, 873 bp, Artificial Sequence
  derived and/or modified sequence
atgggcagcagcaagaaggtgaccctgagcgtgctgagccgggagcagtccgagggcgtgggggcccgcgtcaggcggagcatcggccggcctgagttgaagaacctggacccttttctgctcttcgacgagttcaaagggggccgtccgggtggcttccctgaccaccctcaccgtggttttgagactgtttcctatctcttggagggcggatctatggcacacgaggacttttgcgggcacacaggaaaaatgaatcccggcgacctgcaatggatgacagcagggaggggaattcttcatgcagagatgccttgcagtgaagaacccgcccacggactccagctgtgggtgaatctacgctcatctgaaaagatggtggaacctcagtaccaggagctgaagtctgaggagatccctaaaccttcaaaggacggcgtcactgtggccgttatcagcggagaagctctagggataaagtccaaagtgtacacaaggactccaactctgtacctcgacttcaaactggatcctggcgccaagcacagccagcccatacccaagggctggacatcttttatatacacaattagcggcgacgtgtatatcgggccagacgacgcacagcagaagatcgagcctcaccatactgccgttctgggagaaggcgattcagttcaagtagagaataaggatccgaagaggagtcacttcgtcctcattgctggcgagcccctgagagaaccagtgatccaacacgggcccttcgtcatgaacaccaatgaagagattagtcaggccatattggacttcagaaatgctaagaatggatttgagagggccaagacatggaaatctaaaattgggaattag

SEQ ID NO: 139993 - DNA, 873 bp, Artificial Sequence
  derived and/or modified sequence
atgggatccagcaaaaaggtgacattatccgtactctctagagagcaatcagaaggcgttggagctcgggtgcgcaggagcatcggcaggcccgaactgaagaacctggacccattccttctatttgacgaattcaaaggtggtagacccggaggtttccctgaccaccctcatagggggttcgagacagtgtcctatctgctggaagggggttccatggctcatgaggacttctgtgggcatactgggaaaatgaaccctggagaccttcagtggatgacagccggtcggggaatattgcacgctgagatgccttgcagcgaggagcctgcacatggtttgcagctgtgggtgaaccttcgttcttccgagaaaatggtggaaccacaataccaggaacttaagtccgaggagatccctaagccatccaaggacggtgtaaccgtcgccgtgatttccggggaggccctcgggatcaagagtaaagtttacacccggacccccaccctctatctggactttaaactggatccaggcgctaagcactcccaaccgattcccaagggctggacttcttttatctacactatctccggggacgtatatattggaccagatgatgctcagcaaaaaatagaacctcatcacacggctgtgttgggcgaaggtgactctgtgcaggtggaaaacaaggatcctaagagaagccacttcgttcttatcgctggcgaaccccttcgcgagcctgtgattcagcacggtccttttgtaatgaatactaacgaggagatctctcaggcaatcctggactttcgtaacgctaaaaacggctttgagagggcgaaaacctggaaatctaagatcgggaattag

SEQ ID NO: 139994 - DNA, 873 bp, Artificial Sequence
  derived and/or modified sequence
atgggtagcagtaagaaagtgaccctgtctgtcctgagcagagaacagtcagaaggcgtgggtgccagggtgcggagatcgatcggcagaccagagctgaaaaaccttgatccattcttgcttttcgacgagttcaaaggaggccgtcccggtggcttcccagaccacccacatcgcggttttgaaacggttagttacctgctggaagggggaagcatggcacatgaggatttctgtggtcacactggtaaaatgaaccctggcgatctgcagtggatgacggctgggagaggcatactacacgcagaaatgccctgctcagaagagcccgctcatggacttcagctgtgggtgaacctgcgaagttctgagaagatggtcgagcctcagtaccaagagctgaagtctgaggaaatcccaaagccttccaaggatggcgttaccgtggctgtgatttccggtgaggcgctgggcatcaagagcaaagtgtatacccggacaccaacactgtacttagactttaagctggatcccggtgcaaaacatagccaacctatccctaaaggctggacgagcttcatctatactatttccggtgatgtttacatcgggccagatgacgctcaacagaagatcgagcctcaccataccgccgtactgggtgagggggattcggttcaggtagagaataaggaccccaaacggtcgcactttgttctcatcgctggcgaacccttgagggaacctgtgatccagcatggaccattcgtgatgaacaccaatgaagaaatctcccaggccatcttagatttccgaaacgccaagaacggctttgaaagggccaagacttggaagtcaaaaatcggcaattag

SEQ ID NO: 139995 - protein, 1094 aa, Artificial Sequence
  derived and/or modified sequence
MSSNSFPYNEQSGGGEATELGQEATSTISPSGAFGLFSSDLKKNEDLKQMLESNKDSAKLDAMKRIVGMIAKGKNASELFPAVVKNVASKNIEIKKLVYVYLVRYAEEQQDLALLSISTFQRALKDPNQLIRASALRVLSSIRVPIIVPIMMLAIKEASADLSPYVRKNAAHAIQKLYSLDPEQKEMLIEVIEKLLKDKSTLVAGSVVMAFEEVCPDRIDLIHKNYRKLCNLLVDVEEWGQVVIIHMLTRYARTQFVSPWKEGDELEDNGKNFYESDDDQKEKTDKKKKPYTMDPDHRLLIRNTKPLLQSRNAAVVMAVAQLYWHISPKSEAGIISKSLVRLLRSNREVQYIVLQNIATMSIQRKGMFEPYLKSFYVRSTDPTMIKTLKLEILTNLANEANISTLLREFQTYVKSQDKQFAAATIQTIGRCATNILEVTDTCLNGLVCLLSNRDEIVVAESVVVIKKLLQMQPAQHGEIIKHMAKLLDSITVPVARASILWLIGENCERVPKIAPDVLRKMAKSFTSEDDLVKLQILNLGAKLYLTNSKQTKLLTQYILNLGKYDQNYDIRDRTRFIRQLIVPNVKSGALSKYAKKIFLAQKPAPLLESPFKDRDHFQLGTLSHTLNIKATGYLELSNWPEVAPDPSVRNVEVIELAKEWTPAGKAKQENSAKKFYSESEEEEDSSDSSSDSESESGSESGEQGESGEEGDSNEDSSEDSSSEQDSESGRESGLENKRTAKRNSKAKGKSDSEDGEKENEKSKTSDSSNDESSSIEDSSSDSESESEPESESESRRVTKEKEKKTKQDRTPLTKDVSLLDLDDFNPVSTPVALPTPALSPSLMADLEGLHLSTSSSVISVSTPAFVPTKTHVLLHRMSGKGLAAHYFFPRQPCIFGDKMVSIQITLNNTTDRKIENIHIGEKKLPIGMKMHVFNPIDSLEPEGSITVSMGIDFCDSTQTASFQLCTKDDCFNVNIQPPVGELLLPVAMSEKDFKKEQGVLTGMNETSAVIIAAPQNFTPSVIFQKVVNVANVGAVPSGQDNIHRFAAKTVHSGSLMLVTVELKEGSTAQLIINTEKTVIGSVLLRELKPVLSQG

SEQ ID NO: 139996 - DNA, 3285 bp, Artificial Sequence
  derived and/or modified sequence
atgagcagcaactccttcccatataacgagcaatccggcggcggcgaagccactgagctcggacaggaagccacgagcacgatcagtccaagtggcgcttttggccttttctcatccgatctaaagaagaacgaggacttgaagcagatgctcgagagtaataaggattcagccaaattggacgccatgaagcgtatcgtcggaatgattgccaagggaaagaacgccagtgaattgtttccagccgtggttaaaaacgtcgccagcaagaacatcgaaataaaaaaactggtgtacgtttacttagtgcggtatgccgaagagcagcaggatcttgctttacttagtatctccacattccagagggctctgaaggatccaaatcagcttattagggcatcggctctccgggttctgtcttctattcgagtgcccatcattgtgccaatcatgatgctcgctatcaaggaagctagtgccgacctgtccccatacgtgaggaaaaacgccgcccatgcaatccagaagctttactccctggacccagaacagaaagagatgttgattgaagtgatcgagaagctgttaaaagacaaatctactctggtggcaggctctgtcgtgatggccttcgaagaggtgtgtccagacaggatcgatcttattcataagaactatcgaaagctttgtaatttgctggtagacgtagaggagtggggccaggtggtgatcattcacatgttgaccagatatgctaggacacagttcgtcagcccttggaaggagggtgatgaactggaggacaacgggaaaaacttctacgaatcagatgatgatcagaaagagaagaccgacaagaaaaagaaaccttatacgatggacccagaccacaggctgctgatccgaaacaccaagcctctgctgcagagtagaaatgccgccgtcgtgatggctgtcgcccagctctattggcatatctcaccaaaatcagaagcgggcatcatcagcaagtctcttgtgcggttactccgttcaaatagagaggttcaatatatcgtgttacagaatattgccaccatgtcgattcagaggaagggaatgtttgaaccttacctcaaatccttttatgtgagaagcacagatcctacgatgatcaagactctgaaactggaaatccttaccaacctagctaatgaggctaacatcagcactcttctgcgcgagtttcaaacatacgttaaatcacaggacaagcaattcgctgcagctaccatccagactataggtcggtgtgcaacaaatatccttgaagtgaccgacacctgcttaaacggattagtgtgtcttttatctaaccgggatgaaattgtggttgccgagagtgtggttgtgatcaaaaagcttctgcaaatgcaaccagctcaacacggcgagataatcaagcacatggccaaactcctggactctattacagtacccgtggcaagggcgagcatcctatggcttatcggtgaaaattgcgaacgagtgcctaagattgctccagacgtgctgagaaagatggccaagagcttcacttccgaagacgaccttgtgaagctgcagatcctcaatctaggtgccaagctctacctgaccaattcaaagcagactaaactactcacgcagtatatattaaaccttgggaagtacgatcagaattatgatatccgcgacaggacccgattcattaggcagttgatcgtacccaacgtgaaaagtggtgctctttcgaagtacgccaaaaaaatcttcctggcacagaaaccagcccccctcctggagtctccatttaaagatagagatcactttcaattgggcacgctttcacacactcttaatataaaagcaactggctacctcgagctgtcaaattggcccgaggtggcccccgacccctccgttcgcaacgtggaggtcattgaactggccaaagaatggacacctgcaggcaaggctaagcaagaaaattctgccaagaaattctattctgaatcggaggaggaagaagattcttccgacagcagctcggacagcgagagtgagtctgggagcgaatctggtgaacagggcgaaagcggcgaagaaggagacagcaacgaggattcatctgaggactcaagtagtgagcaggactctgagagcgggcgtgagagtggactcgagaacaaacgtaccgcgaaaagaaattccaaggccaaagggaaaagcgattccgaggatggggagaaagaaaatgagaagtccaaaacttctgactcaagcaatgatgaatccagttctatagaggattccagcagtgattcagagtcggaatccgaacccgaatcagagtcagagtcaaggcgtgtgacgaaagagaaggagaagaaaaccaagcaggacaggacacccctcaccaaggatgtgtcccttctggatctagacgactttaaccctgtaagtacacctgttgctctccccacacccgccctatctcccagccttatggccgacctggaaggcctgcatctgtccacttcctcctccgtgatctcagtgagcacgcccgcatttgtgccaactaaaactcacgtgttactgcaccggatgagtggcaaaggattggccgcccactatttttttccaaggcagccgtgcatttttggtgacaagatggtttctatccaaattacactgaacaatacaacagatcggaagatcgagaatatacatattggcgagaagaaattacccattggaatgaaaatgcacgtgttcaatcccattgatagcctcgagccggaaggctcaatcacagtgtccatgggcattgatttctgcgactccacccagacagcatccttccagctctgcacgaaagacgactgctttaacgtaaacatccaaccacctgtgggcgaactgctccttccagtggcaatgagtgagaaagatttcaaaaaggaacagggggtcttgactgggatgaatgagacctcagcggtgataatcgctgcaccccagaatttcaccccatccgtgatatttcaaaaggtggtgaatgtggccaacgtcggcgccgttccaagcgggcaggacaacatccatcgcttcgccgctaaaactgttcattctggtagcctaatgctcgtgacagtggaactgaaagaagggagcacagcccaattgatcattaacactgaaaaaaccgtcattggatctgtactgctgcgggaactgaaaccagtgctgtctcaaggatag

SEQ ID NO: 139997 - DNA, 2403 bp, Artificial Sequence
  derived and/or modified sequence
atgtcttcgaatagctttccgtacaacgagcaaagcggaggtggagaggccaccgagctgggccaggaggcaactagtaccatttccccttcaggtgcattcgggcttttttccagtgatctcaagaaaaacgaagatcttaaacagatgctggaatccaacaaagactcagctaaactggatgcaatgaagcgtatagttgggatgattgcgaaggggaaaaacgctagcgagttgttccctgccgtggtgaaaaatgtggcctctaaaaacattgaaattaaaaagctggtctacgtgtatctagttcggtacgcagaggagcagcaggacttagccctcttgtcgatttccacattccaaagagccctgaaggaccctaatcagttaatccgagcgagcgctctccgcgtactatcatccatccgggtgcccattattgtgcccatcatgatgcttgccatcaaagaggcctccgcagacctcagcccttatgtgcggaagaatgctgcccatgctatccagaagttgtactccctggatccggagcagaaggagatgctcatagaagtgatagagaagctccttaaagataagtctaccctcgtggccggctcagtggtcatggccttcgaggaggtttgtccagataggattgacctgatccataaaaactacaggaagttgtgtaatctactggttgatgttgaggaatggggacaggtggttataatccatatgttgaccagatacgcccgtacccaatttgtgtctccctggaaagaaggggacgaactggaagacaacggcaaaaacttctatgaaagtgacgacgaccaaaaagagaagaccgataaaaagaaaaagccgtatactatggatcctgaccaccgactgctcatccgaaatactaaacctctgctgcagtcgagaaacgctgcagtcgtcatggcagtcgcgcagctgtactggcacatcagccccaagagcgaggccggtatcatttccaagagcctcgtccgcctgttacgctctaatagggaggtgcagtacatcgtcctgcagaacatcgcgactatgtcaatccagcgcaaggggatgttcgagccttacctgaaatcgttttatgtgcgatctaccgatccgactatgatcaagacgttgaagttggaaatactcacaaatttggcgaatgaagcaaacattagtactttactgcgcgaattccaaacttacgttaagtcacaggataaacaattcgcggcggctacaatccaaaccatcggacggtgcgctaccaacattctggaggttactgatacctgccttaacggactagtgtgtttgctgtcaaaccgtgacgaaattgtggtggcagaatcggtcgtcgtgattaagaagttgcttcaaatgcagcccgcgcagcacggagaaatcatcaaacacatggccaagctgcttgactcaatcaccgtgccagttgcccgggctagcatcttgtggcttattggagagaattgcgagcgtgtacctaagatcgcaccagacgtgctgcgaaagatggcaaaaagtttcacgtctgaagatgacctggtcaaactgcaaatactcaatctaggtgccaagctctacctgaccaattcaaagcagaccaaactgttgacccagtacatcttaaaccttggcaagtatgaccagaattacgatatccgggatcgcacaaggttcatcaggcaactgattgtacctaacgtgaagagtggggcgctaagcaagtatgccaaaaagatcttccttgctcagaaacctgccccgttgttagaaagccctttcaaggaccgggatcacttccagttagggacgctcagccacacgttgaatataaaggctacaggatatttggagctgagcaattggcccgaggtggctccagatccctccgtcagaaacgtggaggtgatcgaattagccaaggagtggaccccggccggcaaggcaaaacaagagaacagcgcgaagaagttttactcagaatctgaagaggaagaggatagttccgactcctcctccgatagcgagagtgagtccggaagcgaatcgggcgaacagggagagtccggcgaagagggggacagtaatgaggacagctccgaggattcctccagcgagcaggattccgagtcagggcgggaatcaggattagagaacaagagaacagccaagcggaacagtaaggctaaaggtaagtccgatagcgaggatggcgaaaaagaaaatgaaaagtctaagacaagcgactcgtctaatgacgagtctagctctatagaggactcttcatctgactctgaatccgaatccgagccagaaagcgagagcgaaagccgtagagtgaccaaggagtag

SEQ ID NO: 139998 - DNA, 5838 bp, Artificial Sequence
  derived and/or modified sequence
actgcgcatgcgcagggggtggactgccaggtcggctcagggagccgtgacgagtccggaagcgcctgcgcgcgctcctccgtacgagaactagttttgttccgtgccctctggactggaaccttttggagagaacccccggcaggaccaaccccgcacccgccagcaccgcggcaatgtccagcaatagttttccttacaatgagcagtccggaggaggggaggcgacggagctgggtcaggaggcgacctcaaccatttccccctcgggggccttcggcctctttagcagcgatttgaagaagaatgaagatctaaagcaaatgttagagagcaacaaagattctgctaaactggatgctatgaagcggattgttgggatgattgcaaaagggaaaaatgcatctgaactgtttcctgctgttgtgaagaatgtggccagtaaaaatattgagatcaagaagttggtatatgtttacctggttcgatatgctgaagaacagcaggatcttgcactcctgtccataagcacttttcagcgagctctgaaggacccaaaccaactaattcgtgcaagcgctttgagagttctgtcaagtattagagtgccaattattgtacctatcatgatgcttgctattaaggaagcttctgctgacttatcaccatatgttaggaagaatgcagcccatgcaatacaaaaattatacagccttgatccagagcagaaggaaatgttaattgaagtaattgaaaaacttctgaaagataaaagcacattggtagctggcagtgttgtgatggcttttgaagaagtatgcccggacagaatagatctgattcataaaaattaccgcaagctatgtaacttactagtggatgttgaagagtgggggcaggttgtcataatccacatgctaactcgatatgctcggacacagtttgtcagcccttggaaagagggtgatgaattagaagacaatggaaagaatttctacgaatctgatgatgatcagaaggaaaagactgacaaaaagaagaagccgtatactatggatccagatcatagactcttaattagaaatacaaagcctttgcttcagagcaggaatgctgcggtggttatggcagttgctcagctgtattggcacatatcaccaaaatctgaagctggcataatttctaaatcactagtgcgtttacttcgtagcaatagggaggtgcagtatattgtcctacaaaatatagcaactatgtcaattcaaagaaaggggatgtttgaaccttatctgaagagtttctatgttaggtcaactgatccaactatgatcaagacactgaagcttgaaattttgacaaacttggcaaatgaagccaacatatcaactcttcttcgagaatttcagacctatgtgaaaagccaggataaacaatttgcagcagccactattcagactataggcagatgtgcaaccaacatcttggaagtcactgacacgtgcctcaatggcttggtctgtctgctgtccaacagggatgaaatagttgttgctgaaagtgtggttgttataaagaaattactgcaaatgcaacctgcacaacatggtgaaattattaaacatatggccaaactcctggacagtatcactgttcctgttgctagagcaagtattctttggctaattggagaaaactgtgaacgagttcctaaaattgcccctgatgttttgaggaagatggctaaaagcttcactagtgaagatgatctggtaaaactgcagatattaaatctgggagcaaaattgtatttaaccaactccaaacagacaaaattgcttacccagtacatattaaatctcggcaagtatgatcaaaactacgacatcagagaccgtacaagatttattaggcagcttattgttccgaatgtaaagagtggagctttaagtaaatatgccaaaaaaatattcctagcacaaaagcctgcaccactgcttgagtctccttttaaagatagagatcatttccagcttggcaccttatctcatactctcaacattaaagctactgggtacctggaattatctaattggccagaggtggcgcccgacccatcagttcgaaatgtagaagtaatagagttggcaaaagaatggaccccagcaggaaaagcaaagcaagagaattctgctaagaagttttattctgaatctgaggaagaggaggactcttctgatagtagcagtgacagtgagagtgaatctggaagtgaaagtggagaacaaggcgaaagtggggaggaaggagacagcaatgaggacagcagtgaggactcctccagtgagcaggacagtgagagtggacgggagtcaggcctagaaaacaaaagaacagccaagaggaactcaaaagccaaaggaaaaagtgattctgaagatggggagaaggaaaatgaaaaatctaaaacttcagattcttcaaatgacgaatctagttcaatagaagacagttcttccgattctgaatcagagtcagaacctgaaagtgaatctgaatccagaagagtcactaaggagaaagaaaagaaaacaaagcaagatagaactcctcttaccaaagatgtttcacttctagatctggatgattttaacccagtatccactccagttgcacttcccacaccagctctttctccaagtttgatggctgatcttgaaggtttacacttgtcaacttcctcttcagtcatcagtgtcagtactcctgcatttgtaccaacgaaaactcacgtgctgcttcatcgaatgagtggaaaaggactagctgcccattatttctttccaagacagccttgcatttttggtgataagatggtctctatacaaataacactgaataacactactgatcgaaagatagaaaatatccacataggggaaaaaaaacttcctataggcatgaaaatgcatgtttttaatccaatagactctcttgagcctgagggatccattacagtttcaatgggtattgacttttgtgattctactcagactgccagtttccagttgtgtaccaaggatgattgcttcaatgttaatattcagccacctgttggagaactgcttttacctgtggccatgtcagagaaagattttaagaaagagcaaggagtgctaacaggaatgaatgaaacttctgctgtaatcattgctgcaccacagaatttcactccctctgtgatctttcagaaggttgtaaatgtagccaatgtaggtgcagtcccttctggccaggataatatacacaggtttgcagctaaaactgtgcacagtgggtcattgatgctagtcacagtggaactgaaggaaggctctacagcccagcttatcataaacactgagaaaactgtgattggctctgttctgctgcgggaactgaagcctgtcctgtctcaggggtaacctgcttacatctggactttagaatctggcacacaacaaaagtgcctggcatccactactgctgcctttcatttataataatagcccttccatctggcagtgggggtagaatacactcttgacattcttgtctcctgctttagaatgctagtgtgtatctatcatgtatgcaatactttccccctttttgctttgctaaccaaagagcatatattttactgtcagttgtctcaactcttgaatccatgtggcgttttctctgtcctgctgcttcttttggcctcctcgttttccttctctttttcgacaatggtagacatgaatgagatatttaaagttcattggaaatcttcttccctacagcagtaagcaaaaattagcaaagagatagtctaaatggcctctcagcttggtatgtgaaaatgagatcacatactttttaaatccaaatacaaaagcatagtctctgcaagattttgttctttgaatttcttgatattgtaattgattattgataactgtcatcatgaaattatctctcaataataagataaataaactagcatatgaatcatatttgtctttgcatttttaatgagaaactattaataatcctgaagttcatatgctaaagttttcttattttaaagcaagtattttgagtgttacattatgcagagaagcaatgtggtttagttagcgaaagaaaaaccacttccaaaccaagtaaattttctacttatagtttactccaaggaaaaaaaattggtgtatttaataacaaaaacaaaaatcttcatattgcaaaataaacatcttctaggtagttttgatctattagtagatatctgattatgtggcctgctgaataaattctttgaatctcatttttccttatgcccaactttggaaactaactagcataaacttatagaaatgtttaaaactagttatatgatcaacctattagcatcttttcctagagtatttgttttatttgctaccttaagttactgttttcaaggttgttctataatcagagaacttttctaatactttcgtacctttttaaaaccagctgaaattttacttcctttttgaagcaaggtaatggactttcaggtagtataagctactcagttctttttgtatagagccacatacataatgatttttaaaaagtaaaaaggaagtgactgtacattgcttgaagcattataggaaggctgaaaagaaaagaatggaattttcttggaacatacatattgaaaagaacaaaacagagtcgaaaaattatttaaattttcaagctggtgggatgacaagagtaaacaaaattgttaaattttcctgctccagaaagaaatatagccctgaatctccgggaagagaatgtacagaagtgcaatgtacagaagccacgtgtacattttgtgccaattccgtaccatgtgtacattctgtaccattctgtaccaatgtatggaagccacgagttccacttccctctggagcctgggcgctgtggtaacacacccaaaagcccctttgtaatcgcaggtcgttggcatttccatattagccttattgctcagagcttcataactttgaattttaagtcaataactttttgaaatgtcagacagaatttgacaggtttaatacctgttttctgaggaagaaaaaaaaattatatccatgctgtcttcaggcagagggaaagtgcatgttgtgattgagaaaggtcttatttttccttaaattaggacactcatctttaaaagatagttcacacatttgtatttttttaaactaaggaaatttaattagggctttacttttgactaagttatttttggctgctaacttttaaaattatggtaaatcaataatataatgtagtatgaatcagtgaacagtatgtatcgattgtaatgtgcgctaccagttgaaaccattttaacactagtagcttaatatcattaaaatgtttttcacgtaaaacagaaaaacgaccaaagccccaagttaaaggtttggttttttttcttttgtggtgtggtgattcagagttccttgcctcatatttcctttaactttgtcataatccatgattatctttaaattgttccattgagtcgagttagtcaatgttgaattcttaattctagctatattttttcattttaatgttcacttaatgggacattttatgtacaccaatcttgaagaatggctctcatagtatatttcagactaagcctcatttttgatatcacaatacatttgctttatttattatgagagtttttttattctaaagagactgtaacaatgcatttctcaaattaaaatactgtatacttgtccttctcga

SEQ ID NO: 139999 - DNA, 2527 bp, Artificial Sequence
  derived and/or modified sequence
acgagtccggaagcgcctgcgcgcgctcctccgtacgagaactagttttgttccgtgccctctggactggaaccttttggagagaacccccggcaggaccaaccccgcacccgccagcaccgcggcaatgtccagcaatagttttccttacaatgagcagtccggaggaggggaggcgacggagctgggtcaggaggcgacctcaaccatttccccctcgggggccttcggcctctttagcagcgatttgaagaagaatgaagatctaaagcaaatgttagagagcaacaaagattctgctaaactggatgctatgaagcggattgttgggatgattgcaaaagggaaaaatgcatctgaactgtttcctgctgttgtgaagaatgtggccagtaaaaatattgagatcaagaagttggtatatgtttacctggttcgatatgctgaagaacagcaggatcttgcactcctgtccataagcacttttcagcgagctctgaaggacccaaaccaactaattcgtgcaagcgctttgagagttctgtcaagtattagagtgccaattattgtacctatcatgatgcttgctattaaggaagcttctgctgacttatcaccatatgttaggaagaatgcagcccatgcaatacaaaaattatacagccttgatccagagcagaaggaaatgttaattgaagtaattgaaaaacttctgaaagataaaagcacattggtagctggcagtgttgtgatggcttttgaagaagtatgcccggacagaatagatctgattcataaaaattaccgcaagctatgtaacttactagtggatgttgaagagtgggggcaggttgtcataatccacatgctaactcgatatgctcggacacagtttgtcagcccttggaaagagggtgatgaattagaagacaatggaaagaatttctacgaatctgatgatgatcagaaggaaaagactgacaaaaagaagaagccgtatactatggatccagatcatagactcttaattagaaatacaaagcctttgcttcagagcaggaatgctgcggtggttatggcagttgctcagctgtattggcacatatcaccaaaatctgaagctggcataatttctaaatcactagtgcgtttacttcgtagcaatagggaggtgcagtatattgtcctacaaaatatagcaactatgtcaattcaaagaaaggggatgtttgaaccttatctgaagagtttctatgttaggtcaactgatccaactatgatcaagacactgaagcttgaaattttgacaaacttggcaaatgaagccaacatatcaactcttcttcgagaatttcagacctatgtgaaaagccaggataaacaatttgcagcagccactattcagactataggcagatgtgcaaccaacatcttggaagtcactgacacgtgcctcaatggcttggtctgtctgctgtccaacagggatgaaatagttgttgctgaaagtgtggttgttataaagaaattactgcaaatgcaacctgcacaacatggtgaaattattaaacatatggccaaactcctggacagtatcactgttcctgttgctagagcaagtattctttggctaattggagaaaactgtgaacgagttcctaaaattgcccctgatgttttgaggaagatggctaaaagcttcactagtgaagatgatctggtaaaactgcagatattaaatctgggagcaaaattgtatttaaccaactccaaacagacaaaattgcttacccagtacatattaaatctcggcaagtatgatcaaaactacgacatcagagaccgtacaagatttattaggcagcttattgttccgaatgtaaagagtggagctttaagtaaatatgccaaaaaaatattcctagcacaaaagcctgcaccactgcttgagtctccttttaaagatagagatcatttccagcttggcaccttatctcatactctcaacattaaagctactgggtacctggaattatctaattggccagaggtggcgcccgacccatcagttcgaaatgtagaagtaatagagttggcaaaagaatggaccccagcaggaaaagcaaagcaagagaattctgctaagaagttttattctgaatctgaggaagaggaggactcttctgatagtagcagtgacagtgagagtgaatctggaagtgaaagtggagaacaaggcgaaagtggggaggaaggagacagcaatgaggacagcagtgaggactcctccagtgagcaggacagtgagagtggacgggagtcaggcctagaaaacaaaagaacagccaagaggaactcaaaagccaaaggaaaaagtgattctgaagatggggagaaggaaaatgaaaaatctaaaacttcagattcttcaaatgacgaatctagttcaatagaagacagttcttccgattctgaatcagagtcagaacctgaaagtgaatctgaatccagaagagtcactaaggaa

SEQ ID NO: 140000 - DNA, 3285 bp, Artificial Sequence
  derived and/or modified sequence
atgagcagcaacagcttcccctacaatgagcagagcggcggcggggaggccacagagctgggccaggaggccaccagcaccatcagccccagcggggccttcggcctcttcagcagtgacctgaagaagaatgaagacctgaagcagatgctggagagcaacaaggacagcgccaagctggatgccatgaagagaattgtgggcatgattgccaagggcaagaatgccagcgagctgtttcctgctgtggtgaagaatgtggccagcaagaacatcgagatcaagaagctggtgtatgtgtacctggtgcgctatgcagaggagcagcaggacctggccctgctgagcatcagcaccttccagagggccctgaaggaccccaaccagctgatccgggccagcgccctgcgggtgctgagcagcatccgggtgcccatcatcgtgcccatcatgatgctggccatcaaggaggccagcgctgacctgagcccctacgtgaggaagaatgctgcccacgccatccagaagctgtacagcctggaccctgagcagaaggagatgctgattgaagtcatcgagaagctgctgaaggacaagagcaccctggtggccggctctgtggtgatggcctttgaggaggtgtgcccagacagaattgacctgatccacaagaactacaggaagctgtgcaacctgctggtggatgtggaggagtggggccaggtggtgatcatccacatgctgaccaggtatgcccggacccagtttgtgagcccctggaaggagggagatgagctggaggacaatggcaagaacttctatgaaagtgatgatgaccagaaggagaagacagacaagaagaagaagccctacaccatggaccctgaccaccggctgctgatccggaacaccaagcccctgctgcagagcagaaatgctgctgtggtgatggctgtggcccagctgtactggcacatcagccccaagtctgaggccggcatcatcagcaagagcctggtgcggctgctgcggagcaaccgggaggtgcagtacatcgtgctgcagaacatcgccaccatgagcatccagaggaagggcatgtttgagccctacctgaagagcttctacgtgcgcagcacagaccccaccatgatcaagaccctgaagctggagatcctgaccaacctggccaatgaggccaacatcagcaccctgctgcgggagttccagacctacgtgaagagccaggacaagcagtttgctgctgccaccatccagaccatcggccgctgtgccaccaacatcctggaggtgacagacacctgcctgaatggcctggtgtgcctgctgagcaacagagatgagatcgtggtggccgagagcgtggtggtgatcaagaagctgctgcagatgcagcctgcccagcacggggagatcatcaagcacatggccaagctgctggacagcatcaccgtgcctgtggcccgggccagcatcctgtggctgattggagagaactgtgagcgggtgcccaagatcgccccagatgtgctgaggaagatggccaagagcttcaccagtgaagatgacctggtgaagctgcagatcctgaacctgggcgccaagctgtacctgaccaacagcaagcagaccaagctgctgacccagtacatcctgaacctgggcaagtatgaccagaactatgacatccgggacaggacccgcttcatccggcagctgattgtgcccaacgtgaagagcggggccctgagcaaatatgccaagaagatcttcctggcccagaagccagcccccctgctggagagccccttcaaggaccgggaccacttccagctgggcaccctgagccacaccctgaacatcaaggccaccggctacctggagctgagcaactggccagaggtggccccagaccccagcgtgagaaatgtggaggtgattgagctggccaaggagtggaccccagctgggaaggccaagcaggagaacagcgccaagaagttctacagcgagagcgaggaggaggaggacagcagtgacagcagcagtgacagcgagagcgagagcggcagcgagagcggggagcagggcgagagcggggaggagggggacagcaatgaagacagcagcgaggacagcagcagcgagcaggacagcgagagcggccgggagagcggcctggagaacaagaggacagccaagaggaacagcaaggccaagggcaagagtgacagtgaagatggagagaaggaaaatgagaagagcaagaccagtgacagcagcaatgatgagagcagcagcattgaggacagcagcagtgacagcgagagcgagagcgagcctgagagcgagagcgagagcagaagagtgaccaaggagaaggagaagaagaccaagcaggacaggacccccctgaccaaggatgtgtccctgctggacctggatgacttcaaccctgtgtccacccctgtggccctgcccaccccagccctgagccccagcctgatggctgacctggagggcctgcacctgagcaccagcagcagcgtcatctctgtgtccaccccagcctttgtgcccaccaagacccacgtgctgctgcacaggatgtctgggaagggcctggccgcccactacttcttcccccggcagccctgcatctttggagacaagatggtgtccatccagatcaccctgaacaacaccacagacaggaagattgagaacatccacatcggggagaagaagctgcccatcggcatgaagatgcacgtgttcaaccccatcgacagcctggagcctgagggcagcatcaccgtgtccatgggcatcgacttctgtgacagcacccagacagccagcttccagctgtgcaccaaggatgactgcttcaacgtgaacatccagccccctgtgggggagctgctgctgcctgtggccatgtctgagaaggacttcaagaaggagcagggcgtgctgaccggcatgaatgagaccagcgctgtgatcatcgccgccccccagaacttcacccccagcgtcatcttccagaaggtggtgaatgtggccaacgtgggcgctgtgcccagcggccaggacaacatccacagatttgctgccaagacagtgcacagcggcagcctgatgctggtgacagtggagctgaaggagggcagcacagcccagctgatcatcaacacagagaagacagtgattggctctgtgctgctgcgggagctgaagcctgtgctgagccagggctag

SEQ ID NO: 140001 - DNA, 2403 bp, Artificial Sequence
  derived and/or modified sequence
atgagcagcaacagcttcccctacaatgagcagagcggcggcggggaggccacagagctgggccaggaggccaccagcaccatcagccccagcggggccttcggcctcttcagcagtgacctgaagaagaatgaagacctgaagcagatgctggagagcaacaaggacagcgccaagctggatgccatgaagagaattgtgggcatgattgccaagggcaagaatgccagcgagctgtttcctgctgtggtgaagaatgtggccagcaagaacatcgagatcaagaagctggtgtatgtgtacctggtgcgctatgcagaggagcagcaggacctggccctgctgagcatcagcaccttccagagggccctgaaggaccccaaccagctgatccgggccagcgccctgcgggtgctgagcagcatccgggtgcccatcatcgtgcccatcatgatgctggccatcaaggaggccagcgctgacctgagcccctacgtgaggaagaatgctgcccacgccatccagaagctgtacagcctggaccctgagcagaaggagatgctgattgaagtcatcgagaagctgctgaaggacaagagcaccctggtggccggctctgtggtgatggcctttgaggaggtgtgcccagacagaattgacctgatccacaagaactacaggaagctgtgcaacctgctggtggatgtggaggagtggggccaggtggtgatcatccacatgctgaccaggtatgcccggacccagtttgtgagcccctggaaggagggagatgagctggaggacaatggcaagaacttctatgaaagtgatgatgaccagaaggagaagacagacaagaagaagaagccctacaccatggaccctgaccaccggctgctgatccggaacaccaagcccctgctgcagagcagaaatgctgctgtggtgatggctgtggcccagctgtactggcacatcagccccaagtctgaggccggcatcatcagcaagagcctggtgcggctgctgcggagcaaccgggaggtgcagtacatcgtgctgcagaacatcgccaccatgagcatccagaggaagggcatgtttgagccctacctgaagagcttctacgtgcgcagcacagaccccaccatgatcaagaccctgaagctggagatcctgaccaacctggccaatgaggccaacatcagcaccctgctgcgggagttccagacctacgtgaagagccaggacaagcagtttgctgctgccaccatccagaccatcggccgctgtgccaccaacatcctggaggtgacagacacctgcctgaatggcctggtgtgcctgctgagcaacagagatgagatcgtggtggccgagagcgtggtggtgatcaagaagctgctgcagatgcagcctgcccagcacggggagatcatcaagcacatggccaagctgctggacagcatcaccgtgcctgtggcccgggccagcatcctgtggctgattggagagaactgtgagcgggtgcccaagatcgccccagatgtgctgaggaagatggccaagagcttcaccagtgaagatgacctggtgaagctgcagatcctgaacctgggcgccaagctgtacctgaccaacagcaagcagaccaagctgctgacccagtacatcctgaacctgggcaagtatgaccagaactatgacatccgggacaggacccgcttcatccggcagctgattgtgcccaacgtgaagagcggggccctgagcaaatatgccaagaagatcttcctggcccagaagccagcccccctgctggagagccccttcaaggaccgggaccacttccagctgggcaccctgagccacaccctgaacatcaaggccaccggctacctggagctgagcaactggccagaggtggccccagaccccagcgtgagaaatgtggaggtgattgagctggccaaggagtggaccccagctgggaaggccaagcaggagaacagcgccaagaagttctacagcgagagcgaggaggaggaggacagcagtgacagcagcagtgacagcgagagcgagagcggcagcgagagcggggagcagggcgagagcggggaggagggggacagcaatgaagacagcagcgaggacagcagcagcgagcaggacagcgagagcggccgggagagcggcctggagaacaagaggacagccaagaggaacagcaaggccaagggcaagagtgacagtgaagatggagagaaggaaaatgagaagagcaagaccagtgacagcagcaatgatgagagcagcagcattgaggacagcagcagtgacagcgagagcgagagcgagcctgagagcgagagcgagagcagaagagtgaccaaggagtag

SEQ ID NO: 140002 - DNA, 3285 bp, Artificial Sequence
  derived and/or modified sequence
atgagcagcaacagcttcccctacaacgagcagagcggcggcggcgaggcaactgagctcggtcaagaggcgacgtccaccatctccccctcgggcgcattcggcttatttagttccgatctcaaaaagaatgaggatctgaagcagatgctagaaagtaacaaagactctgcgaagctggatgccatgaagcgaattgtgggaatgatagccaagggaaagaatgcgtctgaactgttcccggctgtcgtcaaaaatgttgctagcaaaaatatcgagattaagaaacttgtctatgtctatctggttagatacgccgaagagcagcaggaccttgcactcctaagtatctccacttttcagagagccctcaaagatcccaaccaactcattcgggcatctgctctgagagtgctgagttctattagggtgccaattatcgttccaataatgatgttagccataaaggaggcctctgcagaccttagtccttatgtgaggaagaacgcagcacacgcaatccagaagctctatagcctcgatcccgaacagaaggaaatgttaatcgaggtgatcgaaaaacttttgaaggacaagtcaaccctcgtcgctggaagcgtagttatggcattcgaggaagtctgccccgacaggattgacctgatccacaaaaattatcggaagctctgcaacttgctggtcgatgtggaggaatggggacaggtggtaattattcatatgctgactagatacgctcggacccaatttgtttcgccttggaaagagggtgacgagttggaagacaatggcaaaaatttctacgagtccgatgacgaccagaaagaaaagaccgacaagaagaaaaaaccttatactatggatcccgatcatagactacttataaggaataccaagccactgctgcagtctcggaatgcagcagtcgtgatggcggtggcccagttatattggcacatatccccgaagagtgaagctggcatcatttcaaagtcactagtacggttattgcgcagtaatagagaagtccaatatattgtgttgcagaacatcgcaaccatgagcattcagcgcaaggggatgttcgaaccatacttgaagtctttctacgtccgttcaaccgaccccacgatgatcaagactctcaaactcgaaatccttactaatttggccaatgaggccaatatttctacccttctcagagagttccaaacatatgttaaaagtcaggataagcagtttgcagccgctaccattcaaacaattggacggtgcgctacaaatatcctcgaggttacagacacttgcctgaacggcctggtctgcctcctctctaaccgggatgaaatagtcgtcgctgaaagcgtggtcgtgattaagaaactgctgcagatgcagccggcgcagcacggagagataatcaaacacatggctaagctgctagattcaatcacagttccagtggcccgcgccagcattctgtggcttattggtgaaaattgcgagagagtacccaagatagccccagacgtgctgcggaagatggctaaaagttttacatcagaggacgaccttgtcaaattacagatactgaatctcggggctaaactgtatctgaccaacagcaagcagaccaagctactgacacaatacatcctgaatcttggcaaatatgaccagaattatgacataagagaccgcacaaggtttatacgccagctgatagtgcccaacgtgaagagcggtgccttgagcaaatacgccaagaaaattttcttagctcagaaaccagcacctctcttagaatctccttttaaagatcgcgaccatttccagcttggaaccctgtcgcacacactgaacataaaggccactgggtatctcgagctatcaaattggcctgaggttgctccagatccaagcgtgcggaatgttgaggtcatagagctggctaaagaatggaccccagcaggaaaggctaagcaggaaaatagcgctaagaaattttacagtgagagcgaggaggaggaagactcaagcgactcgtcatcagattctgaatctgagagcggcagcgagtcaggggaacagggggagagcggagaagaaggcgattcaaatgaggacagctccgaagattcttcttctgagcaagacagtgagagtggacgagagtccggactcgagaataaacggactgctaaacgtaacagcaaggcaaagggcaagtccgattcagaggacggtgagaaggaaaacgaaaagtccaaaacctcagattcctctaacgacgagtcctcctctatagaggactcatcatctgacagcgaatcagagagcgagcctgaatctgaaagcgagagccggcgcgtgaccaaggagaaagaaaaaaaaactaaacaagatcgtacacccctgactaaggacgttagcctactggatttagacgacttcaaccctgtctccacccctgtggccttgccaactccagccctctcccccagcctcatggccgatcttgaagggttacaccttagcacaagttccagtgtgatctcagtttctaccccagcctttgtgcccacgaaaacccatgtgctgttacacagaatgagcggaaagggactggcagctcattatttctttccccggcagccgtgcatatttggcgacaagatggtttctatccagattactctgaataacaccacagacagaaagattgagaacattcacatcggggagaaaaaattgccaatcggcatgaaaatgcacgtattcaaccctatcgactctctagaaccggaggggtcaatcaccgtttccatgggcatagacttttgtgactctacccaaactgccagtttccaactatgtacaaaggacgactgttttaatgtaaatattcagccccctgtaggcgagctcttgctccccgtcgccatgtctgagaaggatttcaaaaaggaacagggcgtgcttactgggatgaacgagacttcagcagtgattattgctgctccccagaacttcacaccaagtgtcatttttcagaaggtcgtcaatgtggctaacgttggggctgtaccctctgggcaggacaacattcatagattcgccgctaagacagtccattcgggcagccttatgctcgtgacggtggagctcaaggaagggtcgacagcgcagctgatcataaacaccgagaaaactgtaatcggcagcgtcctgctgcgcgaactcaagccagtgctgtctcaagggtag

SEQ ID NO: 140003 - DNA, 2403 bp, Artificial Sequence
  derived and/or modified sequence
atgagcagcaacagcttcccctacaacgagcagagcggcggcggcgaggctacggaactgggccaggaggcaactagtactatctcgccttctggggccttcggcttatttagcagcgacctcaagaaaaatgaggatctgaagcagatgttggagtccaataaagactcggcaaagctggatgcgatgaagcgcattgtcgggatgattgccaaggggaagaatgcctccgagctctttcctgccgtggtgaagaatgtcgcctcaaaaaacattgaaattaagaagctggtctatgtctacttggttcgatatgctgaggagcagcaggacctggcactactttctatcagtaccttccagagggctttaaaagaccccaatcagctgattcgcgcaagtgcactgcgggttctctccagcatccgggtgcccatcatcgtgcccatcatgatgctcgcaatcaaagaagcttcggccgacctttcgccatatgtccgtaaaaatgccgcacacgctatccaaaaactttattctctcgatcctgagcagaaagaaatgctgatcgaggtaatagagaagctgctcaaggacaaaagcacactggttgctggcagcgttgtgatggcctttgaggaagtatgcccagaccgcatcgatttaatccataaaaactataggaaactgtgcaatctgctagtcgacgtcgaagaatggggtcaggtcgtaatcatacatatgctaacccgctacgccaggacacaattcgtgtcaccttggaaggaaggtgacgagttagaggacaacggcaagaatttttacgaatccgacgacgatcagaaggaaaaaaccgacaagaaaaaaaaaccttataccatggaccccgaccaccggctcctgattagaaatacaaaaccgctcctccagtctagaaacgcggccgtcgtaatggcagtggcacagctgtattggcacatctcccccaagtccgaggccggaataatctctaagtccttggtacggctcttgcgctctaacagagaggttcagtatattgtgctgcaaaatatcgcaactatgtctatccaacggaagggcatgttcgagccatatctgaagtctttctacgtgcgttcaaccgatccgactatgatcaagacattaaagctcgaaatcctcaccaacctagctaacgaagccaacatcagcactctgctgcgtgagttccagacctacgtcaaaagccaggacaagcagtttgcagccgccaccatccagaccattggccggtgcgccaccaacatcttagaagtgaccgatacatgcctaaatggactggtttgcctgctctcgaacagggacgagattgtggttgctgagagcgtggttgtcatcaagaaactgctccagatgcagcccgctcagcacggagagattattaaacatatggctaaattgctggactctattactgtgccagtggctcgcgcctctatactgtggttgattggagaaaactgtgagagggtaccgaaaatagcaccagacgtgttgcggaaaatggcaaagtcatttactagtgaagatgacctggttaaactgcaaattttaaacctcggcgccaagttatacctgacaaactctaagcaaacaaagctgctgacccaatacattctgaacctcggaaaatatgatcaaaattacgacatcagagaccgcacaaggtttattaggcagttaattgtccccaatgtgaagtcgggagcactgagcaaatatgccaaaaagattttcctggcacaaaagcccgccccacttcttgagagtccatttaaggatcgggatcattttcagctggggactctctcgcatactctgaacattaaggctacaggctacctggagctatcgaactggcctgaggtggctccagacccatccgtgcgtaacgtggaggtcatagagcttgctaaagagtggacacccgccgggaaagccaaacaagagaacagtgcaaagaagttctacagtgagagcgaagaagaggaagactcctccgacagctcttctgactccgagagcgaatctggatctgagagcggcgagcagggagaatcaggcgaggagggtgactctaacgaagacagcagtgaggattcatcgagcgaacaagattccgagtctggccgtgagtccgggcttgagaacaaacgaacagcaaaacggaatagcaaggccaaagggaagagtgactctgaagatggcgagaaggaaaacgaaaagtccaaaacatccgacagttctaatgatgagagttctagcattgaagattccagcagtgactcagaatccgaaagcgaacccgaatccgagagcgaaagtcgaagagtcaccaaagagtag

SEQ ID NO: 140004 - DNA, 3285 bp, Artificial Sequence
  derived and/or modified sequence
atgtctagtaacagcttcccctacaacgagcagtcagggggtggtgaagcgactgagctcgggcaggaagcgacgagcaccatttcaccctcgggcgcattcggactgtttagctctgatttgaaaaagaacgaggatctcaaacagatgctcgaaagcaacaaggactctgccaaactagacgctatgaaaaggatcgttggcatgatcgccaagggcaaaaacgcctctgagctgtttcctgctgtggtgaagaacgtcgcttccaagaacattgagattaaaaaactggtttatgtctacctggtacgctacgctgaggagcaacaggacctggcgttattgagcatttccacctttcagcgagcccttaaagaccccaaccagctgatccgagcatctgccctaagggtcttgagcagcatcagagtcccaatcatcgtgcccataatgatgctggccatcaaagaagcctcagccgatctctctccttacgtccgtaaaaacgcagcccacgctatccaaaaactctacagtctcgaccccgaacaaaaagaaatgcttatcgaagtcatcgagaagctgttgaaggataagagcactttggtcgccggtagcgtggtcatggcattcgaagaagtgtgcccagaccggatcgatctcatccacaagaattaccggaagctgtgtaatctactggtggatgtggaagagtggggccaagtggtcatcattcatatgcttacgcgctacgcacgtactcagtttgtgagcccctggaaagaaggggacgagcttgaagataacgggaagaacttctatgagtccgatgatgatcaaaaagagaagaccgacaaaaagaaaaagccttatactatggacccagaccacaggttgttgatccggaatacaaagccccttctccagtcacggaatgcggctgtggtgatggctgtggcccagctttactggcacatcagccccaagagcgaggcaggaattataagcaagagtttggtgcgtctcctgagaagcaaccgagaggtgcagtacatagtactccagaacatagctacaatgagcattcagagaaaaggcatgttcgaaccctaccttaaatctttttacgtccggagcacagatccaaccatgatcaagactttgaaactcgagattctgactaatctcgcaaatgaggctaacatttctaccctgctaagggagttccagacctatgtgaagtcacaggataagcagttcgctgcagccactatccaaactatcgggaggtgtgccaccaacatcctcgaggtgacagacacgtgcctcaacggcctagtttgtttgctgtcaaaccgagatgaaatagttgtagcggagtccgtggtagtgatcaaaaagctcctccagatgcagccggcacagcatggagaaataatcaaacacatggccaagctgcttgactcaatcaccgtccctgtggctcgcgcatccatcctgtggctgatcggagagaactgcgagcgggtgccaaagattgcacccgacgtactgcgcaagatggcaaagagcttcacaagcgaagatgacttagtgaaactccagattctcaacttgggcgctaagctttacctgaccaattccaagcagaccaaactgttaactcagtatatactgaacctgggaaagtacgatcaaaactacgatatacgagatcgaacccgctttataagacaactaattgttcctaacgtgaagtccggagctctttccaagtacgctaagaaaatttttttagcgcagaaacccgcacctctgctggagagcccctttaaagatcgtgaccactttcagctcgggactctttctcacactctgaacatcaaggcaacgggttacctcgaactctctaattggcccgaggtggcccctgatccatctgtgaggaatgtggaggttattgaactggctaaggaatggaccccagccggtaaagctaaacaggagaatagtgcaaaaaagttctacagcgaatctgaggaagaggaagattcatcagatagctcttcggactccgaaagtgaaagtggctctgagtcaggggaacaaggagagtcgggagaagagggcgatagcaatgaggatagttccgaggactcatccagtgagcaagactccgagagtgggcgagagagcggccttgaaaataagcggacggccaagaggaatagcaaggcaaagggcaagtctgactccgaagatggggagaaagaaaacgaaaaaagcaagaccagtgattccagtaatgacgaatctagctctatcgaggattcatcaagcgattcggaaagtgagtctgagcctgagagcgagagcgaatcgcgaagagttacaaaggagaaggagaaaaagaccaagcaggaccgaacccctctgaccaaagacgtatctctgctggatctggatgacttcaatcctgttagcacaccagtggccctcccgaccccagcactaagcccatccctcatggccgacctggaaggcctgcacctgtcaacttcatcaagtgtgattagcgtttctacaccggcattcgtccccaccaagacccatgtactgcttcacaggatgagtgggaaaggcctggctgctcactatttttttccacgacagccgtgcatcttcggagacaagatggtcagcattcagattacgctgaacaataccacagatcgcaagatcgagaatatacacatcggagagaagaagctccctattggaatgaaaatgcacgtgtttaatcccatagactcactcgaacctgaaggttctataaccgtgtccatgggtatcgatttctgcgactctactcagacggcctcatttcagttgtgtaccaaagacgattgttttaacgtgaatattcagcccccagtgggagagctgttgctgccagttgcaatgtctgaaaaggattttaagaaggaacagggtgtgttaacaggtatgaatgagaccagtgcagttataatagctgcccctcagaactttactccgagtgttatttttcagaaggtggtaaacgtggccaacgttggggcagtgcctagcgggcaggataacatccataggttcgccgcaaaaactgtgcattctggatcgctgatgctggtcactgtcgagttaaaagagggatcaaccgcgcagctcataatcaacaccgaaaaaacggttattggcagcgtgttgctcagggagttgaagcccgtcctgtcccagggttag

SEQ ID NO: 140005 - DNA, 2403 bp, Artificial Sequence
  derived and/or modified sequence
atgtcaagcaattcatttccttacaatgaacagtcgggcggaggagaggcaacggaacttggtcaagaggccactagcacgattagcccaagcggcgctttcggtctcttcagcagcgacctcaagaagaacgaggatcttaagcagatgctggagtctaacaaagattcagccaagcttgatgcaatgaagcgcatagtagggatgattgctaagggcaaaaatgcatctgagcttttccctgcagtcgtgaagaacgtcgcatcgaagaacattgaaataaaaaagctggtctacgtttacctcgtcagatatgctgaagagcagcaggacctcgcgctgctctccatcagcactttccagcgcgctctcaaggaccccaatcagctgattagagcctctgccctgagggtgctgtcgtcaattcgagtcccaatcatcgtgcccataatgatgctggcgattaaagaagcttctgccgatttatccccatatgtcagaaagaatgcggctcacgctatccagaagctctacagcctggatcctgaacaaaaagaaatgctcatcgaggtgatagagaagttgctgaaagacaagtctaccttggtagctggaagtgtcgtgatggcatttgaggaggtttgtccagatagaatcgatttgattcacaaaaactatagaaagttgtgcaatttgctcgttgatgtcgaggagtggggacaagtcgtgatcatccacatgcttactcgctacgccaggacccagtttgtatcaccgtggaaagaaggtgatgagctcgaagataacggtaaaaatttttacgaaagtgatgacgatcagaaggagaaaaccgacaaaaaaaaaaaaccctatacaatggatccagaccataggctgctgatcaggaataccaagccgctgctccagagcaggaatgctgcagtcgtgatggcggttgcacagctatattggcacatttcacccaagtccgaggcaggcattatcagtaaatcactcgtgagactgctaaggtccaatcgcgaggttcaatacatcgtcctacaaaatattgctacaatgtccatccagcggaaggggatgttcgagccttatctgaagagcttctatgtcagatccactgacccgactatgatcaagacattgaagctcgagatcctaaccaatctggcaaacgaggcaaacatcagcacgttgctgcgtgagtttcaaacctacgtcaagtcacaggacaaacagtttgcggcagccacaattcaaacgattggaagatgcgctaccaacatcctggaagttaccgatacgtgtttgaatgggttggtttgtctcttgagcaatcgcgacgagattgtggtcgcagaaagcgtcgtcgtcatcaagaagctgttgcagatgcaaccagctcagcatggggaaatcatcaagcacatggcaaaactcctagactctattacggttccagtggccagggccagcatactgtggcttataggcgaaaattgtgagagagtcccaaagattgcccctgacgtattgaggaagatggccaagagctttacatccgaagatgatcttgtgaaacttcaaatcctcaatcttggcgcaaaattgtatttaacaaattccaaacagactaagctgctgacccagtacatcttaaacctcggaaaatacgaccaaaattatgatatccgcgatcgaacccgcttcatacgtcagcttattgtgcccaacgtgaaatccggtgccctgagcaagtacgccaagaaaatctttcttgctcagaaaccagcccctttattagaaagccctttcaaggatcgcgatcactttcagctgggaacgttgtcccacacactgaacataaaagcgactggatatctggagctttcaaattggcccgaggtcgccccagacccctcagtgcggaacgtagaggtgattgagctagctaaggagtggacacccgctggcaaagccaagcaagaaaattctgcgaaaaagttttatagcgaaagtgaggaggaagaggatagcagcgactcaagctccgatagcgaatccgagtcaggctcggaatctggggagcagggagagagcggggaagagggggattcaaatgaggattcatccgaagatagttcttccgaacaggactcagagagcggaagggagtctggtctggaaaacaaaaggaccgccaaacgcaactcgaaagcaaagggaaaatctgatagcgaggacggggagaaagagaatgagaagagtaagacaagcgactcctccaacgacgagtcctcgtcaatcgaagactcctcatctgatagcgagagtgagtcagaaccagaatccgaatcagaaagccgacgggtgaccaaagaatag

SEQ ID NO: 140006 - DNA, 3285 bp, Artificial Sequence
  derived and/or modified sequence
atgagcagcaacagcttcccctacaacgagcagagcggcggcggcgaggccaccgagctgggccaggaggccaccagcaccatcagccccagcggcgccttcggcctgttcagcagcgacctgaagaagaacgaggacctgaagcagatgctggagagcaacaaggacagcgccaagctggacgccatgaagagaatcgtgggcatgatcgccaagggcaagaacgccagcgagctgttccccgccgtggtgaagaacgtggccagcaagaacatcgagatcaagaagctggtgtacgtgtacctggtgagatacgccgaggagcagcaggacctggccctgctgagcatcagcaccttccagagagccctgaaggaccccaaccagctgatcagagccagcgccctgagagtgctgagcagcatcagagtgcccatcatcgtgcccatcatgatgctggccatcaaggaggccagcgccgacctgagcccctacgtgagaaagaacgccgcccacgccatccagaagctgtacagcctggaccccgagcagaaggagatgctgatcgaggtgatcgagaagctgctgaaggacaagagcaccctggtggccggcagcgtggtgatggccttcgaggaggtgtgccccgacagaatcgacctgatccacaagaactacagaaagctgtgcaacctgctggtggacgtggaggagtggggccaggtggtgatcatccacatgctgaccagatacgccagaacccagttcgtgagcccctggaaggagggcgacgagctggaggacaacggcaagaacttctacgagagcgacgacgaccagaaggagaagaccgacaagaagaagaagccctacaccatggaccccgaccacagactgctgatcagaaacaccaagcccctgctgcagagcagaaacgccgccgtggtgatggccgtggcccagctgtactggcacatcagccccaagagcgaggccggcatcatcagcaagagcctggtgagactgctgagaagcaacagagaggtgcagtacatcgtgctgcagaacatcgccaccatgagcatccagagaaagggcatgttcgagccctacctgaagagcttctacgtgagaagcaccgaccccaccatgatcaagaccctgaagctggagatcctgaccaacctggccaacgaggccaacatcagcaccctgctgagagagttccagacctacgtgaagagccaggacaagcagttcgccgccgccaccatccagaccatcggcagatgcgccaccaacatcctggaggtgaccgacacctgcctgaacggcctggtgtgcctgctgagcaacagagacgagatcgtggtggccgagagcgtggtggtgatcaagaagctgctgcagatgcagcccgcccagcacggcgagatcatcaagcacatggccaagctgctggacagcatcaccgtgcccgtggccagagccagcatcctgtggctgatcggcgagaactgcgagagagtgcccaagatcgcccccgacgtgctgagaaagatggccaagagcttcaccagcgaggacgacctggtgaagctgcagatcctgaacctgggcgccaagctgtacctgaccaacagcaagcagaccaagctgctgacccagtacatcctgaacctgggcaagtacgaccagaactacgacatcagagacagaaccagattcatcagacagctgatcgtgcccaacgtgaagagcggcgccctgagcaagtacgccaagaagatcttcctggcccagaagcccgcccccctgctggagagccccttcaaggacagagaccacttccagctgggcaccctgagccacaccctgaacatcaaggccaccggctacctggagctgagcaactggcccgaggtggcccccgaccccagcgtgagaaacgtggaggtgatcgagctggccaaggagtggacccccgccggcaaggccaagcaggagaacagcgccaagaagttctacagcgagagcgaggaggaggaggacagcagcgacagcagcagcgacagcgagagcgagagcggcagcgagagcggcgagcagggcgagagcggcgaggagggcgacagcaacgaggacagcagcgaggacagcagcagcgagcaggacagcgagagcggcagagagagcggcctggagaacaagagaaccgccaagagaaacagcaaggccaagggcaagagcgacagcgaggacggcgagaaggagaacgagaagagcaagaccagcgacagcagcaacgacgagagcagcagcatcgaggacagcagcagcgacagcgagagcgagagcgagcccgagagcgagagcgagagcagaagagtgaccaaggagaaggagaagaagaccaagcaggacagaacccccctgaccaaggacgtgagcctgctggacctggacgacttcaaccccgtgagcacccccgtggccctgcccacccccgccctgagccccagcctgatggccgacctggagggcctgcacctgagcaccagcagcagcgtgatcagcgtgagcacccccgccttcgtgcccaccaagacccacgtgctgctgcacagaatgagcggcaagggcctggccgcccactacttcttccccagacagccctgcatcttcggcgacaagatggtgagcatccagatcaccctgaacaacaccaccgacagaaagatcgagaacatccacatcggcgagaagaagctgcccatcggcatgaagatgcacgtgttcaaccccatcgacagcctggagcccgagggcagcatcaccgtgagcatgggcatcgacttctgcgacagcacccagaccgccagcttccagctgtgcaccaaggacgactgcttcaacgtgaacatccagccccccgtgggcgagctgctgctgcccgtggccatgagcgagaaggacttcaagaaggagcagggcgtgctgaccggcatgaacgagaccagcgccgtgatcatcgccgccccccagaacttcacccccagcgtgatcttccagaaggtggtgaacgtggccaacgtgggcgccgtgcccagcggccaggacaacatccacagattcgccgccaagaccgtgcacagcggcagcctgatgctggtgaccgtggagctgaaggagggcagcaccgcccagctgatcatcaacaccgagaagaccgtgatcggcagcgtgctgctgagagagctgaagcccgtgctgagccagggctag

SEQ ID NO: 140007 - DNA, 2403 bp, Artificial Sequence
  derived and/or modified sequence
atgagcagcaacagcttcccctacaacgagcagagcggcggcggcgaggccaccgagctgggccaggaggccaccagcaccatcagccccagcggcgccttcggcctgttcagcagcgacctgaagaagaacgaggacctgaagcagatgctggagagcaacaaggacagcgccaagctggacgccatgaagagaatcgtgggcatgatcgccaagggcaagaacgccagcgagctgttccccgccgtggtgaagaacgtggccagcaagaacatcgagatcaagaagctggtgtacgtgtacctggtgagatacgccgaggagcagcaggacctggccctgctgagcatcagcaccttccagagagccctgaaggaccccaaccagctgatcagagccagcgccctgagagtgctgagcagcatcagagtgcccatcatcgtgcccatcatgatgctggccatcaaggaggccagcgccgacctgagcccctacgtgagaaagaacgccgcccacgccatccagaagctgtacagcctggaccccgagcagaaggagatgctgatcgaggtgatcgagaagctgctgaaggacaagagcaccctggtggccggcagcgtggtgatggccttcgaggaggtgtgccccgacagaatcgacctgatccacaagaactacagaaagctgtgcaacctgctggtggacgtggaggagtggggccaggtggtgatcatccacatgctgaccagatacgccagaacccagttcgtgagcccctggaaggagggcgacgagctggaggacaacggcaagaacttctacgagagcgacgacgaccagaaggagaagaccgacaagaagaagaagccctacaccatggaccccgaccacagactgctgatcagaaacaccaagcccctgctgcagagcagaaacgccgccgtggtgatggccgtggcccagctgtactggcacatcagccccaagagcgaggccggcatcatcagcaagagcctggtgagactgctgagaagcaacagagaggtgcagtacatcgtgctgcagaacatcgccaccatgagcatccagagaaagggcatgttcgagccctacctgaagagcttctacgtgagaagcaccgaccccaccatgatcaagaccctgaagctggagatcctgaccaacctggccaacgaggccaacatcagcaccctgctgagagagttccagacctacgtgaagagccaggacaagcagttcgccgccgccaccatccagaccatcggcagatgcgccaccaacatcctggaggtgaccgacacctgcctgaacggcctggtgtgcctgctgagcaacagagacgagatcgtggtggccgagagcgtggtggtgatcaagaagctgctgcagatgcagcccgcccagcacggcgagatcatcaagcacatggccaagctgctggacagcatcaccgtgcccgtggccagagccagcatcctgtggctgatcggcgagaactgcgagagagtgcccaagatcgcccccgacgtgctgagaaagatggccaagagcttcaccagcgaggacgacctggtgaagctgcagatcctgaacctgggcgccaagctgtacctgaccaacagcaagcagaccaagctgctgacccagtacatcctgaacctgggcaagtacgaccagaactacgacatcagagacagaaccagattcatcagacagctgatcgtgcccaacgtgaagagcggcgccctgagcaagtacgccaagaagatcttcctggcccagaagcccgcccccctgctggagagccccttcaaggacagagaccacttccagctgggcaccctgagccacaccctgaacatcaaggccaccggctacctggagctgagcaactggcccgaggtggcccccgaccccagcgtgagaaacgtggaggtgatcgagctggccaaggagtggacccccgccggcaaggccaagcaggagaacagcgccaagaagttctacagcgagagcgaggaggaggaggacagcagcgacagcagcagcgacagcgagagcgagagcggcagcgagagcggcgagcagggcgagagcggcgaggagggcgacagcaacgaggacagcagcgaggacagcagcagcgagcaggacagcgagagcggcagagagagcggcctggagaacaagagaaccgccaagagaaacagcaaggccaagggcaagagcgacagcgaggacggcgagaaggagaacgagaagagcaagaccagcgacagcagcaacgacgagagcagcagcatcgaggacagcagcagcgacagcgagagcgagagcgagcccgagagcgagagcgagagcagaagagtgaccaaggagtag

SEQ ID NO: 140008 - protein, 400 aa, Artificial Sequence
  derived and/or modified sequence
MTTKNLETKVTVTSSPIRGAGDGMETEEPPKSVEVTSGVQSRKHHSLQSPWKKAVPSESPGVLQLGKMLTEKAMEVKAVRILVPKAAITHDIPNKNTKVKSLGHHKGEFLGQSEGVIEPNKELSEVKNVLEKLKNSERRLLQDKEGLSNQLRVQTEVNRELKKLLVASVGDDLQYHFERLAREKNQLILENEALGRNTAQLSEQLERMSIQCDVWRSKFLASRVMADELTNSRAALQRQNRDAHGAIQDLLSEREQFRQEMIATQKLLEELLVSLQWGREQTYSPSVQPHSTAELALTNHKLAKAVNSHLLGNVGINNQKKIPSTVEFCSTPAEKMAETVLRILDPVTCKESSPDNPFFESSPTTLLATKKNIGRFHPYTRYENITFNCCNHCRGELIAL

SEQ ID NO: 140009 - DNA, 2344 bp, Artificial Sequence
  derived and/or modified sequence
agttttacttccgtttgtttaacagctggcccggaagtttaagtgaatatgcggcttgggctccaaaagttgctgtacggtattttattttaaagtagaaatctgtccgcttttcacttacggaggccttacagtgtgtgttctgtgttacttgagtttatacgcactgcagaatttgtttaccctgctcttttggaaacgtattccggaagcgaaaccctgagtaatcggaagtggttaggagtgagagagctgctggatatgcggagggactgggcgggtcggcttccgaatggaagaggtctgtgagaagttaacctggtgataccgatccgaagagcctatcaagtgaagccccctgaaatacggagaataagaatcttagaggttgttcagcagaagtcttggagtgcattttcagtggttaaggtgaaaaaatgactactaaaaatttagaaaccaaagtcaccgttacttcatccccaatccgaggagcaggagatggaatggaaactgaggaaccacctaaatctgttgaagttacctccggagtccaatctagaaagcatcatagtcttcagagtccatggaagaaagcagttccatcagagagcccaggagttcttcagctagggaaaatgctcactgaaaaagcaatggaagttaaagctgtaagaatattagttcccaaagctgctataactcatgatatccccaacaaaaatacaaaggttaagtctctgggacatcataaaggagaattccttggtcagtcagagggagttatagaacctaataaggaactctcagaggtaaagaatgtattggaaaagctcaagaattctgaaagaaggttactacaggacaaagaaggtctttcaaaccagctccgtgtacagacagaggtaaatcgtgagttaaaaaagttactggtggcttctgttggggatgatcttcagtatcactttgaacgtctagcccgtgagaaaaatcagcttattttagaaaatgaagccctaggtcgaaacacagctcagctttctgaacagttagaacgtatgtcaatacagtgtgatgtatggcgaagtaaattccttgcaagcagggtaatggcagatgagttaaccaactcaagagcagctttacagcgtcaaaaccgtgatgcacacggggctatacaagatctcctaagtgaacgggaacagtttcgtcaagaaatgatagctacccagaaattattggaggagctcttagtttccttgcaatggggaagagagcaaacttactcccctagtgtacaaccccacagcacagcagagctagcattaacaaatcacaagttggcaaaagcagtaaattctcatcttctgggaaatgttggcattaacaatcaaaaaaagattccatcaacagttgaattctgcagcaccccagctgagaaaatggctgaaacggttctaagaattttagatccagttacctgcaaagagagttcacctgataatccattttttgagtcttcaccaaccaccttacttgctacaaagaaaaatattggacgatttcatccctatactagatatgaaaatataactttcaattgctgcaatcactgccggggagaactgattgccctttaacagtcaatatgttggaggcatgctaagaataaacaactaaataactgtattagaaaaaaaagaaacttactaaatatcataatctgatgatatgtggtcctgaattggctactagtttaagcaaataaactgtaagtcatttatgggttagttggggaataaatggatatgggctggatattcggtaatatcattaatgaaaagcagattgcagaaatacagtatgatctcagtattttgaaattgtaaatacatgtacagacaaatacttagacagtatgcatactggtgttaacagtcacaatttctgggtgatgaaaatgtaacttgaaaccgctccatttctacaatgcacatttactgtttctgttataataaaagggtatgttagaaaaacaaaaaggaggctgggcatggtggctcatgcctctaatctcagcactttgggaggccaaggtgggcggatcacttgaggtctggagtttgagaccagcctgagcaacatggtgagaccccatctctacaaaaaaaatataaaaattagccaggtgtggtggtgcacacctgtggtcccagctacttgggaggctgaggtgggaaaatcacttgaacctgggagggtgaggttgcagtgagctgagatcatgccactgcactccagcctgggtgacaggaaaaaaaaaaaaaaaaaaaaaaaaaaaaaa

SEQ ID NO: 140010 - DNA, 1203 bp, Artificial Sequence
  derived and/or modified sequence
atgaccaccaagaacctggagaccaaggtgaccgtgaccagcagccccatcagaggcgccggcgacggcatggagaccgaggagccccccaagagcgtggaggtgaccagcggcgtgcagagcagaaagcaccacagcctgcagagcccctggaagaaggccgtgcccagcgagagccccggcgtgctgcagctgggcaagatgctgaccgagaaggccatggaggtgaaggccgtgagaatcctggtgcccaaggccgccatcacccacgacatccccaacaagaacaccaaggtgaagagcctgggccaccacaagggcgagttcctgggccagagcgagggcgtgatcgagcccaacaaggagctgagcgaggtgaagaacgtgctggagaagctgaagaacagcgagagaagactgctgcaggacaaggagggcctgagcaaccagctgagagtgcagaccgaggtgaacagagagctgaagaagctgctggtggccagcgtgggcgacgacctgcagtaccacttcgagagactggccagagagaagaaccagctgatcctggagaacgaggccctgggcagaaacaccgcccagctgagcgagcagctggagagaatgagcatccagtgcgacgtgtggagaagcaagttcctggccagcagagtgatggccgacgagctgaccaacagcagagccgccctgcagagacagaacagagacgcccacggcgccatccaggacctgctgagcgagagagagcagttcagacaggagatgatcgccacccagaagctgctggaggagctgctggtgagcctgcagtggggcagagagcagacctacagccccagcgtgcagccccacagcaccgccgagctggccctgaccaaccacaagctggccaaggccgtgaacagccacctgctgggcaacgtgggcatcaacaaccagaagaagatccccagcaccgtggagttctgcagcacccccgccgagaagatggccgagaccgtgctgagaatcctggaccccgtgacctgcaaggagagcagccccgacaaccccttcttcgagagcagccccaccaccctgctggccaccaagaagaacatcggcagattccacccctacaccagatacgagaacatcaccttcaactgctgcaaccactgcagaggcgagctgatcgccctgtag

SEQ ID NO: 140011 - DNA, 2300 bp, Artificial Sequence
  derived and/or modified sequence
ttgtttaacagctggcccggaagtttaagtgaatatgcggcttgggctccaaaagttgctgtacggtattttattttaaagtagaaatctgtccgcttttcacttacggaggccttacagtgtgtgttctgtgttacttgagtttatacgcactgcagaatttgtttaccctgctcttttggaaacgtattccggaagcgaaaccctgagtaatcggaagtggttaggagtgagagagctgctggatatgcggagggactgggcgggtcggcttccgaatggaagaggtctgtgagaagttaacctggtgataccgatccgaagagcctatcaagtgaagccccctgaaatacggagaataagaatcttagaggttgttcagcagaagtcttggagtgcattttcagtggttaaggtgaaaaaatgactactaaaaatttagaaaccaaagtcaccgttacttcatccccaatccgaggagcaggagatggaatggaaactgaggaaccacctaaatctgttgaagttacctccggagtccaatctagaaagcatcatagtcttcagagtccatggaagaaagcagttccatcagagagcccaggagttcttcagctagggaaaatgctcactgaaaaagcaatggaagttaaagctgtaagaatattagttcccaaagctgctataactcatgatatccccaacaaaaatacaaaggttaagtctctgggacatcataaaggagaattccttggtcagtcagagggagttatagaacctaataaggaactctcagaggtaaagaatgtattggaaaagctcaagaattctgaaagaaggttactacaggacaaagaaggtctttcaaaccagctccgtgtacagacagaggtaaatcgtgagttaaaaaagttactggtggcttctgttggggatgatcttcagtatcactttgaacgtctagcccgtgagaaaaatcagcttattttagaaaatgaagccctaggtcgaaacacagctcagctttctgaacagttagaacgtatgtcaatacagtgtgatgtatggcgaagtaaattccttgcaagcagggtaatggcagatgagttaaccaactcaagagcagctttacagcgtcaaaaccgtgatgcacacggggctatacaagatctcctaagtgaacgggaacagtttcgtcaagaaatgatagctacccagaaattattggaggagctcttagtttccttgcaatggggaagagagcaaacttactcccctagtgtacaaccccacagcacagcagagctagcattaacaaatcacaagttggcaaaagcagtaaattctcatcttctgggaaatgttggcattaacaatcaaaaaaagattccatcaacagttgaattctgcagcaccccagctgagaaaatggctgaaacggttctaagaattttagatccagttacctgcaaagagagttcacctgataatccattttttgagtcttcaccaaccaccttacttgctacaaagaaaaatattggacgatttcatccctatactagatatgaaaatataactttcaattgctgcaatcactgccggggagaactgattgccctttaacagtcaatatgttggaggcatgctaagaataaacaactaaataactgtattagaaaaaaaagaaacttactaaatatcataatctgatgatatgtggtcctgaattggctactagtttaagcaaataaactgtaagtcatttatgggttagttggggaataaatggatatgggctggatattcggtaatatcattaatgaaaagcagattgcagaaatacagtatgatctcagtattttgaaattgtaaatacatgtacagacaaatacttagacagtatgcatactggtgttaacagtcacaatttctgggtgatgaaaatgtaacttgaaaccgctccatttctacaatgcacatttactgtttctgttataataaaagggtatgttagaaaaacaaaaaggaggctgggcatggtggctcatgcctctaatctcagcactttgggaggccaaggtgggcggatcacttgaggtctggagtttgagaccagcctgagcaacatggtgagaccccatctctacaaaaaaaatataaaaattagccaggtgtggtggtgcacacctgtggtcccagctacttgggaggctgaggtgggaaaatcacttgaacctgggagggtgaggttgcagtgagctgagatcatgccactgcactccagcctgggtgacagg

SEQ ID NO: 140012 - DNA, 1203 bp, Artificial Sequence
  derived and/or modified sequence
atgaccacgaagaatctggaaacaaaagtgaccgtcacttcctcccctatccgaggggccggtgacggaatggaaactgaagaaccaccgaagtcagttgaagtgacaagcggagtgcagagtcgtaaacatcactccctgcagagcccatggaaaaaggccgtgcccagtgagtctcccggagtgttgcagctcggtaaaatgctgactgagaaggccatggaagtgaaagccgtccggatcctcgtcccgaaggccgccatcactcacgacatacccaacaagaacaccaaggtcaagagtctaggtcatcacaagggggagtttttgggacagagcgagggagtcattgaaccaaacaaagaattgtcggaagtaaaaaacgtgctggagaaacttaagaactccgagcgtcggttactgcaggacaaggaaggactatccaatcagctgcgcgtgcagaccgaagtgaacagggaactcaagaagctgctggttgcaagtgttggcgacgatctccaatatcatttcgagcgactagcccgggagaagaaccagctaatcctggaaaacgaggcactgggacggaacactgctcagctgagcgagcagctggaacggatgtctatacaatgcgacgtatggaggagtaagttcttggcctcacgcgtcatggccgatgagttgacaaactcccgggcagcactgcagaggcagaaccgagatgctcacggtgccatccaggaccttctgagcgaaagggagcagttccgccaagagatgatcgcaacacagaagcttctggaagagttgctggtaagcctgcagtggggccgagaacaaacatattcccccagcgttcagcctcactccacagctgagttggcgctcactaatcataagttagcaaaagcagtgaattcccatcttctcggcaacgttggtatcaacaaccagaagaagataccatccactgtggagttctgtagtacaccagctgaaaaaatggcggagacagttcttcgtatcctggacccagtcacatgcaaggagtcgtctccggataatccctttttcgaatcgagccccactaccctcctggccactaagaagaacattgggcgattccacccctatacacggtatgaaaacattacctttaactgttgcaaccactgcaggggcgagttgatcgccctctag

SEQ ID NO: 140013 - DNA, 1203 bp, Artificial Sequence
  derived and/or modified sequence
atgacgactaagaatctggagaccaaggttactgtgacttcctctccgatccggggcgctggcgacggcatggagaccgaagaaccgcctaaaagtgtggaggtcacaagtggcgtgcagtctcgaaaacatcattcccttcagtcaccatggaaaaaggctgttccttctgaatcccccggggtcctgcagctgggcaagatgttgacagaaaaggccatggaagtgaaagctgtgaggatattggtcccaaaggcagcaatcactcacgacattcctaataagaatacaaaggtcaaatctctcggccatcataagggggaattcctcgggcagtccgaaggggtgattgaacctaacaaagagctttcggaagtcaagaatgtcctggagaagctgaaaaacagcgagcgcagactgctgcaggataaggaaggactctctaaccagctgcgggtgcagacagaagtcaaccgcgagctgaaaaagctcctcgtcgcttctgtgggcgacgatctccagtaccacttcgagcggctggcacgggagaagaatcagctgatcctggaaaacgaagccttgggccgcaacacagcccagctctccgagcagctggagagaatgagcatccaatgtgacgtctggcgcagtaagttcctagcaagtcgcgtgatggccgacgaactgaccaattcccgcgctgccttgcaaagacaaaacagggacgcccacggagctatccaggatctgctttctgaacgggagcagtttcggcaagagatgatcgcgactcagaagttgctggaagagttgttggtatccctgcagtgggggagggagcagacctacagtccgtccgtgcaaccccacagcaccgcggagctcgcactgacaaaccacaagttggccaaagccgttaattctcacctgctgggaaacgtaggcatcaacaaccagaaaaagatcccaagtactgtggaattctgttccacgcctgctgagaagatggctgaaactgtcctgagaattctggaccctgttacctgcaaggagagctcgccagataacccgtttttcgagtcatcccctactaccctcctagcgacaaagaagaatatcggccgcttccacccctataccaggtatgagaatataaccttcaattgctgcaatcactgtagaggcgaactgatagcattatag

SEQ ID NO: 140014 - DNA, 2749 bp, Artificial Sequence
  derived and/or modified sequence
ttgtttaacagctggcccggaagtttaagtgaatatgcggcttgggctccaaaagttgctgtacggtattttattttaaagtagaaatctgtccgcttttcacttacggaggccttacagtgtgtgttctgtgttacttgagtttatacgcactgcagaatttgtttaccctgctcttttggaaacgtattccggaagcgaaaccctgagtaatcggaagtggttaggagtgagagagctgctggatatgcggagggactgggcgggtcggcttccgaatggaagaggtctgtgagaagttaacctggtgataccgatccgaagagcctatcaagtgaagccccctgaaatacggagaataagaatcttagaggttgttcagcagaagtcttggagtgcattttcagtggttaaggtgaaaaaatgactactaaaaatttagaaaccaaagtcaccgttacttcatccccaatccgaggagcaggagatggaatggaaactgaggaaccacctaaatctgttgaagttacctccggagtccaatctagaaagcatcatagtcttcagagtccatggaagaaagcagttccatcagagagcccaggagttcttcagctagggaaaatgctcactgaaaaagcaatggaagttaaagctgtaagaatattagttcccaaagctgctataactcatgatatccccaacaaaaatacaaaggttaagtctctgggacatcataaaggagaattccttggtcagtcagagggagttatagaacctaataaggaactctcagaggtaaagaatgtattggaaaagctcaagaattctgaaagaaggttactacaggacaaagaaggtctttcaaaccagctccgtgtacagacagaggtaaatcgtgagttaaaaaagttactggtggcttctgttggggatgatcttcagtatcactttgaacgtctagcccgtgagaaaaatcagcttattttagaaaatgaagccctaggtcgaaacacagctcagctttctgaacagttagaacgtatgtcaatacagtgtgatgtatggcgaagtaaattccttgcaagcagggtaatggcagatgagttaaccaactcaagagcagctttacagcgtcaaaaccgtgatgcacacggggctatacaagatctcctaagtgaacgggaacagtttcgtcaagaaatgatagctacccagaaattattggaggagctcttagtttccttgcaatggggaagagagcaaacttactcccctagtgtacaaccccacagcacagcagagctagcattaacaaatcacaagttggcaaaagcagtaaattctcatcttctgggaaatgttggcattaacaatcaaaaaaagattccatcaacagttgaattctgcagcaccccagctgagaaaatggctgaaacggttctaagaattttagatccagttacctgcaaagagagttcacctgataatccattttttgagtcttcaccaaccaccttacttgctacaaagaaaaatattggacgatttcatccctatactagatatgaaaatataactttcaattgctgcaatcactgccggggagaactgattgccctttaacagtcaatatgttggaggcatgctaaggtacttccttattacccaagagtcattattatttgggagctggggttcttacaatgctagaaataatatcacttcctatttacataatgtatacacccaaagatattttatgtactagactccagattaccctttcttaataaatatctcagggtaaggaaagaaagaaactgtatagatatatttaaaatagagaatactttccaagcaatacatgatacttttcctaaaagactctaaaagaaaaagattctgtaactctcttttagcaccaaattattgtttatcttgctggatattttatatgaacagtgttaatttagatgcactaaagcaaaggtaggcaaactacaaccatgagtcaaacatggccacacccattcatgtgctattgtctaagctggttttgcactacaactgcagagttgaatagatgcagcagatcctttacagaaaaagttttctgacctcaattctaaagtaattgtagtagggagctggaggactttctttccctttatggtaattttttgagctacaaaagagccttgcagaaatgggtgaagggattaatcttttaaaaataaatgctatatattaggaaaataaaaaatattttagagccaagttaacaagtacttcagcaaaacatgctagttttatgcaggggattctgtattccaaatggatacaatccgacatatataaaagaaacagattcttaactattgactcttatttagcaaatgcaacagacaagaatatccaacttgatatttataaaaggtagactttttccaaaagtgtataagctcaaagaaaaaatgcaacctgtcaattaatatatactatgtaatatatattattgtgtatttatgattagccatcataaatgcccattgcttggcctttaagaataatcacaaaatatttatattaaattatacaaatttgttgcagaagtgcctgtgagagaaatcttcaaaagacaaacctggtcaaataataataattttaatgtcaatgattttttttgtctgactcatctgagttatatttagttttcaagtggcaataaatttatctaccttcttta

SEQ ID NO: 140015 - DNA, 1203 bp, Artificial Sequence
  derived and/or modified sequence
atgaccaccaagaacctggagaccaaggtgacagtgaccagcagccccatcagaggagctggagatggcatggagacagaggagccccccaagtctgtggaggtgaccagcggcgtgcagagcaggaagcaccacagcctgcagagcccctggaagaaggctgtgcccagcgagagccctggggtgctgcagctgggcaagatgctgacagagaaggccatggaggtgaaggctgtgcgcatcctggtgcccaaggccgccatcacccatgacatccccaacaagaacaccaaggtgaagagcctgggccaccacaagggggagttcctgggccagagcgagggcgtgattgagcccaacaaggagctgtctgaggtgaagaatgtgctggagaagctgaagaacagcgagcggcggctgctgcaggacaaggagggcctgagcaaccagctgcgggtgcagacagaggtgaaccgggagctgaagaagctgctggtggcctctgtgggagatgacctgcagtaccactttgagcggctggcccgggagaagaaccagctgatcctggagaatgaggccctgggcaggaacacagcccagctgtctgagcagctggagaggatgagcatccagtgtgatgtgtggaggagcaagttcctggccagccgggtgatggctgatgagctgaccaacagccgggccgccctgcagaggcagaacagagatgcccacggggccatccaggacctgctgtctgagcgggagcagttccggcaggagatgattgccacccagaagctgctggaggagctgctggtgtccctgcagtggggccgggagcagacctacagccccagcgtgcagccccacagcacagctgagctggccctgaccaaccacaagctggccaaggctgtgaacagccacctgctgggcaatgtgggcatcaacaaccagaagaagatccccagcacagtggagttctgcagcaccccagctgagaagatggccgagaccgtgctgcgcatcctggaccctgtgacctgcaaggagagcagcccagacaaccccttctttgagagcagccccaccaccctgctggccaccaagaagaacatcggccgcttccacccctacaccaggtatgagaacatcaccttcaactgctgcaaccactgccgcggggagctgattgccctgtag

SEQ ID NO: 140016 - DNA, 1203 bp, Artificial Sequence
  derived and/or modified sequence
atgaccaccaagaacctggagaccaaggtgaccgtgaccagcagccccattcgaggcgccggcgacggtatggagaccgaggagccacccaagtcagtggaggtgacttcgggtgtgcaatccagaaaacatcatagtttgcaaagtccctggaagaaagccgtgccgtctgagtcccccggagtcctccagctgggtaagatgctgacagagaaggcaatggaagtcaaggcagtgcggatcttggtgcctaaggctgctatcacccacgatatccccaataagaacaccaaagtgaaatcccttggccaccacaagggggaattcctaggacagtccgagggggtaattgagcctaacaaagagttgtcagaggtgaagaacgtgctggagaagcttaagaatagcgagagacggcttctccaggacaaggaggggctgtctaaccaactccgcgtccagacagaagtaaatagagaactgaagaaactcctggtggcctctgttggggacgatctccaataccatttcgaacggctggctcgggagaagaatcagcttattctagagaacgaagctctgggcaggaataccgcccaactctccgaacaactagagcggatgtccatccagtgcgacgtctggcgcagcaaatttttggccagccgagttatggcagatgagctgaccaactcacgagcagcgctgcaacggcagaaccgcgacgcacacggagctattcaggacctgctgagcgagagagagcagttcagacaggagatgattgcgacccagaagctcctagaagaactgttggtgtccctgcaatggggtcgggaacagacctactccccgtcagtgcagccccatagcaccgcagagcttgcactcaccaaccataagctagccaaagccgtcaacagccatctcctggggaacgttggaataaacaaccagaagaagattccaagcacagtggagttctgtagcaccccagcagagaaaatggctgaaacggtgctcaggatcctcgacccagttacttgcaaggaaagtagcccagacaaccctttcttcgagagctcccccacaacacttctggctaccaagaagaacatcggacgcttccatccctatacgaggtacgaaaatatcaccttcaactgttgtaatcactgtaggggagagttaatcgccttatag

SEQ ID NO: 140017 - DNA, 1203 bp, Artificial Sequence
  derived and/or modified sequence
atgaccaccaagaacctggagaccaaggtgaccgtgaccagcagccctattagaggtgctggggacggaatggagacggaggagccccccaagtcggtagaagtgacaagtggcgtccagtctcgcaaacaccacagcttacaatctccgtggaagaaagcggtgcccagtgagagtcctggggtcctgcagctcggcaagatgcttaccgagaaagcaatggaggtgaaggccgtgaggattcttgtccccaaggccgcgatcacacacgatatacccaacaaaaacactaaagtaaagagtctgggacatcacaagggagagtttctgggacagtcagagggcgtgattgaacccaacaaagagctgtcagaagttaagaacgtgcttgagaagctgaagaactcagaaagaagattgctgcaagataaagaaggtcttagtaatcagctccgcgtccagacagaagtgaatcgagaattaaaaaaactgctggttgcttcagtgggcgacgatcttcagtaccactttgagagattggccagggagaagaaccagctaatactcgagaatgaggctttggggcgcaatacagcgcagctgtccgaacagctggaacggatgagcattcagtgcgacgtgtggcggtccaaatttctagcaagtcgcgtgatggctgatgaactgaccaactcacgcgctgctctccagcgccaaaatcgcgatgcccacggagcaatccaagatttactctccgagcgtgaacagtttaggcaggagatgattgcaacccagaagcttctcgaagagctgcttgtgagcctccagtggggcagagagcaaacgtactcaccatctgttcagccacattctacagccgagctcgccctgacaaaccacaaactcgcaaaagccgttaactcccacttacttggaaacgttggcatcaataatcagaagaaaatcccatccaccgtggaattctgttcaactcccgccgagaaaatggccgaaactgtcctgaggatcctcgatccagtcacctgtaaggaaagcagcccagataatcctttctttgagtctagtcctactaccttgctggccactaagaagaatatagggcgcttccatccctatactagatacgaaaatatcacatttaactgctgtaaccactgccgaggagaactgattgccttgtag

SEQ ID NO: 140018 - DNA, 1203 bp, Artificial Sequence
  derived and/or modified sequence
atgacaactaaaaatctagaaacaaaagttacagtaacaagtagccccatccgtggagccggagatggtatggaaactgaagagccacccaagtctgttgaggtgaccagcggagtgcagtcaaggaagcaccacagtcttcagtccccttggaagaaggccgtcccttccgaatcccccggagtgctgcaactgggtaagatgcttactgaaaaagccatggaggtcaaggcggtgcgtattctcgtgccgaaagcagcaattacacacgacattcccaacaaaaacacaaaggttaagtctttaggccatcacaagggtgaatttctcggtcaatccgaaggtgtgattgagcctaacaaagaattgtccgaggttaagaatgtgctcgaaaaactgaaaaattcagaacggcgtcttctgcaagataaggaaggcctgtctaatcagctgagagtgcagacggaagtcaacagagaactgaaaaagctactggtggcctcagttggagacgacctgcagtaccactttgagcgccttgctcgggagaagaaccagctgatcctcgagaatgaggcgctaggtcgaaacactgcacagttatcagagcagctggagcggatgtcaattcaatgtgacgtctggagaagcaagttcctggctagtagggtcatggcggacgaactgaccaacagcagggccgctctccagcgacagaaccgcgacgctcatggagctatccaagatctcttgtcagagagggagcagttcaggcaggagatgattgctacccagaagctccttgaagaactgcttgtgtccctacagtggggcagggagcagacctatagccccagcgttcagccccactccaccgcggagctcgccctcacaaatcacaagctagcaaaggctgttaactctcatttactcggaaatgtgggcatcaataaccagaaaaagatcccatctaccgtggagttttgttcaacacccgctgagaagatggcagaaacggtgctgagaatcttggatcccgttacctgtaaagagtcctctccagataatccttttttcgagtctagtccaaccactctcctcgctactaaaaagaacattggacgattccacccatacactagatacgaaaacatcacatttaattgttgtaaccactgccggggagagcttatagcgttatag

SEQ ID NO: 140019 - DNA, 1203 bp, Artificial Sequence
  derived and/or modified sequence
atgacaacgaagaacctggagaccaaagtgaccgtcacttcctcgcccattcggggtgctggcgatggcatggagaccgaagagccaccgaagtccgttgaggtgacaagcggcgtccagagtcgtaagcaccacagcctacagagtccctggaagaaggctgtgccatccgagagcccgggtgtgctgcagctcggaaaaatgcttaccgaaaaggctatggaagtaaaagctgtgcggatcctggtaccaaaagccgctattacccacgacattcccaacaagaacactaaagtaaaaagtctcggccatcataaaggggaatttttggggcagtctgagggagtgatagagcctaataaggagctgtcagaggttaagaatgtgctcgagaaactgaaaaatagtgaaaggaggctgctccaggataaggagggcctgtcaaatcagctacgtgtccagaccgaggtcaaccgagaattgaaaaaactcctcgtggccagtgtaggagatgatctccagtaccacttcgaaagacttgctagggaaaaaaaccagttgatcttggagaacgaagccctggggcgaaacaccgcacagctgagcgaacagttggagcgcatgagtatccaatgcgacgtctggcggagcaagtttcttgcttctcgagtcatggccgatgagctgacgaattcaagggctgctctccagcgccaaaaccgggacgctcatggcgctattcaagatctgttgtctgagagagaacaattccgacaggagatgatcgcgactcaaaagctactggaagaactgctggtttccctgcagtgggggcgtgagcagacatattctccttccgtccagccacattccaccgcggagctcgccctgacaaaccacaagttggccaaagctgttaactcccatctcctcggtaacgtgggaattaacaaccagaagaagatcccttctaccgtggaattctgttccactcccgcagaaaaaatggcggaaaccgtcctcaggatcttggaccccgtgacctgtaaagagagctcacctgacaaccctttcttcgagagcagccccactaccttgctggctaccaagaaaaacataggcagatttcacccctatacaaggtacgaaaacatcacatttaattgctgtaatcactgtagaggagaactgattgcactatag

SEQ ID NO: 140020 - protein, 907 aa, Artificial Sequence
  derived and/or modified sequence
MDTSRLGVLLSLPVLLQLATGGSSPRSGVLLRGCPTHCHCEPDGRMLLRVDCSDLGLSELPSNLSVFTSYLDLSMNNISQLLPNPLPSLRFLEELRLAGNALTYIPKGAFTGLYSLKVLMLQNNQLRHVPTEALQNLRSLQSLRLDANHISYVPPSCFSGLHSLRHLWLDDNALTEIPVQAFRSLSALQAMTLALNKIHHIPDYAFGNLSSLVVLHLHNNRIHSLGKKCFDGLHSLETLDLNYNNLDEFPTAIRTLSNLKELGFHSNNIRSIPEKAFVGNPSLITIHFYDNPIQFVGRSAFQHLPELRTLTLNGASQITEFPDLTGTANLESLTLTGAQISSLPQTVCNQLPNLQVLDLSYNLLEDLPSFSVCQKLQKIDLRHNEIYEIKVDTFQQLLSLRSLNLAWNKIAIIHPNAFSTLPSLIKLDLSSNLLSSFPITGLHGLTHLKLTGNHALQSLISSENFPELKVIEMPYAYQCCAFGVCENAYKISNQWNKGDNSSMDDLHKKDAGMFQAQDERDLEDFLLDFEEDLKALHSVQCSPSPGPFKPCEHLLDGWLIRIGVWTIAVLALTCNALVTSTVFRSPLYISPIKLLIGVIAAVNMLTGVSSAVLAGVDAFTFGSFARHGAWWENGVGCHVIGFLSIFASESSVFLLTLAALERGFSVKYSAKFETKAPFSSLKVIILLCALLALTMAAVPLLGGSKYGASPLCLPLPFGEPSTMGYMVALILLNSLCFLMMTIAYTKLYCNLDKGDLENIWDCSMVKHIALLLFTNCILNCPVAFLSFSSLINLTFISPEVIKFILLVVVPLPACLNPLLYILFNPHFKEDLVSLRKQTYVWTRSKHPSLMSINSDDVEKQSCDSTQALVTFTSSSITYDLPPSSVPSPAYPVTESCHLSSVAFVPCL

SEQ ID NO: 140021 - protein, 777 aa, Artificial Sequence
  derived and/or modified sequence
MDTSRLGVLLSLPVLLQLATGGSSPRSGVLLRGCPTHCHCEPDGRMLLRVDCSDLGLSELPSNLSVFTSYLDLSMNNISQLLPNPLPSLRFLEELRLAGNALTYIPKGAFTGLYSLKVLMLQNNQLRHVPTEALQNLRSLQSLRLDANHISYVPPSCFSGLHSLRHLWLDDNALTEIPVQAFRSLSALQAMTLALNKIHHIPDYAFGNLSSLVVLHLHNNRIHSLGKKCFDGLHSLETLDLNYNNLDEFPTAIRTLSNLKELGFHSNNIRSIPEKAFVGNPSLITIHFYDNPIQFVGRSAFQHLPELRTLTLNGASQITEFPDLTGTANLESLTLTGAQISSLPQTVCNQLPNLQVLDLSYNLLEDLPSFSVCQKLQKIDLRHNEIYEIKVDTFQQLLSLRSLNLAWNKIAIIHPNAFSTLPSLIKLDLSSNLLSSFPITGLHGLTHLKLTGNHALQSLISSENFPELKVIEMPYAYQCCAFGVCENAYKISNQWNKGDNSSMDDLHKKDAGMFQAQDERDLEDFLLDFEEDLKALHSVQCSPSPGPFKPCEHLLDGWLIRIGVWTIAVLALTCNALVTSTVFRSPLYISPIKLLIGVIAAVNMLTGVSSAVLAGVDAFTFGSFARHGAWWENGVGCHVIGFLSIFASESSVFLLTLAALERGFSVKYSAKFETKAPFSSLKVIILLCALLALTMAAVPLLGGSKYGASPLCLPLLPHDDHCLHQALLQFGQGRPGEYLGLLYGKTHCPVALHQLHPKLPCGFLVLLLFNKPYIYQS

SEQ ID NO: 140022 - DNA, 2724 bp, Artificial Sequence
  derived and/or modified sequence
atggatacaagtagactaggggtcctcctctcattacccgtcctgctccaactggccactggtggctcctctccacgcagcggggttctcctccgcgggtgtccaacgcattgtcattgtgaacctgacggaaggatgctgcttagggttgactgctcagatctggggctctccgagctgcctagtaacctctccgtgtttaccagctatctggacctttccatgaataacattagccagctcctgcccaaccctctcccctctttgcgtttcctggaggagctccggctggctggtaacgccctgacttacatcccaaagggcgcctttactggactctacagtcttaaagtgcttatgctgcagaacaaccaattacgccacgtgcctactgaagcactgcaaaatttgcgcagccttcaatctttgagattagatgccaaccatatcagttatgtgccaccaagctgtttcagcggcctgcactcccttaggcacctgtggctggacgataacgctttgacagaaatcccagtccaggcttttagaagtctatccgctcttcaggcaatgactcttgctcttaataaaattcatcatatccccgattacgctttcggcaatctgagttccctggtggtgctccatttacataataaccgtattcattcactgggcaagaaatgtttcgatggactgcatagtctcgaaaccctggatctgaactacaataacttggacgaatttcccaccgccattcgcaccttatcaaacctcaaggagttgggatttcattcaaacaacattcggtccatccctgagaaggcttttgtcggcaaccctagcttaattaccattcatttctacgacaatccaattcagttcgtcggccggagcgcatttcagcacctgcctgagctgcggactcttacactgaacggggccagccagataactgagttccccgacttgactggaactgccaacctagagtccctcacattgacaggggctcagatatccagcctgccacagaccgtatgcaaccagctccctaacctgcaggtgctcgacctctcctacaacctgcttgaagatttaccatccttcagtgtctgtcaaaaacttcagaaaatcgatttacgccacaatgagatctacgagatcaaggttgacaccttccagcagttactttccctgcgctcccttaatctggcatggaacaagattgctataattcatcctaacgcttttagcaccctgccaagcctgatcaaactcgatctcagctccaatttgttgtcctcttttccgataacaggtctgcacgggcttactcatcttaaactaaccggaaaccatgcccttcagtccctgataagttcggagaacttccccgagctgaaggtaatagaaatgccctacgcatatcagtgctgtgccttcggcgtctgcgagaatgcatacaagatctccaaccagtggaacaaaggggacaattcctcaatggacgacttacacaaaaaagatgcgggtatgtttcaagctcaagacgaaagagatctcgaagatttccttcttgattttgaagaagatcttaaggctttgcacagcgtgcagtgctctccatcacctggccctttcaagccatgcgagcacttgctggatggatggctcattcgaatcggcgtgtggaccattgccgttcttgcactgacctgcaacgccctcgtaacctcaactgtattccgaagccccctgtatatatccccaatcaagcttcttatcggggtgatcgctgccgtcaacatgcttactggagtgtcgagcgctgtgttagccggagttgacgccttcacatttgggtcgtttgctcgccacggggcctggtgggaaaacggcgtggggtgccatgttatcggctttctcagcattttcgccagtgagtctagcgtttttttattgactcttgctgcccttgagcgcggcttctctgtcaagtattctgccaagtttgagacgaaagctcccttctcatccctaaaagtgataatcttgctctgcgctctgctcgccctcactatggccgccgtgcctctgctgggagggtctaagtatggcgccagtccactgtgccttcccctgccttttggggaaccctccaccatggggtacatggttgccctgatcctcctgaattccctctgttttttgatgatgaccattgcatacaccaaactgtactgcaacttggacaagggggacttggagaacatttgggactgttcgatggtgaagcacatcgcgctcctgctgttcactaactgcatattgaactgccctgtcgcattcctgagtttcagttctctgattaatttaacttttatctctcccgaagtgataaagttcattctgttagtggtagtgcccctaccagcctgcttgaaccctctgctttacattctctttaaccctcatttcaaggaggacctcgtatccctaagaaaacaaacgtatgtgtggactaggagcaaacacccaagcttaatgagcataaattccgacgatgtggaaaagcagagctgcgattcaacccaggccttagtcacctttactagctcttccatcacatacgaccttcctccctctagcgtcccttcgcctgcgtacccagtcactgagagctgtcatctttcttccgtagccttcgtgccttgtctttag

SEQ ID NO: 140023 - DNA, 2334 bp, Artificial Sequence
  derived and/or modified sequence
atggacacatcccgcctgggcgtcctgctgtcacttcccgtgttgctgcagctggctacaggagggtcctccccccgcagcggcgtcctcctgaggggttgtccaacccactgtcactgcgagcccgatggaagaatgctgctccgagtcgattgcagtgatctaggactctcggagctgcctagcaacctctccgtgttcacttcctatttagacctgtctatgaacaatatttctcagctcctgccgaatccgctcccgtcgctgcgctttcttgaagaactccgcctggcagggaacgcattaacctacatccccaaaggtgcctttaccggcctctattcacttaaagttctgatgcttcagaacaaccaactgcgccatgttccaaccgaagccctccagaaccttaggagtctgcagtcgttaaggctggacgctaatcatatctcttacgtaccacccagttgcttctctggactccattcactgcgccatctgtggctggatgataatgcgctgactgaaattccagtgcaagccttcagaagcctgtccgcgctgcaggcgatgaccctggctctgaacaaaatacatcatattccagactacgcttttggaaatttatcttctttagtggtcctccacttgcacaacaaccggattcacagcctgggcaagaagtgtttcgatggtctacactcacttgaaactttggatctcaactataataacctggatgagtttcctaccgcaatccggactcttagtaatctcaaggagttgggttttcacagtaacaatatcaggagtattcctgagaaagcttttgtggggaatccatccctgattaccatacatttctatgacaacccgatccagttcgtgggtagatccgcatttcagcacttgccagagctgcggacactaacactgaatggggcgagtcagatcactgagtttcccgatttgactggcactgctaacttggaatctctgacccttactggcgctcagatttcctctctgccacaaacagtgtgcaaccagctccctaatctacaggtcctcgatctttcctacaacttacttgaagaccttccatctttttcagtgtgccaaaaactgcagaagatcgatttgaggcacaacgaaatctacgaaattaaggttgacactttccagcaactgctgtccttaagaagtctcaacctagcttggaacaaaatcgctatcatccatcctaacgccttctccaccctgccctcgcttattaagctggacctctccagtaatttgctgagttcattccccattacagggctccatggactgacccacttaaagctcacaggcaatcacgcacttcagagtctgatctctagcgaaaattttcccgaactgaaagtcatcgagatgccctatgcatatcaatgctgcgcctttggcgtctgcgagaacgcttataagatcagcaaccagtggaataagggggataactcatccatggacgatttgcataaaaaagacgccggaatgtttcaggctcaggacgaacgcgatctagaggactttctgctggactttgaggaggacttaaaagctctgcattcggtccagtgttcccccagtcccggaccattcaagccatgtgaacaccttctggatggatggctgatccgtataggagtttggacaattgctgtcctggctctgacttgcaacgccctagtaacttcaactgtgttccgtagtcctttgtatatatctcccattaagctgctgattggcgtaattgctgctgtcaacatgctgactggggtgtcttctgctgtgctcgcgggcgtggacgcctttacctttggaagctttgccaggcacggcgcatggtgggaaaacggtgtcggatgtcacgtcatcgggtttctctctatcttcgccagtgaaagctccgtgtttctgctcacactggcggctctagagcgaggctttagcgtcaaatactccgccaagtttgaaaccaaagccccattctccagcctaaaggtaattatattgttatgcgctctgctggccctgactatggccgctgtgcccctcctcggcggaagcaaatacggcgcctcacccctgtgtctgcccctgcttccacacgacgatcactgcctgcatcaggcccttctccagttcggccagggacggcccggcgagtatctgggcctgctctacggaaagacccattgccccgtggcccttcatcagctgcaccccaagctgccctgcgggttcttggtcttactgctcttcaataaaccctacatctaccagagctag

SEQ ID NO: 140024 - DNA, 2724 bp, Artificial Sequence
  derived and/or modified sequence
atggacaccagccggctgggcgtgctgctgagcctgcctgtgctgctgcagctggccaccggcggcagcagccccaggtctggagtgctgctgcggggctgccccacccactgccactgtgagccagatggccgcatgctgctgcgggtggactgcagcgacctgggcctgtctgagctgcccagcaacctgtctgtgttcaccagctacctggacctgtccatgaacaacatcagccagctgctgcccaaccccctgcccagcctgcgcttcctggaggagctgcggctggccggaaatgccctgacctacatccccaagggggccttcaccggcctgtacagcctgaaggtgctgatgctgcagaacaaccagctgcggcacgtgcccacagaggccctgcagaacctgcggagcctgcagagcctgcggctggatgccaaccacatctcctatgtgccccccagctgcttcagcggcctgcacagcctgcggcacctgtggctggatgacaatgccctgacagagatccctgtgcaggccttccgcagcctgagcgccctgcaggccatgaccctggccctgaacaagatccaccacatcccagactatgccttcggcaacctgagcagcctggtggtgctgcacctgcacaacaaccgcatccacagcctgggcaagaagtgctttgatggcctgcacagcctggagaccctggacctgaactacaacaacctggatgagttccccacagccatccgcaccctgagcaacctgaaggagctgggcttccacagcaacaacatccgcagcatccctgagaaggcctttgtgggcaaccccagcctcatcaccatccacttctatgacaaccccatccagtttgtgggccgcagcgccttccagcacctgcctgagctgcggaccctgaccctgaatggagccagccagatcacagagttcccagacctgactggaacagccaacctggagagcctgaccctgaccggggcccagatcagcagcctgccccagacagtgtgcaaccagctgcccaacctgcaggtgctggacctgagctacaacctgctggaggacctgcccagcttctctgtgtgccagaagctgcagaagattgacctgcggcacaatgagatctatgagatcaaggtggacaccttccagcagctgctgagcctgcggagcctgaacctggcctggaacaagatcgccatcatccaccccaatgccttcagcaccctgcccagcctcatcaagctggacctgagcagcaacctgctgagcagcttccccatcaccggcctgcacggcctgacccacctgaagctgactggaaaccacgccctgcagagcctcatcagcagcgagaacttccctgagctgaaggtgattgagatgccctatgcctaccagtgctgtgccttcggcgtgtgtgaaaatgcctacaagatcagcaaccagtggaacaagggggacaacagctccatggatgacctgcacaagaaggatgctggcatgttccaggcccaggatgagcgggacctggaggacttcctgctggactttgaggaggacctgaaggccctgcacagcgtgcagtgcagccccagccctggccccttcaagccctgtgagcacctgctggatggctggctgatccgcatcggcgtgtggaccatcgctgtgctggccctgacctgcaatgccctggtgaccagcacagtgttccgcagccccctgtacatcagccccatcaagctgctgattggagtgattgctgctgtgaacatgctgactggagtgagcagcgctgtgctggccggcgtggatgccttcaccttcggcagctttgcccggcatggagcctggtgggagaatggagtgggctgccacgtgattggcttcctgagcatctttgccagcgagagctctgtgttcctgctgaccctggccgccctggagcggggcttctctgtgaagtacagcgccaagtttgagaccaaggcccccttcagcagcctgaaggtgatcatcctgctgtgtgccctgctggccctgaccatggctgctgtgcccctgctgggcggcagcaagtacggggccagccccctgtgcctgcccctgccctttggagagcccagcaccatgggctacatggtggccctgatcctgctgaacagcctgtgcttcctgatgatgaccatcgcctacaccaagctgtactgcaacctggacaagggggacctggagaacatctgggactgcagcatggtgaagcacatcgccctgctgctcttcaccaactgcatcctgaactgccctgtggccttcctgtccttcagcagcctcatcaacctgaccttcatcagccctgaggtgatcaagttcatcctgctggtggtggtgcccctgcctgcctgcctgaaccccctgctgtacatcctcttcaacccccacttcaaggaggacctggtgtccctgaggaagcagacctacgtgtggaccaggagcaagcaccccagcctgatgagcatcaacagtgatgatgtggagaagcagagctgtgacagcacccaggccctggtgaccttcaccagcagcagcatcacctatgacctgccccccagctctgtgcccagccctgcctaccctgtgacagagagctgccacctgagctctgtggcctttgtgccctgcctgtag

SEQ ID NO: 140025 - DNA, 2334 bp, Artificial Sequence
  derived and/or modified sequence
atggacaccagccggctgggcgtgctgctgagcctgcctgtgctgctgcagctggccaccggcggcagcagccccaggtctggagtgctgctgcggggctgccccacccactgccactgtgagccagatggccgcatgctgctgcgggtggactgcagcgacctgggcctgtctgagctgcccagcaacctgtctgtgttcaccagctacctggacctgtccatgaacaacatcagccagctgctgcccaaccccctgcccagcctgcgcttcctggaggagctgcggctggccggaaatgccctgacctacatccccaagggggccttcaccggcctgtacagcctgaaggtgctgatgctgcagaacaaccagctgcggcacgtgcccacagaggccctgcagaacctgcggagcctgcagagcctgcggctggatgccaaccacatctcctatgtgccccccagctgcttcagcggcctgcacagcctgcggcacctgtggctggatgacaatgccctgacagagatccctgtgcaggccttccgcagcctgagcgccctgcaggccatgaccctggccctgaacaagatccaccacatcccagactatgccttcggcaacctgagcagcctggtggtgctgcacctgcacaacaaccgcatccacagcctgggcaagaagtgctttgatggcctgcacagcctggagaccctggacctgaactacaacaacctggatgagttccccacagccatccgcaccctgagcaacctgaaggagctgggcttccacagcaacaacatccgcagcatccctgagaaggcctttgtgggcaaccccagcctcatcaccatccacttctatgacaaccccatccagtttgtgggccgcagcgccttccagcacctgcctgagctgcggaccctgaccctgaatggagccagccagatcacagagttcccagacctgactggaacagccaacctggagagcctgaccctgaccggggcccagatcagcagcctgccccagacagtgtgcaaccagctgcccaacctgcaggtgctggacctgagctacaacctgctggaggacctgcccagcttctctgtgtgccagaagctgcagaagattgacctgcggcacaatgagatctatgagatcaaggtggacaccttccagcagctgctgagcctgcggagcctgaacctggcctggaacaagatcgccatcatccaccccaatgccttcagcaccctgcccagcctcatcaagctggacctgagcagcaacctgctgagcagcttccccatcaccggcctgcacggcctgacccacctgaagctgactggaaaccacgccctgcagagcctcatcagcagcgagaacttccctgagctgaaggtgattgagatgccctatgcctaccagtgctgtgccttcggcgtgtgtgaaaatgcctacaagatcagcaaccagtggaacaagggggacaacagctccatggatgacctgcacaagaaggatgctggcatgttccaggcccaggatgagcgggacctggaggacttcctgctggactttgaggaggacctgaaggccctgcacagcgtgcagtgcagccccagccctggccccttcaagccctgtgagcacctgctggatggctggctgatccgcatcggcgtgtggaccatcgctgtgctggccctgacctgcaatgccctggtgaccagcacagtgttccgcagccccctgtacatcagccccatcaagctgctgattggagtgattgctgctgtgaacatgctgactggagtgagcagcgctgtgctggccggcgtggatgccttcaccttcggcagctttgcccggcatggagcctggtgggagaatggagtgggctgccacgtgattggcttcctgagcatctttgccagcgagagctctgtgttcctgctgaccctggccgccctggagcggggcttctctgtgaagtacagcgccaagtttgagaccaaggcccccttcagcagcctgaaggtgatcatcctgctgtgtgccctgctggccctgaccatggctgctgtgcccctgctgggcggcagcaagtacggggccagccccctgtgcctgcccctgctgccccatgatgaccactgcctgcaccaggccctgctgcagtttggccagggccggcctggagagtacctgggcctgctgtatggcaagacccactgccctgtggccctgcaccagctgcaccccaagctgccctgtggcttcctggtgctgctgctcttcaacaagccctacatctaccagagctag

SEQ ID NO: 140026 - DNA, 4611 bp, Artificial Sequence
  derived and/or modified sequence
aaaaaacgagcgtgcaagcagagatgctgctccacaccgctcaggccgcgagcagcagcaaggcgcaccgccactgtcgccgctgcagccagggctgctccgaaggccggcgtggcggcaaccggcacctctgtccccgccgcgcttctcctcgccgcccacgccgtggggtcaggaacgcggcgtctggcgctgcagacgcccgctgagttgcagaagcccacggagcggcgcccggcgcgccacggcccgtagcagtccggtgctgctctccgcccgcgtccggctcgtggccccctacttcgggcaccatggacacctcccggctcggtgtgctcctgtccttgcctgtgctgctgcagctggcgaccgggggcagctctcccaggtctggtgtgttgctgaggggctgccccacacactgtcattgcgagcccgacggcaggatgttgctcagggtggactgctccgacctggggctctcggagctgccttccaacctcagcgtcttcacctcctacctagacctcagtatgaacaacatcagtcagctgctcccgaatcccctgcccagtctccgcttcctggaggagttacgtcttgcgggaaacgctctgacatacattcccaagggagcattcactggcctttacagtcttaaagttcttatgctgcagaataatcagctaagacacgtacccacagaagctctgcagaatttgcgaagccttcaatccctgcgtctggatgctaaccacatcagctatgtgcccccaagctgtttcagtggcctgcattccctgaggcacctgtggctggatgacaatgcgttaacagaaatccccgtccaggcttttagaagtttatcggcattgcaagccatgaccttggccctgaacaaaatacaccacataccagactatgcctttggaaacctctccagcttggtagttctacatctccataacaatagaatccactccctgggaaagaaatgctttgatgggctccacagcctagagactttagatttaaattacaataaccttgatgaattccccactgcaattaggacactctccaaccttaaagaactaggatttcatagcaacaatatcaggtcgatacctgagaaagcatttgtaggcaacccttctcttattacaatacatttctatgacaatcccatccagtttgttgggagatctgcttttcaacatttacctgaactaagaacactgactctgaatggtgcctcacaaataactgaatttcctgatttaactggaactgcaaacctggagagtctgactttaactggagcacagatctcatctcttcctcaaaccgtctgcaatcagttacctaatctccaagtgctagatctgtcttacaacctattagaagatttacccagtttttcagtctgccaaaagcttcagaaaattgacctaagacataatgaaatctacgaaattaaagttgacactttccagcagttgcttagcctccgatcgctgaatttggcttggaacaaaattgctattattcaccccaatgcattttccactttgccatccctaataaagctggacctatcgtccaacctcctgtcgtcttttcctataactgggttacatggtttaactcacttaaaattaacaggaaatcatgccttacagagcttgatatcatctgaaaactttccagaactcaaggttatagaaatgccttatgcttaccagtgctgtgcatttggagtgtgtgagaatgcctataagatttctaatcaatggaataaaggtgacaacagcagtatggacgaccttcataagaaagatgctggaatgtttcaggctcaagatgaacgtgaccttgaagatttcctgcttgactttgaggaagacctgaaagcccttcattcagtgcagtgttcaccttccccaggccccttcaaaccctgtgaacacctgcttgatggctggctgatcagaattggagtgtggaccatagcagttctggcacttacttgtaatgctttggtgacttcaacagttttcagatcccctctgtacatttcccccattaaactgttaattggggtcatcgcagcagtgaacatgctcacgggagtctccagtgccgtgctggctggtgtggatgcgttcacttttggcagctttgcacgacatggtgcctggtgggagaatggggttggttgccatgtcattggttttttgtccatttttgcttcagaatcatctgttttcctgcttactctggcagccctggagcgtgggttctctgtgaaatattctgcaaaatttgaaacgaaagctccattttctagcctgaaagtaatcattttgctctgtgccctgctggccttgaccatggccgcagttcccctgctgggtggcagcaagtatggcgcctcccctctctgcctgcctttgccttttggggagcccagcaccatgggctacatggtcgctctcatcttgctcaattccctttgcttcctcatgatgaccattgcctacaccaagctctactgcaatttggacaagggagacctggagaatatttgggactgctctatggtaaaacacattgccctgttgctcttcaccaactgcatcctaaactgccctgtggctttcttgtccttctcctctttaataaaccttacatttatcagtcctgaagtaattaagtttatccttctggtggtagtcccacttcctgcatgtctcaatccccttctctacatcttgttcaatcctcactttaaggaggatctggtgagcctgagaaagcaaacctacgtctggacaagatcaaaacacccaagcttgatgtcaattaactctgatgatgtcgaaaaacagtcctgtgactcaactcaagccttggtaacctttaccagctccagcatcacttatgacctgcctcccagttccgtgccatcaccagcttatccagtgactgagagctgccatctttcctctgtggcatttgtcccatgtctctaattaatatgtgaaggaaaatgttttcaaaggttgagaacctgaaaatgtgagattgagtatatcagagcagtaattaataagaagagctgaggtgaaactcggtttaaaaaccaaaaaagaatctctcagttagtaagaaaaggctgaaaacctcttgatacttgagagtgaatataagtctaaatgctgctttgtataatttgttcagctaagggatagatcgatcacactatttaagtgagcccagatcaaaaaagcagattgaaattttctttagaaaagattctccatgatttgaattgcattctctttaaactcaccaatgtaatcattttgggaggagggagaacccacttgctttccaaatgggtttatttaaacccacaaactcaagaggttgttgggggaattaggaaaataagggttttcaatgacctacattgctaggtagaggctgtgatccatgggatttcattctaatgaccatgtgaagatgtttgagtcctcctttgcctttcctcagaaagaatccttctaaggcacaaatcccttagatggataatgtaaggtattgttaactcactcatattgagatcatttttagagataccaggttttatgtatcagcactagatggttccaccctcatgggataaaactgcttacaagtattttgaaagaaaaactgaccaaaattcttaaattgttactaaggcaatcatgcacaggtgacgtatgtcttatctgatttgtttttaactccttggtgcccaaagctcagaagggaattccactgccagcaatgaacatacctggaaaagaaagtaagcaatctgggattttttttctgggttagtaaagaatttttgcaataagttttatcagttgattcaaactgatgtgcatcttaatgatcaaatgtgcacattacataaattaagtccactgatacaacttcttacacatgtatctctagtagctctggcaaacccaatatctgacaccactttggactcaagagactcagtaacgtattatcctgtttatttagcttggttttagctgtgttctctctggataacccacttgatgttaggaacattacttctctgcttattccatattaatactgtgttaggtattttaagaagcaagttattaaataagaaaagtcaaagtattaattcttaccttctattatcctatattagcttcaatacatccaaaccaaatggctgttaggtagatttatttttatataagcatgtttattttgatcagatgttttaacttggatttgaaaaaatacatttatgagatgttttataagatgtgtaaatatagaactgtatttattactatagtaaaggttcagtaacattaaggaccatgataatgataataaaccttgtacagtggcatattctttgatttatattgtgtttctctgcccattttctttaaattcattaactgtatatatgtaaatatatagtacttgtaaatagattccaaatttgcttttctattgggtaaaaaataaatttgtaataaaatgtgtgactatgaaacaaaa

SEQ ID NO: 140027 - DNA, 2822 bp, Artificial Sequence
  derived and/or modified sequence
aaaaaacgagcgtgcaagcagagatgctgctccacaccgctcaggccgcgagcagcagcaaggcgcaccgccactgtcgccgctgcagccagggctgctccgaaggccggcgtggcggcaaccggcacctctgtccccgccgcgcttctcctcgccgcccacgccgtggggtcaggaacgcggcgtctggcgctgcagacgcccgctgagttgcagaagcccacggagcggcgcccggcgcgccacggcccgtagcagtccggtgctgctctccgcccgcgtccggctcgtggccccctacttcgggcaccatggacacctcccggctcggtgtgctcctgtccttgcctgtgctgctgcagctggcgaccgggggcagctctcccaggtctggtgtgttgctgaggggctgccccacacactgtcattgcgagcccgacggcaggatgttgctcagggtggactgctccgacctggggctctcggagctgccttccaacctcagcgtcttcacctcctacctagacctcagtatgaacaacatcagtcagctgctcccgaatcccctgcccagtctccgcttcctggaggagttacgtcttgcgggaaacgctctgacatacattcccaagggagcattcactggcctttacagtcttaaagttcttatgctgcagaataatcagctaagacacgtacccacagaagctctgcagaatttgcgaagccttcaatccctgcgtctggatgctaaccacatcagctatgtgcccccaagctgtttcagtggcctgcattccctgaggcacctgtggctggatgacaatgcgttaacagaaatccccgtccaggcttttagaagtttatcggcattgcaagccatgaccttggccctgaacaaaatacaccacataccagactatgcctttggaaacctctccagcttggtagttctacatctccataacaatagaatccactccctgggaaagaaatgctttgatgggctccacagcctagagactttagatttaaattacaataaccttgatgaattccccactgcaattaggacactctccaaccttaaagaactaggatttcatagcaacaatatcaggtcgatacctgagaaagcatttgtaggcaacccttctcttattacaatacatttctatgacaatcccatccagtttgttgggagatctgcttttcaacatttacctgaactaagaacactgactctgaatggtgcctcacaaataactgaatttcctgatttaactggaactgcaaacctggagagtctgactttaactggagcacagatctcatctcttcctcaaaccgtctgcaatcagttacctaatctccaagtgctagatctgtcttacaacctattagaagatttacccagtttttcagtctgccaaaagcttcagaaaattgacctaagacataatgaaatctacgaaattaaagttgacactttccagcagttgcttagcctccgatcgctgaatttggcttggaacaaaattgctattattcaccccaatgcattttccactttgccatccctaataaagctggacctatcgtccaacctcctgtcgtcttttcctataactgggttacatggtttaactcacttaaaattaacaggaaatcatgccttacagagcttgatatcatctgaaaactttccagaactcaaggttatagaaatgccttatgcttaccagtgctgtgcatttggagtgtgtgagaatgcctataagatttctaatcaatggaataaaggtgacaacagcagtatggacgaccttcataagaaagatgctggaatgtttcaggctcaagatgaacgtgaccttgaagatttcctgcttgactttgaggaagacctgaaagcccttcattcagtgcagtgttcaccttccccaggccccttcaaaccctgtgaacacctgcttgatggctggctgatcagaattggagtgtggaccatagcagttctggcacttacttgtaatgctttggtgacttcaacagttttcagatcccctctgtacatttcccccattaaactgttaattggggtcatcgcagcagtgaacatgctcacgggagtctccagtgccgtgctggctggtgtggatgcgttcacttttggcagctttgcacgacatggtgcctggtgggagaatggggttggttgccatgtcattggttttttgtccatttttgcttcagaatcatctgttttcctgcttactctggcagccctggagcgtgggttctctgtgaaatattctgcaaaatttgaaacgaaagctccattttctagcctgaaagtaatcattttgctctgtgccctgctggccttgaccatggccgcagttcccctgctgggtggcagcaagtatggcgcctcccctctctgcctgcctttgcttcctcatgatgaccattgcctacaccaagctctactgcaatttggacaagggagacctggagaatatttgggactgctctatggtaaaacacattgccctgttgctcttcaccaactgcatcctaaactgccctgtggctttcttgtccttctcctctttaataaaccttacatttatcagtcctgaagtaattaagtttatccttctggtggtagtcccacttcctgcatgtctcaatccccttctctacatcttgttcaatcctcactttaaggaggatctggtgagcctgagaaagcaaacctacgtctggacaagatcaaaacacccaagcttgatgtcaattaactctgatgatgtcga

SEQ ID NO: 140028 - DNA, 2724 bp, Artificial Sequence
  derived and/or modified sequence
atggacaccagccggctgggcgtgctgctgagcctgcccgtgctgttgcaactcgccacaggcggatctagcccaagatcgggggtgttgctgcgaggatgcccaacccactgccactgcgaaccagacgggcggatgcttctcagggtcgactgctcagacctgggcctgtccgagttgcccagtaacctgtcagtttttacgtcttatctggacttatcgatgaataacatttctcagcttctgcctaacccactcccttctttgcgattcctggaagagcttagactagccggcaacgctctgacatatatcccaaaaggagcatttaccggactgtacagccttaaggtcctgatgttgcaaaataatcagctccggcatgtgcctacagaggcgctgcagaatctgcgtagcctgcagtccttaaggctggacgcgaatcatatctcgtacgtgccaccatcttgctttagtggacttcacagtcttcggcacctgtggctcgatgataacgctctaaccgaaataccagtgcaagccttcaggagcctgtccgccctccaggccatgacattggctctgaacaagattcatcacatccctgactacgctttcgggaacctaagcagcctggtcgtgttacatctgcacaacaatcgcatccactctcttggaaagaaatgctttgacggcctccacagtttggagaccctcgatcttaattacaacaaccttgacgaatttccaacagcgatcagaacattatcaaacctgaaggaactaggatttcatagcaacaatatcaggagtatcccagagaaggccttcgtgggtaatccttctcttatcactatccatttttatgataaccctatacagttcgtggggcgaagcgcattccaacatttgcccgagcttcggacccttacgcttaacggtgcttcccagattacggagttcccagacctcacaggcactgcaaacctggaaagcctgacactgaccggagctcagataagtagtttgcctcaaactgtctgcaaccagctgcctaacctacaggtgctggatctgtcatacaatcttctggaagacctgccttctttttctgtgtgtcagaagctgcaaaagattgatttgcgtcacaacgagatatatgagatcaaggtagacaccttccaacagctgttgtcacttcgatccctgaacctagcatggaacaagatagcaatcattcacccaaatgccttttctactctccctagccttatcaaactcgatctctcctctaatctgctctcttctttccccataaccggtctccacggcctgacccatctgaagctgaccgggaaccacgcactgcaaagcctcatttcttctgagaactttcccgaacttaaagtcatagaaatgccatacgcttaccagtgctgcgcttttggggtgtgtgaaaatgcttataaaatatctaatcaatggaacaaaggcgataactctagtatggacgatctgcataagaaggatgctggcatgttccaggctcaggatgaacgcgatctggaggattttttgctggacttcgaagaggatttgaaggccctccattccgtgcagtgctcccccagcccgggtccttttaagccctgtgagcatctcctcgatggttggctcatccgaatcggggtttggacaatcgctgtattggctctaacttgtaacgcacttgttaccagcactgtctttcggtctccactatacattagcccaataaagctgctcattggtgtcatcgctgctgtgaatatgctgaccggcgtgtccagcgctgtgctggctggtgtggacgccttcactttcgggtctttcgccagacatggagcttggtgggagaatggagtcgggtgccatgtcatagggttcctgtcaatctttgcctctgagagctctgtttttcttctgaccctggccgctctggaacgcggcttttctgtcaaatactccgccaaatttgagacaaaggcaccttttagtagcctgaaggtgatcattctcctgtgtgcactgctcgctcttaccatggctgcggtgcccctgctgggagggtctaagtatggagctagcccactatgtctgcccctcccttttggcgagccttccactatgggatacatggtcgcgctcatactgctgaattccctgtgctttttaatgatgacgattgcttacacgaaactatattgcaacttggataagggagacctcgaaaatatatgggattgctccatggtcaagcatatcgcactcctgttattcactaattgcattctgaattgtcctgtggcttttctctccttttcaagcctgattaatcttacatttattagcccggaggtcatcaaatttatactcctggtggtggtgccgttgcccgcttgcctgaatccactattgtacatcctgttcaatcctcactttaaggaggatttggtctcactgaggaaacaaacatacgtatggacacggtctaagcatccaagtttaatgagcatcaactctgacgatgttgaaaagcagagctgcgactctacacaggccctggtcaccttcacgagctcttccataacatacgacctccctcccagctcggttcccagccccgcctatccggtgacagaaagttgccacttaagctctgtagcattcgtgccctgtctttag

SEQ ID NO: 140029 - DNA, 2334 bp, Artificial Sequence
  derived and/or modified sequence
atggacaccagccggctgggcgtgctgctgagcctgcccgtgctgttgcaactggcaacaggaggtagctctccacgcagcggagtgctgctcaggggctgccccacccattgccattgtgagccggacgggcggatgctcctgcgcgttgattgttcagatttgggcctgtccgagctccctagcaacctgtcagtgtttacgtcctacctggaccttagcatgaacaacatcagtcagttattacctaacccgctcccttcccttcgctttctggaggaactcaggctcgctggtaacgcactgacctatataccaaagggcgccttcacagggctgtactccttgaaagtgctcatgctgcagaacaatcagcttcgtcacgtccccaccgaagcacttcaaaatctaaggagtctacaaagcttgcgactcgatgctaaccatatcagttatgtaccacctagctgtttcagcgggctgcactccctgcggcacctgtggcttgacgacaacgcattaacggaaatccctgtgcaggcgtttagaagtctaagcgcactgcaggccatgactctggccctgaacaaaattcatcacatacccgactacgcattcggaaatctttcttctctcgttgtgctgcacttacacaacaacaggatccacagcctcggcaaaaagtgcttcgatggcctgcactctttggagacattagatctcaattataacaatctggacgagttcccaactgccatccgaaccttaagcaatctgaaggaactagggtttcactctaataatattcggagcatcccagaaaaggctttcgttggtaaccccagtctgatcaccattcacttctacgataaccctatccagtttgtgggtagatccgcctttcagcatctccctgagctcagaacccttacgctgaatggtgctagccaaattactgaatttccagatctgaccggtaccgcaaacttagaaagcctgactttgactggggctcagatctcaagcctaccacaaacggtgtgtaaccagcttcccaatttgcaggtgctggatctgtcgtacaacttgttagaggatctaccttcctttagtgtgtgccagaagttgcagaaaatcgatctgcgacataatgagatctacgagatcaaggtcgatacttttcagcagctcttgagtcttcgcagccttaatctggcctggaacaagatagctatcattcaccctaatgctttctccacactcccgagcctgataaagttagatctcagtagcaacctgctgagtagctttccgatcactggactgcacgggctgacgcatcttaaactgaccggtaatcacgccctgcagtccttgattagcagcgaaaatttccccgaactgaaggtgatcgaaatgccatacgcatatcagtgctgcgccttcggcgtgtgcgagaatgcgtacaaaatttccaaccagtggaataagggggacaactccagcatggatgacctgcataagaaagatgctgggatgttccaggcccaggacgaacgggatctggaggacttcctgttagatttcgaagaagacctcaaggctctgcacagtgtgcagtgtagcccctctccgggccctttcaaaccttgtgaacacctcctggacggatggctgattagaatcggagtttggacaattgccgtcctggcgttgacttgtaacgccctggtcacgtcaaccgttttcaggagcccattgtacatcagtccaattaagttgctaatcggagtcattgccgccgtgaatatgctgaccggagtgtcgtctgcggtcctcgccggagtggacgctttcaccttcggttctttcgcccgccacggcgcctggtgggaaaatggggttggatgtcacgtcatcggcttcttgtctatattcgcatctgagtcatcagttttcctactgacgctggcggcactggaacgcgggttctccgtgaaatacagtgccaagttcgagaccaaagccccattttctagtctcaaggttatcatcttgctatgtgccctgctagccctgacgatggctgccgtccctctcctcgggggatctaaatacggcgcttcacctctgtgccttccacttctccctcatgacgatcattgtctgcaccaagccctgctgcagttcggacagggccgccctggcgagtacctcggcctactctatggtaaaacacactgccccgtggcccttcaccagctacaccctaagctgccttgcggctttctcgtcctgctcttatttaataaaccttacatctatcagtcctag

SEQ ID NO: 140030 - DNA, 2724 bp, Artificial Sequence
  derived and/or modified sequence
atggacacatctagattgggggtgctgctctctctgcctgttctgttgcagctggcgacaggcggaagctctcccagatcaggggtcctgctgagaggttgccccacacactgccattgcgaaccagatgggaggatgcttctccgagtcgattgttctgacttaggcctcagtgaattacccagtaatctgtcagttttcaccagctacctcgacctttctatgaataacatttctcagctgctccccaatccactgcccagcctcagatttcttgaagagctcagactggccggaaacgcactgacttatatccctaagggggcatttacaggactgtacagtctgaaggttttaatgctccaaaacaatcaattaagacacgtcccgaccgaagcgctacagaacctaaggagcctccagtctttgagactggatgctaaccacatctcttacgtgcctccgtcttgtttctccggcctccattccctgaggcatctctggctggacgacaacgcacttaccgaaattcccgtccaggcttttcgcagcctgtcggcactgcaggctatgaccctggccctcaataaaattcatcacattcctgattacgcatttggtaatctgtcttcgttggtagtgctgcacctacacaataaccggatacattctcttgggaagaaatgttttgacggactgcattctctcgagacactggatttgaattacaataacctcgatgaattccctactgccataaggaccctgtctaacctgaaggaactgggtttccactccaataacattcgtagtattcctgagaaggctttcgtcgggaaccctagcctgatcactatacacttttacgacaatccaattcagttcgtagggagatccgcattccaacatctgccagagttgagaacactgacgctcaacggcgcttcacagattactgaatttccagacttaacaggcacagccaacctggaatctctcacccttaccggagcacaaatttctagcctgccacagacagtgtgcaaccagctacccaacctccaagttcttgacctctcgtacaacctgctcgaggacctgccttcgttttctgtttgtcagaaacttcagaagatcgaccttagacacaacgaaatctatgagattaaagtcgacacttttcagcagctgctctcactgcggagcctcaacctggcctggaataaaattgctatcatacatccaaacgcatttagcactctgccatcactgattaaactcgatttgagttccaatcttctatcctctttccctattacgggcctgcacggcctgacacacttgaagcttacaggaaatcatgctctgcaatccctcatctccagcgaaaacttccccgagcttaaagttatagaaatgccctacgcatatcagtgctgtgctttcggcgtctgcgaaaacgcgtataagatcagtaatcaatggaataaaggggacaattcttcaatggacgatctccataagaaggatgctgggatgtttcaggcgcaggatgagcgagacctggaggatttcctactggacttcgaagaggaccttaaagccctgcacagcgtgcagtgttcaccttcgcctggaccctttaagccatgcgaacatctcctggatggctggctgattcgcatcggggtgtggaccatcgccgtgctggccctgacatgtaacgcccttgttaccagcacagtgttccggtccccgctctatattagtccgataaaactgctgatcggagttatcgccgctgtcaatatgttgaccggtgtcagcagcgctgttctggccggtgtcgatgcttttacctttggttcattcgcgcgacacggcgcatggtgggagaatggagtcgggtgtcacgtgattggatttttgagcatcttcgcctccgagtcctccgtcttcctcctgaccctggccgctctcgagagaggcttctccgtgaaatacagtgccaaattcgagactaaggctccattttctagtcttaaggtgataatactgctgtgtgccctgctagccttgactatggcagcagtgcctctgctcggcggaagtaaatatggtgcctccccactgtgcctccctttacccttcggcgaaccgtccaccatgggttatatggtggcactgattctgttgaactcactctgtttcctaatgatgacgattgcatacacgaagctgtattgtaacttggataaaggtgatctggagaacatctgggattgcagtatggtgaagcacattgcattgctgctgttcactaactgcatcctgaattgccccgttgcattccttagctttagcagcctcattaatctgacgttcattagcccagaagtgataaagttcattctgctggtcgtagtgccacttcccgcttgtttgaatcccttgctttacatcctatttaatccccatttcaaagaagacctcgtgtccctccgtaaacaaacttacgtctggaccaggtcaaaacacccttcactgatgtccataaatagtgatgatgtcgaaaagcagtcttgcgattcaacacaagccctggtgacgtttactagcagctccatcacctatgatctgccgccaagttcagtcccttcaccggcttacccagtgacggagtcttgccatctgtctagtgttgctttcgtgccctgcttatag

SEQ ID NO: 140031 - DNA, 2334 bp, Artificial Sequence
  derived and/or modified sequence
atggatacgtccagacttggggtcctgctgtccttaccggtgttactccagcttgcaaccggcggttctagccctagatctggcgtgttgctcagaggatgccctacccattgccactgcgaaccagacggaagaatgctgttgcgtgtagactgttccgatctcggtctctctgaactcccttcaaatttatccgttttcactagttatctggatctcagcatgaacaatatctcacagctgctacctaaccctctcccatctttgcgcttcctggaggaactgcgactggctgggaatgccctgacctacatccccaaaggcgcttttacggggctgtattctctgaaggttctgatgcttcagaacaaccaactgcgacacgtgccaaccgaggcccttcagaaccttcgcagtcttcaatccctgcgtctggacgccaaccacatctcctatgtcccaccttcatgcttttctggactgcattccctccgtcatctctggttggatgataacgccctgactgaaatccctgtccaggctttcaggagcctgtccgccctgcaggctatgaccctggccctcaacaaaatccatcatattccagactatgctttcggaaatctttcatccctggtggtcctgcacctgcataacaatagaatccactcgctggggaaaaagtgcttcgatgggctgcacagcttggaaacactagatctgaactataataacctggacgaatttccaacggcaatccgaacattatcaaatctcaaagagttaggatttcattctaacaacattcgcagtattcctgaaaaggcgtttgtgggaaacccatccttgattaccatccacttctatgataatccaatccagttcgtgggacgaagcgctttccagcacctccctgagcttcgtaccctgactctgaatggggctagtcaaattaccgagttccctgatctcaccggcaccgccaatcttgaaagccttactctgactggcgcacagatctcgtccctgcctcagaccgtctgtaaccaactgcccaacttacaagtcctggacctctcatacaacttgctggaggacctgccttcgttcagcgtttgccagaaactccagaaaattgatcttcgtcacaacgaaatttacgaaatcaaagtggatacatttcaacagctgctctctttgcgctcgctcaacctagcgtggaacaaaattgcgattatacaccctaacgccttttccacccttccatcgcttatcaagctggatctcagctccaacctcctgtccagcttccccatcaccggattgcacggactcactcatttgaaactgacaggcaaccatgccctgcagtcattgatttcaagcgagaattttcccgagctcaaagtgatcgagatgccttatgcttatcaatgttgcgcttttggcgtgtgcgaaaacgcctacaagatcagtaaccaatggaataagggagacaactctagcatggacgatctccataagaaagatgccggaatgttccaagcccaagacgaaagggacctggaggactttctgttagactttgaagaggacctcaaggcacttcatagcgtgcagtgttccccaagtccagggccattcaagccttgtgaacacttattggatggctggcttatccgtataggtgtatggacgatcgctgtcctggccctcacttgtaacgctctcgtgacctcaaccgtttttcgcagccccctatatatttctcctatcaaactgctgattggcgttatcgccgcagttaatatgctgaccggggtgtcttcagcagtgctcgccggagttgatgcctttactttcggatcattcgctagacatggggcttggtgggagaatggggtgggttgtcacgtgattggcttcctctcaattttcgcctcagagtcttctgtgttcctgctgacactggctgctttagagcgtggcttttccgtaaagtacagcgccaagttcgagacgaaggcaccattttcgtctctaaaggttatcattctgctctgtgccctgttagccttaactatggcagcagtgccactactcggtggctcaaagtatggagcctcccccctctgtcttcccctactgccacatgacgatcactgtctccaccaggccctgcttcagtttggacaggggcgaccaggcgaatatcttgggctgttatacggaaagacacattgcccggtcgccctgcatcaacttcatcccaaattgccctgcggttttctggtgttattgctgtttaataagccttatatctaccaatcatag

SEQ ID NO: 140032 - DNA, 2724 bp, Artificial Sequence
  derived and/or modified sequence
atggacaccagcagactgggcgtgctgctgagcctgcccgtgctgctgcagctggccaccggcggcagcagccccagaagcggcgtgctgctgagaggctgccccacccactgccactgcgagcccgacggcagaatgctgctgagagtggactgcagcgacctgggcctgagcgagctgcccagcaacctgagcgtgttcaccagctacctggacctgagcatgaacaacatcagccagctgctgcccaaccccctgcccagcctgagattcctggaggagctgagactggccggcaacgccctgacctacatccccaagggcgccttcaccggcctgtacagcctgaaggtgctgatgctgcagaacaaccagctgagacacgtgcccaccgaggccctgcagaacctgagaagcctgcagagcctgagactggacgccaaccacatcagctacgtgccccccagctgcttcagcggcctgcacagcctgagacacctgtggctggacgacaacgccctgaccgagatccccgtgcaggccttcagaagcctgagcgccctgcaggccatgaccctggccctgaacaagatccaccacatccccgactacgccttcggcaacctgagcagcctggtggtgctgcacctgcacaacaacagaatccacagcctgggcaagaagtgcttcgacggcctgcacagcctggagaccctggacctgaactacaacaacctggacgagttccccaccgccatcagaaccctgagcaacctgaaggagctgggcttccacagcaacaacatcagaagcatccccgagaaggccttcgtgggcaaccccagcctgatcaccatccacttctacgacaaccccatccagttcgtgggcagaagcgccttccagcacctgcccgagctgagaaccctgaccctgaacggcgccagccagatcaccgagttccccgacctgaccggcaccgccaacctggagagcctgaccctgaccggcgcccagatcagcagcctgccccagaccgtgtgcaaccagctgcccaacctgcaggtgctggacctgagctacaacctgctggaggacctgcccagcttcagcgtgtgccagaagctgcagaagatcgacctgagacacaacgagatctacgagatcaaggtggacaccttccagcagctgctgagcctgagaagcctgaacctggcctggaacaagatcgccatcatccaccccaacgccttcagcaccctgcccagcctgatcaagctggacctgagcagcaacctgctgagcagcttccccatcaccggcctgcacggcctgacccacctgaagctgaccggcaaccacgccctgcagagcctgatcagcagcgagaacttccccgagctgaaggtgatcgagatgccctacgcctaccagtgctgcgccttcggcgtgtgcgagaacgcctacaagatcagcaaccagtggaacaagggcgacaacagcagcatggacgacctgcacaagaaggacgccggcatgttccaggcccaggacgagagagacctggaggacttcctgctggacttcgaggaggacctgaaggccctgcacagcgtgcagtgcagccccagccccggccccttcaagccctgcgagcacctgctggacggctggctgatcagaatcggcgtgtggaccatcgccgtgctggccctgacctgcaacgccctggtgaccagcaccgtgttcagaagccccctgtacatcagccccatcaagctgctgatcggcgtgatcgccgccgtgaacatgctgaccggcgtgagcagcgccgtgctggccggcgtggacgccttcaccttcggcagcttcgccagacacggcgcctggtgggagaacggcgtgggctgccacgtgatcggcttcctgagcatcttcgccagcgagagcagcgtgttcctgctgaccctggccgccctggagagaggcttcagcgtgaagtacagcgccaagttcgagaccaaggcccccttcagcagcctgaaggtgatcatcctgctgtgcgccctgctggccctgaccatggccgccgtgcccctgctgggcggcagcaagtacggcgccagccccctgtgcctgcccctgcccttcggcgagcccagcaccatgggctacatggtggccctgatcctgctgaacagcctgtgcttcctgatgatgaccatcgcctacaccaagctgtactgcaacctggacaagggcgacctggagaacatctgggactgcagcatggtgaagcacatcgccctgctgctgttcaccaactgcatcctgaactgccccgtggccttcctgagcttcagcagcctgatcaacctgaccttcatcagccccgaggtgatcaagttcatcctgctggtggtggtgcccctgcccgcctgcctgaaccccctgctgtacatcctgttcaacccccacttcaaggaggacctggtgagcctgagaaagcagacctacgtgtggaccagaagcaagcaccccagcctgatgagcatcaacagcgacgacgtggagaagcagagctgcgacagcacccaggccctggtgaccttcaccagcagcagcatcacctacgacctgccccccagcagcgtgcccagccccgcctaccccgtgaccgagagctgccacctgagcagcgtggccttcgtgccctgcctgtag

SEQ ID NO: 140033 - DNA, 2334 bp, Artificial Sequence
  derived and/or modified sequence
atggacaccagcagactgggcgtgctgctgagcctgcccgtgctgctgcagctggccaccggcggcagcagccccagaagcggcgtgctgctgagaggctgccccacccactgccactgcgagcccgacggcagaatgctgctgagagtggactgcagcgacctgggcctgagcgagctgcccagcaacctgagcgtgttcaccagctacctggacctgagcatgaacaacatcagccagctgctgcccaaccccctgcccagcctgagattcctggaggagctgagactggccggcaacgccctgacctacatccccaagggcgccttcaccggcctgtacagcctgaaggtgctgatgctgcagaacaaccagctgagacacgtgcccaccgaggccctgcagaacctgagaagcctgcagagcctgagactggacgccaaccacatcagctacgtgccccccagctgcttcagcggcctgcacagcctgagacacctgtggctggacgacaacgccctgaccgagatccccgtgcaggccttcagaagcctgagcgccctgcaggccatgaccctggccctgaacaagatccaccacatccccgactacgccttcggcaacctgagcagcctggtggtgctgcacctgcacaacaacagaatccacagcctgggcaagaagtgcttcgacggcctgcacagcctggagaccctggacctgaactacaacaacctggacgagttccccaccgccatcagaaccctgagcaacctgaaggagctgggcttccacagcaacaacatcagaagcatccccgagaaggccttcgtgggcaaccccagcctgatcaccatccacttctacgacaaccccatccagttcgtgggcagaagcgccttccagcacctgcccgagctgagaaccctgaccctgaacggcgccagccagatcaccgagttccccgacctgaccggcaccgccaacctggagagcctgaccctgaccggcgcccagatcagcagcctgccccagaccgtgtgcaaccagctgcccaacctgcaggtgctggacctgagctacaacctgctggaggacctgcccagcttcagcgtgtgccagaagctgcagaagatcgacctgagacacaacgagatctacgagatcaaggtggacaccttccagcagctgctgagcctgagaagcctgaacctggcctggaacaagatcgccatcatccaccccaacgccttcagcaccctgcccagcctgatcaagctggacctgagcagcaacctgctgagcagcttccccatcaccggcctgcacggcctgacccacctgaagctgaccggcaaccacgccctgcagagcctgatcagcagcgagaacttccccgagctgaaggtgatcgagatgccctacgcctaccagtgctgcgccttcggcgtgtgcgagaacgcctacaagatcagcaaccagtggaacaagggcgacaacagcagcatggacgacctgcacaagaaggacgccggcatgttccaggcccaggacgagagagacctggaggacttcctgctggacttcgaggaggacctgaaggccctgcacagcgtgcagtgcagccccagccccggccccttcaagccctgcgagcacctgctggacggctggctgatcagaatcggcgtgtggaccatcgccgtgctggccctgacctgcaacgccctggtgaccagcaccgtgttcagaagccccctgtacatcagccccatcaagctgctgatcggcgtgatcgccgccgtgaacatgctgaccggcgtgagcagcgccgtgctggccggcgtggacgccttcaccttcggcagcttcgccagacacggcgcctggtgggagaacggcgtgggctgccacgtgatcggcttcctgagcatcttcgccagcgagagcagcgtgttcctgctgaccctggccgccctggagagaggcttcagcgtgaagtacagcgccaagttcgagaccaaggcccccttcagcagcctgaaggtgatcatcctgctgtgcgccctgctggccctgaccatggccgccgtgcccctgctgggcggcagcaagtacggcgccagccccctgtgcctgcccctgctgccccacgacgaccactgcctgcaccaggccctgctgcagttcggccagggcagacccggcgagtacctgggcctgctgtacggcaagacccactgccccgtggccctgcaccagctgcaccccaagctgccctgcggcttcctggtgctgctgctgttcaacaagccctacatctaccagagctag

SEQ ID NO: 140034 - protein, 412 aa, Artificial Sequence
  derived and/or modified sequence
MERIPSAQPPPACLPKAPGLEHGDLPGMYPAHMYQVYKSRRGIKRSEDSKETYKLPHRLIEKKRRDRINECIAQLKDLLPEHLKLTTLGHLEKAVVLELTLKHVKALTNLIDQQQQKIIALQSGLQAGELSGRNVETGQEMFCSGFQTCAREVLQYLAKHENTRDLKSSQLVTHLHRVVSELLQGGTSRKPSDPAPKVMDFKEKPSSPAKGSEGPGKNCVPVIQRTFAHSSGEQSGSDTDTDSGYGGESEKGDLRSEQPCFKSDHGRRFTMGERIGAIKQESEEPPTKKNRMQLSDDEGHFTSSDLISSPFLGPHPHQPPFCLPFYLIPPSATAYLPMLEKCWYPTSVPVLYPGLNASAAALSSFMNPDKISAPLLMPQRLPSPLPAHPSVDSSVLLQALKPIPPLNLETKD

SEQ ID NO: 140035 - DNA, 1239 bp, Artificial Sequence
  derived and/or modified sequence
atggagaggataccctccgcgcagcccccgcccgcctgcttacccaaagctcctggactggagcacggcgatctccccggcatgtacccagcccacatgtatcaggtgtacaaatctagaaggggtatcaaacggagcgaagattcgaaggagacctacaaactcccccacagactcattgaaaaaaaacgcagagacagaattaacgagtgcattgcccagctgaaggacttgctgccagaacatttaaagctaaccactctagggcacctggagaaagcagtcgtgctggaactgacactgaaacatgtgaaagcactgacaaacctaattgatcagcagcagcaaaagataatcgctctgcaaagtggtctacaggccggtgagctgtcaggacgaaacgtggagaccggtcaggaaatgttttgcagcgggttccagacatgtgctcgcgaagttctccagtatctggctaaacacgagaataccagggacctaaaatcttcccagcttgttactcatctacatcgagtggtcagtgagttgctccaaggaggcactagccggaagccatccgatcccgcacctaaagtgatggattttaaagagaagcctagctcaccggccaaggggtctgaaggccccggcaagaactgtgtcccagttatccagcggaccttcgctcactcctccggcgagcagagcggatctgatactgatacagattccgggtacggcggggagtccgaaaagggtgatcttagatcagaacagccatgttttaagtcagaccatggccgaagatttaccatgggtgagcgaatcggggccatcaaacaggaatcagaagagcccccgactaagaagaatcgcatgcagttgtccgatgatgaagggcactttacctctagcgatttgattagctctccattcctggggccacacccacatcaaccacccttttgcctccctttttacctgatccctccatccgccaccgcgtatctgcccatgctagagaagtgctggtaccctaccagcgtgcccgtgctgtaccccggacttaacgcctcagccgcggccttaagctcctttatgaacccggacaagattagcgctcctctcttgatgccacagcgactcccttcccctctgccagcccacccgtctgtcgacagcagtgtcttactgcaggccctcaaacctatcccccctctgaatctcgagaccaaagattag

SEQ ID NO: 140036 - DNA, 1239 bp, Artificial Sequence
  derived and/or modified sequence
atggagcgcatccccagcgcccagcccccaccagcctgcctgcccaaggcccctggcctggagcacggggacctgcccggcatgtacccagcccacatgtaccaggtgtacaagagccggcggggcatcaagagaagtgaggacagcaaggagacctacaagctgccccacaggctcatcgagaagaagaggcgggaccgcatcaatgaatgcatcgcccagctgaaggacctgctgcctgagcacctgaagctgaccaccctgggccacctggagaaggctgtggtgctggagctgaccctgaagcacgtgaaggccctgaccaacctgattgaccagcagcagcagaagatcatcgccctgcagagcggcctgcaggccggggagctgtctggaagaaatgtggagaccggccaggagatgttctgcagcggcttccagacctgtgcccgggaggtgctgcagtacctggccaagcatgagaacacccgggacctgaagagcagccagctggtgacccacctgcaccgggtggtgtctgagctgctgcagggcggcaccagcaggaagcccagcgaccctgcccccaaggtgatggacttcaaggagaagcccagcagccctgccaagggcagcgagggccctgggaagaactgtgtgcctgtgatccagaggacctttgcccacagcagtggagagcagagcggcagtgacacagacacagattctggctatggaggagagagcgagaagggggacctgcggtctgagcagccctgcttcaagagtgaccatggaagacgcttcaccatgggagagagaattggagccatcaagcaggagagcgaggagccccccaccaagaagaacaggatgcagctgagtgatgatgagggccacttcaccagcagtgacctgatcagcagccccttcctgggcccccacccccaccagccccccttctgcctgcccttctacctgatccccccatctgccacagcctacctgcccatgctggagaagtgctggtaccccacctctgtgcctgtgctgtacccaggcctgaatgccagcgctgctgccctgagcagcttcatgaacccagacaagatcagcgcccccctgctgatgccccagaggctgcccagccccctgcctgcccaccccagcgtggacagctctgtgctgctgcaggccctgaagcccatcccccccctgaacctggagaccaaggactag

SEQ ID NO: 140037 - DNA, 1239 bp, Artificial Sequence
  derived and/or modified sequence
atggagcggatccccagcgcccagcccccccccgcctgcctgcccaaagctcctgggctggagcatggcgacctgcctggtatgtaccctgcccatatgtaccaagtgtataaaagccggcggggtataaaaagatccgaggactctaaagaaacatataaactcccccacaggttgattgaaaaaaagcgtagggacagaatcaacgaatgcatcgcacagctcaaggatctcctgccagagcaccttaagctcaccactctagggcaccttgagaaagccgtggtgctcgaacttactctgaagcacgtcaaagcgctcactaacctaatcgaccagcagcagcagaagatcatcgcccttcagtctggtctacaggccggggagctgtcgggccgtaacgtggagaccgggcaggagatgttttgttccgggttccaaacctgtgcccgggaagttctgcagtatctggccaaacacgagaacacccgggacctaaaatcaagtcagctcgtgacgcaccttcaccgcgtggttagcgaactgcttcagggaggaactagtagaaaaccatctgatcccgctccaaaagtaatggacttcaaagaaaaaccatcttcccctgcgaaaggctctgagggacctggaaaaaactgtgttccggtaatacagagaaccttcgcccactccagcggcgagcagagtgggagtgacactgatactgattctggctacggtggcgaaagcgagaaaggcgatctgcgctctgagcagccatgctttaagagcgaccatgggcgtcgcttcactatgggagaacgcatcggcgccatcaaacaagaaagcgaagagcccccaacaaagaagaaccgcatgcagttgtctgatgacgagggccatttcacatccagtgacctgatatcctcgcctttcttggggccacatccccaccaaccgccattctgcctgcctttttatttgattcccccaagcgccacagcgtatctcccaatgctggaaaagtgctggtaccccacctccgtgccagtgctttatcccggattgaacgcttccgccgctgctttaagtagcttcatgaatcccgacaagatttccgcacctttactgatgccccagcgtctgcccagcccactccccgcccacccctctgttgactcgtccgtgctcctgcaggcactgaagccaattccgcccttaaatctggaaacaaaagattag

SEQ ID NO: 140038 - DNA, 1239 bp, Artificial Sequence
  derived and/or modified sequence
atggagaggattccctccgcccagccccctcccgcatgtctgcctaaagcacccggtcttgagcatggggacctcccaggtatgtatcccgcacatatgtatcaagtgtacaaatctagacgcggaatcaagaggagcgaggattcgaaggagacctacaagctaccccaccgtctcatcgagaagaagcggagggatcgcattaatgagtgcatcgcacagttaaaagacctgctacccgagcatttgaagttgaccactctaggccacttggaaaaggccgtggtcttggaattaaccctgaagcacgtgaaagccctgaccaaccttatcgatcagcaacaacaaaagattatcgccttacaatccggtttacaggctggagaactgtctggcagaaacgtcgaaaccgggcaggagatgttttgctcagggttccaaacctgtgctagggaagtgttgcagtacctggcaaagcacgaaaacacccgtgacctcaagtctagccaactcgtcactcacttgcatcgcgttgtcagcgagctactgcagggcggtacatcccgaaagccatcagacccagcccctaaggttatggattttaaagagaagccatccagcccggcaaaaggatctgagggtcctgggaagaattgtgtgccagtaatccagcggaccttcgcccactcgagcggcgagcaatcagggtccgacaccgacacagactccggctatggaggtgagtctgagaagggcgacttaagatcggagcaaccatgctttaaaagcgatcacgggcgtcgatttacaatgggggaacgtatcggggcaatcaaacaggagtctgaggaaccacccactaagaagaataggatgcagttgtctgatgatgaggggcatttcacctctagcgatctcatttcctccccatttctgggcccacacccgcaccagcctccgttctgcctgcctttttacctaattcctccctccgccaccgcatacctcccaatgctcgagaaatgttggtaccctacatcggtgcccgttctgtaccccggacttaacgcatccgcagcggctctgtcatcatttatgaacccagacaagatttcggcccctctgctcatgccccagcgcctgcccagcccactgcctgcacacccctccgttgatagcagcgtgcttttgcaggcacttaagcccatcccacctctgaatcttgaaacaaaggattag

SEQ ID NO: 140039 - DNA, 3473 bp, Artificial Sequence
  derived and/or modified sequence
gcggccgcagccgcagacacctgggggccggggctgggggtgggggctccctagcagccgccggagcgttgtccaacacgtgagactcatgtgatgaagccgggggagggcgggcaggtcgctccttccctccccggcagtggccagacgtgcctggagtcacagggtagaacacgtagctccaacccacccactcgctcccatttaacccagcccgcagcctctccattactcctcggcttgcccccccacccccccactccgccctaaccgcccccccctcacccgctccctcccgcctccccgcccgccccacttctcattcacttggctcgcacggcgcagacagaccgcgcagggagcacacaccgccagtctgtgcgctgagtcggagccagaggccgcggggacaccgggccatgcacgcccccaactgaagctgcatctcaaagccgaagattccagcagcccaggggatttcaaagagctcagactcagaggaacatctgcggagagacccccgaagccctctccagggcagtcctcatccagacgctccgctagtgcagacaggagcgcgcagtggccccggctcgccgcgccatggagcggatccccagcgcgcaaccaccccccgcctgcctgcccaaagcaccgggactggagcacggagacctaccagggatgtaccctgcccacatgtaccaagtgtacaagtcaagacggggaataaagcggagcgaggacagcaaggagacctacaaattgccgcaccggctcatcgagaaaaagagacgtgaccggattaacgagtgcatcgcccagctgaaggatctcctacccgaacatctcaaacttacaactttgggtcacttggaaaaagcagtggttcttgaacttaccttgaagcatgtgaaagcactaacaaacctaattgatcagcagcagcagaaaatcattgccctgcagagtggtttacaagctggtgagctgtcagggagaaatgtcgaaacaggtcaagagatgttctgctcaggtttccagacatgtgcccgggaggtgcttcagtatctggccaagcacgagaacactcgggacctgaagtcttcgcagcttgtcacccacctccaccgggtggtctcggagctgctgcagggtggtacctccaggaagccatcagacccagctcccaaagtgatggacttcaaggaaaaacccagctctccggccaaaggttcggaaggtcctgggaaaaactgcgtgccagtcatccagcggactttcgctcactcgagtggggagcagagcggcagcgacacggacacagacagtggctatggaggagaatcggagaagggcgacttgcgcagtgagcagccgtgcttcaaaagtgaccacggacgcaggttcacgatgggagaaaggatcggcgcaattaagcaagagtccgaagaaccccccacaaaaaagaaccggatgcagctttcggatgatgaaggccatttcactagcagtgacctgatcagctccccgttcctgggcccacacccacaccagcctcctttctgcctgcccttctacctgatcccaccttcagcgactgcctacctgcccatgctggagaagtgctggtatcccacctcagtgccagtgctatacccaggcctcaacgcctctgccgcagccctctctagcttcatgaacccagacaagatctcggctcccttgctcatgccccagagactcccttctcccttgccagctcatccgtccgtcgactcttctgtcttgctccaagctctgaagccaatcccccctttaaacttagaaaccaaagactaaactctctaggggatcctgctgctttgctttccttcctcgctacttcctaaaaagcaacaaaaaagtttttgtgaatgctgcaagattgttgcattgtgtatactgagataatctgaggcatggagagcagattcagggtgtgtgtgtgtgtgtgtgtgtgtgtatgtgcgtgtgcgtgcacatgtgtgcctgcgtgttggtataggactttaaagctccttttggcatagggaagtcacgaaggattgcttgacatcaggagacttgggggggattgtagcagacgtctgggcttttccccacccagagaatagcccccttcgatacacatcagctggattttcaaaagcttcaaagtcttggtctgtgagtcactcttcagtttgggagctgggtctgtggctttgatcagaaggtactttcaaaagagggctttccagggctcagctcccaaccagctgttaggaccccacccttttgcctttattgtcgacgtgactcaccagacgtcggggagagagagcagtcagaccgagctttctgctaacatggggaggtagcaggcactggcatagcacggtagtggtttggggaggtttccgcaggtctgctccccacccctgcctcggaagaataaagagaatgtagttccctactcaggctttcgtagtgattagcttactaaggaactgaaaatgggccccttgtacaagctgagctgccccggagggagggaggagttccctgggcttctggcacctgtttctaggcctaaccattagtacttactgtgcagggaaccaaaccaaggtctgagaaatgcggacaccccgagcgagcaccccaaagtgcacaaagctgagtaaaaagctgcccccttcaaacagaactagactcagttttcaattccatcctaaaactccttttaaccaagcttagcttctcaaaggcctaaccaagccttggcaccgccagatcctttctgtaggctaattcctcttgcccaacggcatatggagtgtccttattgctaaaaaggattccgtctccttcaaagaagttttatttttggtccagagtacttgttttcccgatgtgtccagccagctccgcagcagcttttcaaaatgcactatgcctgattgctgatcgtgttttaactttttcttttcctgtttttattttggtattaagtcgttgcctttatttgtaaagctgttataaatatatattatataaatatattaaaaaggaaaatgtttcagatgtttatttgtataattacttgattcacacagtgagaaaaaatgaatgtattcctgtttttgaagagaagaataattttttttttctctagggagaggtacagtgtttatattttggagccttcctgaaggtgtaaaattgtaaatatttttatctatgagtaaatgttaagtagttgttttaaaatacttaataaaataattcttttcctgtggaagagaaagatggtctcctgagttttttaaaatagctcacttggtgtgatatggctgactcccatgtccttctttcttggctgaagcaaaccagttaatctcagtgtaatttcattcagcttttcatgtgctttgtattcaatcagaata

SEQ ID NO: 140040 - DNA, 1239 bp, Artificial Sequence
  derived and/or modified sequence
atggagagaatccccagcgcccagcccccccccgcctgcctgcccaaggcccccggcctggagcacggcgacctgcccggcatgtaccccgcccacatgtaccaggtgtacaagagcagaagaggcatcaagagaagcgaggacagcaaggagacctacaagctgccccacagactgatcgagaagaagagaagagacagaatcaacgagtgcatcgcccagctgaaggacctgctgcccgagcacctgaagctgaccaccctgggccacctggagaaggccgtggtgctggagctgaccctgaagcacgtgaaggccctgaccaacctgatcgaccagcagcagcagaagatcatcgccctgcagagcggcctgcaggccggcgagctgagcggcagaaacgtggagaccggccaggagatgttctgcagcggcttccagacctgcgccagagaggtgctgcagtacctggccaagcacgagaacaccagagacctgaagagcagccagctggtgacccacctgcacagagtggtgagcgagctgctgcagggcggcaccagcagaaagcccagcgaccccgcccccaaggtgatggacttcaaggagaagcccagcagccccgccaagggcagcgagggccccggcaagaactgcgtgcccgtgatccagagaaccttcgcccacagcagcggcgagcagagcggcagcgacaccgacaccgacagcggctacggcggcgagagcgagaagggcgacctgagaagcgagcagccctgcttcaagagcgaccacggcagaagattcaccatgggcgagagaatcggcgccatcaagcaggagagcgaggagccccccaccaagaagaacagaatgcagctgagcgacgacgagggccacttcaccagcagcgacctgatcagcagccccttcctgggcccccacccccaccagccccccttctgcctgcccttctacctgatcccccccagcgccaccgcctacctgcccatgctggagaagtgctggtaccccaccagcgtgcccgtgctgtaccccggcctgaacgccagcgccgccgccctgagcagcttcatgaaccccgacaagatcagcgcccccctgctgatgccccagagactgcccagccccctgcccgcccaccccagcgtggacagcagcgtgctgctgcaggccctgaagcccatcccccccctgaacctggagaccaaggactag

SEQ ID NO: 140041 - protein, 459 aa, Artificial Sequence
  derived and/or modified sequence
MKRKSERRSSWAAAPPCSRRCSSTSPGVKKIRSSTQQDPRRRDPQDDVYLDITDRLCFAILYSRPKSASNVHYFSIDNELEYENFYADFGPLNLAMVYRYCCKINKKLKSITMLRKKIVHFTGSDQRKQANAAFLVGCYMVIYLGRTPEEAYRILIFGETSYIPFRDAAYGSCNFYITLLDCFHAVKKAMQYGFLNFNSFNLDEYEHYEKAENGDLNWIIPDRFIAFCGPHSRARLESGYHQHSPETYIQYFKNHNVTTIIRLNKRMYDAKRFTDAGFDHHDLFFADGSTPTDAIVKEFLDICENAEGAIAVHCKAGLGRTGTLIACYIMKHYRMTAAETIAWVRICRPGSVIGPQQQFLVMKQTNLWLEGDYFRQKLKGQENGQHRAAFSKLLSGVDDISINGVENQDQQEPEPYSDDDEINGVTQGDRLRALKSRRQSKTNAIPLTLSISRTKTVLR

SEQ ID NO: 140042 - DNA, 1380 bp, Artificial Sequence
  derived and/or modified sequence
atgaaacggaagtcagagcggcggtcctcatgggccgctgcacctccctgctctcgcagatgtagttccacctcgccaggcgtcaaaaagatccgaagctcaactcagcaggatcccaggagacgggacccccaggacgatgtctacctcgacattacagacagactttgcttcgctatactatatagccgaccaaaatcggcatctaacgtccattacttttctatcgacaatgaattggaatacgaaaatttttatgccgatttcggtccattaaacctggccatggtgtacagatactgctgtaagatcaataagaagcttaaatccataaccatgctcaggaagaagatagttcactttactggcagtgatcagagaaagcaggccaatgctgcattcctggtggggtgctacatggttatttatttgggcagaacccccgaagaagcttaccgtatcttaatcttcggtgagactagttatatcccctttagggacgctgcctatgggtcttgtaacttctatataacactgctcgactgtttccacgcagtgaaaaaggcgatgcagtacggcttccttaattttaattcgttcaatttggatgagtatgaacactacgagaaagctgaaaacggggacctcaattggatcattccggataggttcatcgccttctgtggcccacacagtcgtgctagactggagtctggatatcatcagcacagtccggagacttatattcagtattttaagaaccacaatgtaacaactatcatccggctgaacaaaaggatgtacgacgctaagagattcacggatgctggctttgatcatcacgatctgtttttcgcggatgggtccacaccaaccgatgccatcgtcaaggaattcctcgacatctgcgaaaatgctgagggcgccattgccgtgcactgcaaagccgggcttggccgcacgggcaccctgatcgcatgctacatcatgaaacactataggatgacagccgccgaaactattgcttgggtgagaatctgtaggcccggaagtgtgatcgggccccagcagcagttcctcgtgatgaaacagaccaatctctggctcgaaggcgactatttcagacaaaaacttaaaggccaggagaacggccagcatcgagcagccttttccaaactattgtcaggtgtcgacgacatctccatcaatggagtcgaaaaccaggaccagcaggagcctgaaccctactccgacgacgacgaaataaacggagtgacacagggcgatcggctgcgggcgttaaagagcagaagacagtcaaaaactaatgccatcccgctgaccttgtccatctcaagaaccaagaccgtgctgcggtag

SEQ ID NO: 140043 - DNA, 1380 bp, Artificial Sequence
  derived and/or modified sequence
atgaagaggaagtcagaaagaagaagctcctgggccgccgccccaccctgcagccgccgctgcagcagcaccagccctggggtgaagaagatccgcagcagcacccagcaggaccccaggagaagagacccccaggatgatgtgtacctggacatcacagaccggctgtgctttgccatcctgtacagccggcccaagagcgccagcaatgtgcactacttcagcattgacaatgagctggagtatgagaacttctatgctgactttggccccctgaacctggccatggtgtaccgctactgctgcaagatcaacaagaagctgaagagcatcaccatgctgaggaagaagatcgtgcacttcaccggcagtgaccagaggaagcaggccaatgctgccttcctggtgggctgctacatggtgatctacctgggccgcaccccagaggaggcctaccgcatcctgatctttggagagaccagctacatccccttcagagatgctgcctacggcagctgcaacttctacatcaccctgctggactgcttccacgctgtgaagaaggccatgcagtatggcttcctgaacttcaacagcttcaacctggatgaatatgagcactatgagaaggccgagaatggagacctgaactggatcatcccagaccgcttcatcgccttctgtggcccccacagccgggcccggctggagagcggctaccaccagcacagccctgagacctacatccagtacttcaagaaccacaacgtgaccaccatcatccggctgaacaagaggatgtatgatgccaagcgcttcacagatgctggctttgaccaccacgacctcttctttgctgatggcagcacccccacagatgccatcgtgaaggagttcctggacatctgtgaaaatgctgagggcgccatcgctgtgcactgcaaggccggcctgggccgcacaggcaccctgattgcctgctacatcatgaagcactacaggatgacagctgctgagaccatcgcctgggtgcgcatctgcaggcctggctctgtgattggcccccagcagcagttcctggtgatgaagcagaccaacctgtggctggagggggactacttccggcagaagctgaagggccaggagaatggccagcaccgggccgccttcagcaagctgctgtctggagtggatgacatcagcatcaatggagtggagaaccaggaccagcaggagcctgagccctacagtgatgatgatgagatcaatggagtgacccagggcgaccggctgcgggccctgaagagccggcggcagagcaagaccaatgccatccccctgaccctgagcatcagcaggaccaagacagtgctgaggtag

SEQ ID NO: 140044 - DNA, 1380 bp, Artificial Sequence
  derived and/or modified sequence
atgaagcggaagagcgagcggcggagcagctgggccgccgcccccccctgctcccgccgctgctcttccacctcaccgggggtgaagaaaatcaggtcgagcacccagcaggatccccgtcgtcgggatcctcaggatgatgtttatctggatatcaccgatcgcctgtgctttgcaatcctgtattcacgaccgaaatctgctagtaacgtgcactacttctccattgacaatgaactcgagtatgagaacttctacgcagacttcggtccactgaacctagccatggtgtataggtattgctgcaagattaacaaaaagcttaagtccataaccatgctgagaaaaaaaatagtgcacttcactggaagcgaccagcggaaacaagctaatgctgcatttcttgttggttgctacatggtaatatacttgggtcggactcctgaagaggcctaccggatccttatctttggcgaaacgagctacatcccctttcgcgacgccgcgtacggctcatgtaatttttacataaccctgctggattgctttcatgccgtaaagaaggcaatgcagtatgggtttctgaatttcaactcttttaatctggatgagtatgaacattacgagaaggcggagaatggggatttgaactggattattcctgataggttcattgctttctgcgggccgcactcccgggcaagattagaatctggctaccatcaacactcgccagagacctacatccagtactttaaaaatcacaatgtaacaacaatcatcagacttaacaagcgaatgtacgatgccaagaggttcactgacgcggggtttgaccaccacgatctgttcttcgctgatggatcaaccccaacggatgccattgtcaaagaatttttggacatttgtgaaaatgcggaaggcgctattgctgtgcactgtaaagccgggctgggtaggacaggcaccctgatcgcatgttacattatgaagcattatagaatgactgctgcagagaccattgcatgggtgcggatatgcagacctggaagcgttattggtccacagcagcagtttctagtgatgaaacaaacaaacctgtggctcgaaggcgattatttcaggcaaaagctgaaagggcaggagaacggccagcacagagccgcattttcgaaattgctgagtggggtcgatgacatctcaataaatggagtcgagaatcaggaccagcaggagccagagccctactcagacgacgacgagatcaatggcgtcacccagggggaccgattaagggctctgaagagtagacgccaatccaagaccaacgcgatacctctgactctttcaatcagtcgaaccaagaccgtcctccgttag

SEQ ID NO: 140045 - DNA, 1380 bp, Artificial Sequence
  derived and/or modified sequence
atgaagaggaagtctgagaggcgcagtagctgggccgcagctcccccttgctctcgcaggtgcagcagcactagccccggagttaaaaagattaggtcctcaacccaacaggacccgagacgaagagatccgcaggatgatgtgtatctggatatcaccgaccgcctctgtttcgccattctctactcccgcccaaagagcgcctccaatgtgcactacttctccatagacaacgagttagaatacgagaacttttatgccgatttcggacctctgaatctggcaatggtgtatcggtattgttgcaaaatcaacaaaaagcttaaatctataaccatgttacgaaaaaagattgtgcattttactggatctgaccagcgcaagcaggccaatgccgcatttcttgtagggtgctatatggtcatctatttaggaaggacacccgaagaggcataccgaatcctgatctttggagaaactagctacattccttttcgggatgctgcatacggatcttgcaacttctacataaccctccttgattgctttcacgccgtcaagaaggccatgcagtatggtttcctgaacttcaatagctttaacctggatgagtatgaacactacgagaaagccgaaaatggcgatctcaactggattattcctgataggttcatagccttttgcgggccacattcgcgagctcgtctggaatctggttatcatcagcacagcccagagacctacatccagtattttaagaaccacaacgtcactactattatacggctgaataagagaatgtatgacgcgaagaggttcactgacgcgggttttgatcaccacgacttgttcttcgccgatgggagcacccccacagacgctatagtgaaggaattcctggatatctgtgaaaacgcagaaggggcaatagctgttcattgtaaagcagggctgggtaggaccggaaccctgatcgcctgttacattatgaagcactatcgtatgacagccgctgagaccatagcttgggtaagaatctgcaggcccggttcggttatcggcccacagcagcagttcctggtcatgaagcaaactaacctgtggcttgagggagactactttaggcaaaagctaaagggacaggagaatggtcaacatagagctgcattttctaaattgcttagcggggtagatgatatcagcattaatggagtcgaaaatcaggaccagcaggaacccgaaccctattccgatgacgacgagattaatggcgtcacccagggggaccgtctaagggccctcaagagccggaggcagagcaagactaacgctatcccactgactctgagcataagccgtacgaagactgtgctccgctag

SEQ ID NO: 140046 - DNA, 2547 bp, Artificial Sequence
  derived and/or modified sequence
atgaagcggaaaagcgagcggcggtcgagctgggccgccgcgcccccctgctcgcggcgctgctcgtcgacctcgccgggtgtgaagaagatccgcagctccacgcagcaagacccgcgccgccgggacccccaggacgacgtgtacctggacatcaccgatcgcctttgttttgccattctctacagcagaccaaagagtgcatcaaatgtacattatttcagcatagataatgaacttgaatatgagaacttctacgcagattttggaccactcaatctggcaatggtttacagatattgttgcaagatcaataagaaattaaagtccattacaatgttaaggaagaaaattgttcattttactggctctgatcagagaaaacaagcaaatgctgccttccttgttggatgctacatggttatatatttggggagaaccccagaagaagcatatagaatattaatctttggagagacatcctatattcctttcagagatgctgcctatggaagttgcaatttctacattacacttcttgactgttttcatgcagtaaagaaggcaatgcagtatggcttccttaatttcaactcatttaaccttgatgaatatgaacactatgaaaaagcagaaaatggagatttaaattggataataccagaccgatttattgccttctgtggacctcattcaagagccagacttgaaagtggttaccaccaacattctcctgagacttatattcaatattttaagaatcacaatgttactaccattattcgtctgaataaaaggatgtatgatgccaaacgctttacggatgctggcttcgatcaccatgatcttttctttgcggatggcagcacccctactgatgccattgtcaaagaattcctagatatctgtgaaaatgctgagggtgccattgcagtacattgcaaagctggccttggtcgcacgggcactctgatagcctgctacatcatgaagcattacaggatgacagcagccgagaccattgcgtgggtcaggatctgcagacctggctcggtgattgggcctcagcagcagtttttggtgatgaagcaaaccaacctctggctggaaggggactattttcgtcagaagttaaaggggcaggagaatggacaacacagagcagccttctccaaacttctctctggcgttgatgacatttccataaatggggtcgagaatcaagatcagcaagaacccgaaccgtacagtgatgatgacgaaatcaatggagtgacacaaggtgatagacttcgggccttgaaaagcagaagacaatccaaaacaaacgctattcctctcactctctccatttcaaggactaaaacagtcttgcgttaagtaaaaacctgtgaccagagctgaaggaagactctaggactgaaaactgcaacagaaattagcacaatttgaaaacaaaacaaaattgcaaaagccttagttgctttttccacctaagaagttgatcaatggagaaaatgtccactggagtttgaataatgaactttgagtttgggtgcaagcaaatgactcagagaagggtccagctctcaagctgaatgacaaacatgctgttgtaaatttagtctcaggtgtaaatacccaagccctctggtacccagggagctggctggtctgtggtgcatgtgtgtccctgtgatggcaatcattgtagttgctggccttcagaagaattgaggatctgatggaggttttttatgtatttattttctgttcaccttgtgaccctgtgtcaaaatttataaagatacaaaaggcattactgaaatggtactttctgtaatttgatactatttggcttaatcatcttcacttgactatttgtaatactgttgtaatgttaactctgttaagtacccaagctgcttgtcttccaccaaagagtgctttattaacaagaatctgtgaaaatcacatttaaacactgttgcatgttgtaagaccaggtggtaccttagtaacctaaaacttgcaagagaatattaatggtagctttagaagactcaggaggagaaactgacttcagagttggaagatgttgcaagtcgttcctttttctgtccttcagggactgaagaactgggaggctgcccattgtttggttgccagtcatacaaattaaaatcatatttccttccatgaatggaagaaacacactattggtttttccccttggaaacagcaatcccaaataatgtcggcttacaaaaaaaaaaagttaccacttttttagagtccttccctgtaacattggattttttttttcccttatgagatccacctaaggccattgacgtggcctgcgatctcagtgacaatgatctgcttctggatctcactgttgcctttggttagggaacacaactagtaactctgcagagtgccttctcccgcagccctactggaacacagcagagtctgtgccatgaagcagttacagaaacagaattgatgtgctgctaaaaaaaaaaaaaaaaatggggcccg

SEQ ID NO: 140047 - DNA, 1380 bp, Artificial Sequence
  derived and/or modified sequence
atgaagagaaagagcgagagaagaagcagctgggccgccgcccccccctgcagcagaagatgcagcagcaccagccccggcgtgaagaagatcagaagcagcacccagcaggaccccagaagaagagacccccaggacgacgtgtacctggacatcaccgacagactgtgcttcgccatcctgtacagcagacccaagagcgccagcaacgtgcactacttcagcatcgacaacgagctggagtacgagaacttctacgccgacttcggccccctgaacctggccatggtgtacagatactgctgcaagatcaacaagaagctgaagagcatcaccatgctgagaaagaagatcgtgcacttcaccggcagcgaccagagaaagcaggccaacgccgccttcctggtgggctgctacatggtgatctacctgggcagaacccccgaggaggcctacagaatcctgatcttcggcgagaccagctacatccccttcagagacgccgcctacggcagctgcaacttctacatcaccctgctggactgcttccacgccgtgaagaaggccatgcagtacggcttcctgaacttcaacagcttcaacctggacgagtacgagcactacgagaaggccgagaacggcgacctgaactggatcatccccgacagattcatcgccttctgcggcccccacagcagagccagactggagagcggctaccaccagcacagccccgagacctacatccagtacttcaagaaccacaacgtgaccaccatcatcagactgaacaagagaatgtacgacgccaagagattcaccgacgccggcttcgaccaccacgacctgttcttcgccgacggcagcacccccaccgacgccatcgtgaaggagttcctggacatctgcgagaacgccgagggcgccatcgccgtgcactgcaaggccggcctgggcagaaccggcaccctgatcgcctgctacatcatgaagcactacagaatgaccgccgccgagaccatcgcctgggtgagaatctgcagacccggcagcgtgatcggcccccagcagcagttcctggtgatgaagcagaccaacctgtggctggagggcgactacttcagacagaagctgaagggccaggagaacggccagcacagagccgccttcagcaagctgctgagcggcgtggacgacatcagcatcaacggcgtggagaaccaggaccagcaggagcccgagccctacagcgacgacgacgagatcaacggcgtgacccagggcgacagactgagagccctgaagagcagaagacagagcaagaccaacgccatccccctgaccctgagcatcagcagaaccaagaccgtgctgagatag

SEQ ID NO: 140048 - protein, 167 aa, Artificial Sequence
  derived and/or modified sequence
MATSELSCEVSEENCERREAFWAEWKDLTLSTRPEEGCSLHEEDTQRHETYHQQGQCQVLVQRSPWLMMRMGILGRGLQEYQLPYQRVLPLPIFTPAKMGATKEEREDTPIQLQELLALETALGGQCVDRQEVAEITKQLPPVVPVSKPGALRRSLSRSMSQEAQRG

SEQ ID NO: 140049 - DNA, 504 bp, Artificial Sequence
  derived and/or modified sequence
atggccaccagcgagctgagctgcgaggtgagcgaggagaactgcgagagaagagaggccttctgggccgagtggaaggacctgaccctgagcaccagacccgaggagggctgcagcctgcacgaggaggacacccagagacacgagacctaccaccagcagggccagtgccaggtgctggtgcagagaagcccctggctgatgatgagaatgggcatcctgggcagaggcctgcaggagtaccagctgccctaccagagagtgctgcccctgcccatcttcacccccgccaagatgggcgccaccaaggaggagagagaggacacccccatccagctgcaggagctgctggccctggagaccgccctgggcggccagtgcgtggacagacaggaggtggccgagatcaccaagcagctgccccccgtggtgcccgtgagcaagcccggcgccctgagaagaagcctgagcagaagcatgagccaggaggcccagagaggctag

SEQ ID NO: 140050 - DNA, 504 bp, Artificial Sequence
  derived and/or modified sequence
atggctacctccgaactaagctgcgaagtaagtgaagaaaattgcgagcgcagagaagccttctgggctgaatggaaagatcttaccctgtcgacccgcccggaagagggatgctccctgcacgaggaagatactcaacggcacgaaacttaccaccagcaggggcaatgccaggtgttggtacagaggtcaccttggctgatgatgcggatgggcatcctaggtcggggactccaagaatatcagcttccctatcagagagtcctgcctcttccaatattcacacctgctaagatgggtgccaccaaagaagagcgggaggacacccctattcagttacaagaactgttggccttggagaccgcactcggaggtcaatgtgtagaccgccaggaggtggcggaaattaccaagcagttgccacctgtcgtcccggtgtctaagcccggtgcacttcgcaggagcttgagtagatcaatgagccaggaggcacaacgggggtag

SEQ ID NO: 140051 - DNA, 504 bp, Artificial Sequence
  derived and/or modified sequence
atggccaccagcgagctgagctgtgaggtgtctgaggagaactgtgaaagaagagaggccttctgggccgagtggaaggacctgaccctgagcaccaggcctgaggagggctgcagcctgcacgaggaggacacccagagacatgagacctaccaccagcagggccagtgccaggtgctggtgcagaggagcccctggctgatgatgaggatgggcatcctgggccggggcctgcaggagtaccagctgccctaccagagggtgctgcccctgcccatcttcaccccagccaagatgggcgccaccaaggaggagcgggaggacacccccatccagctgcaggagctgctggccctggagacagccctgggcggccagtgtgtggaccggcaggaggtggccgagatcaccaagcagctgccccctgtggtgcctgtgtccaagccaggggccctgcggcgcagcctgagccgctccatgagccaggaggcccagaggggctag

SEQ ID NO: 140052 - DNA, 504 bp, Artificial Sequence
  derived and/or modified sequence
atggccaccagcgagctgagctgcgaggtgagcgaggagaactgcgaaaggcgagaggctttctgggctgaatggaaggatctgactctgagtacccgtcccgaagaaggatgcagcctccatgaagaggacactcagcgtcatgagacttaccatcagcagggacagtgtcaggtcctcgtgcagcgctcgccatggctgatgatgaggatgggaatactgggccgcgggctgcaggagtaccagcttccttaccagcgcgtgcttcctctccccatattcactcccgccaagatgggcgccactaaggaggaacgcgaggacacacccatccagctgcaagagctgctagccttggagacagccttgggcgggcagtgcgtggatcgccaggaagtggctgagatcactaagcagctccctcccgttgtgccagtgtcgaaaccgggcgcactcagacgaagtttgtctcggtctatgagccaggaagcacagcgaggatag

SEQ ID NO: 140053 - DNA, 504 bp, Artificial Sequence
  derived and/or modified sequence
atggctacctccgaactctcctgcgaagtttcagaggagaactgtgaacggagggaggcattctgggctgagtggaaagaccttacattgtccacccgaccggaagagggctgtagtctccatgaggaggatacacagagacatgaaacctaccatcagcagggccagtgccaggtcctggttcagcgaagcccctggctcatgatgaggatgggaatcttaggtaggggcttacaggagtatcaactcccttaccagcgcgtattacccctgcctatctttactccggctaaaatgggcgctaccaaggaggaacgtgaggacactccaatacaactgcaggagttactggcactggagacagcgctgggagggcagtgcgttgaccgccaggaagtggccgagatcactaaacaactgcccccagttgtgccggtgagtaagcctggagccctgcgcagaagcctttctcggagcatgagccaggaggctcaaagaggatag

SEQ ID NO: 140054 - DNA, 2123 bp, Artificial Sequence
  derived and/or modified sequence
atatgaagaaccggggacagtgctcagtaatcaatagtctgcagttctgcacccacgtgctcctgggtactctgccgtccccacagggtcctcagctcagcccctgtcactgcctctcctgccaccctttgtccactcggcagtgttctcactcctcatccccccacacccaccacctgtctgccagcctcttgcaccatgagttgctactcctggggtgctggactgtccccacagccatctgtctcccctgctccccatgaagaagagccagtcccctcccaggtagcacatcagagcgggcaggctccagagctcttctggtcctcttgcagtggccagaaagtggggaaaggggcccagagaggggcagggactgacccatggtcacacagcctatttatggctgatctggagccaggccttctgactatcacccatcagagcccctggattcccatttcacccaacacaggtgttggggtagaactgggggccctccacccctactagcctgactgtctcctgagacctgtctcctaagaccacttacctgaccactggccatggggaaggaaaacacctggccaaggctcatgccccaggttcccaggcatgaagttgactgtctccgcccctgctggtgtggtgagggtgactggggactaggcactaggcctttggtgcaggcgcctgaggacgtggttgcactctcccttctggggatatgcccttgagcccaggcagaggagagcacagccagggcaggacctggcagccctggtacagagcccagagggggcatcagttcctgctggtcctgctctgtttacagacaagctgctgtcctccctgcaaaggggagtgggtggggcagagggcaagtgccaggggggcacaaggctgggcatgtggctggcatgagacggtgtctgagtaatgtcaggcacctggaggcattgaccccaggaccttggaccccagacctctgaccggggggcagccagcgtccaggtaccccaacccctgccctgggtccggcgtccccccattagtgagtcttggctctacttatagcatctgacaccagaggggccgaaaatagcccctggagaagggggaggagggggctatttaaagggcctgggaggggagagagaatgaggagtgatcatggctacctcagagctgagctgcgaggtgtcggaggagaactgtgagcgccgggaggccttctgggcagaatggaaggatctgacactgtccacacggcccgaggagggctgctccctgcatgaggaggacacccagagacatgagacctaccaccagcaggggcagtgccaggtgctggtgcagcgctcgccctggctgatgatgcggatgggcatcctcggccgtgggctgcaggagtaccagctgccctaccagcgggtactgccgctgcccatcttcacccctgccaagatgggcgccaccaaggaggagcgtgaggacacccccatccagcttcaggagctgctggcgctggagacagccctgggtggccagtgtgtggaccgccaggaggtggctgagatcacaaagcagctgccccctgtggtgcctgtcagcaagcccggtgcacttcgtcgctccctgtcccgctccatgtcccaggaagcacagagaggctgagagggactgtgacttgggctccgctgtgcccgccctgggctgggcccttcctggctaggactgtggaggggagctgctggccatggctgctttgtagtttgcccagagttgggggctaggggaggggggagccagaggccaggatgcctgagccccctgagttcccaaagggagggtggcagagacagtgggcactaagggtggagagttgggggccagcacagctgaggaccctcagccccaggagaagggacaaaaggtactggtgagggcaagaggtgcctgggaggagtggccctgatccaggaaaatgtgaggggaatctggaacgctctaggcagaagaagctgggagggagggggaggtgaaaagggcagaggcaaggatggtggggcccccagcaccctctgttagtgccgcaataaatgctcaatcatgtgccagag

SEQ ID NO: 140055 - DNA, 501 bp, Artificial Sequence
  derived and/or modified sequence
atggccaccagcgagctgagctgcgaggtgagcgaggagaactgcgagcgccgcgaggccttctgggccgagtggaaggacctgaccctgagcacccgccccgaggagggctgcagcctgcacgaggaggacacccagcgccacgagacctaccaccagcagggccagtgccaggtgctggtgcagcgcagcccctggctgatgatgcgcatgggcatcctgggccgcggcctgcaggagtaccagctgccctaccagcgcgtgctgcccctgcccatcttcacccccgccaagatgggcgccaccaaggaggagcgcgaggacacccccatccagctgcaggagctgctggccctggagaccgccctgggcggccagtgcgtggaccgccaggaggtggccgagatcaccaagcagctgccccccgtggtgcccgtgagcaagcccggcgccctgcgccgcagcctgagccgcagcatgagccaggaggcccagcgcggc

SEQ ID NO: 140056 - protein, 323 aa, Artificial Sequence
  derived and/or modified sequence
MGSRVSREDFEWVYTDQPHADRRREILAKYPEIKSLMKPDPNLIWIIIMMVLTQLGAFYIVKDLDWKWVIFGAYAFGSCINHSMTLAIHEIAHNAAFGNCKAMWNRWFGMFANLPIGIPYSISFKRYHMDHHRYLGADGVDVDIPTDFEGWFFCTAFRKFIWVILQPLFYAFRPLFINPKPITYLEVINTVAQVTFDILIYYFLGIKSLVYMLAASLLGLGLHPISGHFIAEHYMFLKGHETYSYYGPLNLLTFNVGYHNEHHDFPNIPGKSLPLVRKIAAEYYDNLPHYNSWIKVLYDFVMDDTISPYSRMKRHQKGEMVLE

SEQ ID NO: 140057 - protein, 261 aa, Artificial Sequence
  derived and/or modified sequence
MVSPQLAKYPEIKSLMKPDPNLIWIIIMMVLTQLGAFYIVKDLDWKWVIFGAYAFGSCINHSMTLAIHEIAHNAAFGNCKAMWNRWFGMFANLPIGIPYSISFKRYHMDHHRYLGADGVDVDIPTDFEGWFFCTAFRKFIWVILQPLFYAFRPLFINPKPITYLEVINTVAQVTFDILIYYFLGIKSLVYMLAASLLGLGLHPISGHFIAEHYMFLKGHETYSYYGPLNLLTFNVGYHNEHHDFPNIPGKSLPLVRKIAAE

SEQ ID NO: 140058 - DNA, 972 bp, Artificial Sequence
  derived and/or modified sequence
atgggcagcagagtgagcagagaggacttcgagtgggtgtacaccgaccagccccacgccgacagaagaagagagatcctggccaagtaccccgagatcaagagcctgatgaagcccgaccccaacctgatctggatcatcatcatgatggtgctgacccagctgggcgccttctacatcgtgaaggacctggactggaagtgggtgatcttcggcgcctacgccttcggcagctgcatcaaccacagcatgaccctggccatccacgagatcgcccacaacgccgccttcggcaactgcaaggccatgtggaacagatggttcggcatgttcgccaacctgcccatcggcatcccctacagcatcagcttcaagagataccacatggaccaccacagatacctgggcgccgacggcgtggacgtggacatccccaccgacttcgagggctggttcttctgcaccgccttcagaaagttcatctgggtgatcctgcagcccctgttctacgccttcagacccctgttcatcaaccccaagcccatcacctacctggaggtgatcaacaccgtggcccaggtgaccttcgacatcctgatctactacttcctgggcatcaagagcctggtgtacatgctggccgccagcctgctgggcctgggcctgcaccccatcagcggccacttcatcgccgagcactacatgttcctgaagggccacgagacctacagctactacggccccctgaacctgctgaccttcaacgtgggctaccacaacgagcaccacgacttccccaacatccccggcaagagcctgcccctggtgagaaagatcgccgccgagtactacgacaacctgccccactacaacagctggatcaaggtgctgtacgacttcgtgatggacgacaccatcagcccctacagcagaatgaagagacaccagaagggcgagatggtgctggagtag

SEQ ID NO: 140059 - DNA, 786 bp, Artificial Sequence
  derived and/or modified sequence
atggtgagcccccagctggccaagtaccccgagatcaagagcctgatgaagcccgaccccaacctgatctggatcatcatcatgatggtgctgacccagctgggcgccttctacatcgtgaaggacctggactggaagtgggtgatcttcggcgcctacgccttcggcagctgcatcaaccacagcatgaccctggccatccacgagatcgcccacaacgccgccttcggcaactgcaaggccatgtggaacagatggttcggcatgttcgccaacctgcccatcggcatcccctacagcatcagcttcaagagataccacatggaccaccacagatacctgggcgccgacggcgtggacgtggacatccccaccgacttcgagggctggttcttctgcaccgccttcagaaagttcatctgggtgatcctgcagcccctgttctacgccttcagacccctgttcatcaaccccaagcccatcacctacctggaggtgatcaacaccgtggcccaggtgaccttcgacatcctgatctactacttcctgggcatcaagagcctggtgtacatgctggccgccagcctgctgggcctgggcctgcaccccatcagcggccacttcatcgccgagcactacatgttcctgaagggccacgagacctacagctactacggccccctgaacctgctgaccttcaacgtgggctaccacaacgagcaccacgacttccccaacatccccggcaagagcctgcccctggtgagaaagatcgccgccgagtag

SEQ ID NO: 140060 - DNA, 2101 bp, Artificial Sequence
  derived and/or modified sequence
ggggggggcggggcctcgggactccgcccacgcctccgtctcctccgcgctccgccacagccggccgacaccacaccagccggggagccgccgccgccgccgccacctctgagcagccggctgggagcgagagccgacagctagtctgcaagccaccgctgtcgccatggggagccgcgtctcgcgggaagacttcgagtgggtctacaccgaccagccgcacgccgaccggcgccgggagatcctggcaaagtatccagagataaagtccttgatgaaacctgatcccaatttgatatggattataattatgatggttctcacccagttgggtgcattttacatagtaaaagacttggactggaaatgggtcatatttggggcctatgcgtttggcagttgcattaaccactcaatgactctggctattcatgagattgcccacaatgctgcctttggcaactgcaaagcaatgtggaatcgctggtttggaatgtttgctaatcttcctattgggattccatattcaatttcctttaagaggtatcacatggatcatcatcggtaccttggagctgatggcgtcgatgtagatattcctaccgattttgagggctggttcttctgtaccgctttcagaaagtttatatgggttattcttcagcctctcttttatgcctttcgacctctgttcatcaaccccaaaccaattacgtatctggaagttatcaataccgtggcacaggtcacttttgacattttaatttattactttttgggaattaaatccttagtctacatgttggcagcatctttacttggcctgggtttgcacccaatttctggacattttatagctgagcattacatgttcttaaagggtcatgaaacttactcatattatgggcctctgaatttacttaccttcaatgtgggttatcataatgaacatcatgatttccccaacattcctggaaaaagtcttccactggtgaggaaaatagcagctgaatactatgacaacctccctcactacaattcctggataaaagtactgtatgattttgtgatggatgatacaataagtccctactcaagaatgaagaggcaccaaaaaggagagatggtgctggagtaaatatcattagtgccaaagggattcttctccaaaactttagatgataaaatggaatttttgcattattaaacttgagaccagtgatgctcagaagctcccctggcacaatttcagagtaagagctcggtgataccaagaagtgaatctggcttttaaacagtcagcctgactctgtactgctcagtttcactcacaggaaacttgtgacttgtgtattatcgtcattgaggatgtttcactcatgtctgtcattttataagcatatcatttaaaaagcttctaaaaagctatttcgccaggcacggtggctcatgcctataatcccagcactttgggaggccaaggtgggtggatcacctgaggtcaggagttcgagaccagcctggccaacacggtgaaaccccatctctactaaaaatgcaaaaattagccgggcgtggcggcacatgcctgtaatcccagctacatgggaggctgaggtgggagaattgcttgaacccaggaggcggaggcagaggctgcagtgacccaagattgtgccactgcactccaccctgggcaacagagcaagaccccatctcaaaaataaataaatatatataaaaaataaaaagctatttctagtttatttcactataaagttttgctttattaaaaagctaataaacagctattaatcacagtgtattagtatttgttacatttttgtatttcactatctttatactatataatatggtaacttgggtaccgggggaactttaaaatttcatctcaaaaataatttttaaaaagcctgaggtatgatatagcataaaagattgagatgaaaatatatttccctgtaagctgaattactcatttaaaaattttaacttctatatgggacccgaattagacactgctgaatcctgtacagccttactcataaataaagtacttactgaatttccaccattcaaa

SEQ ID NO: 140061 - DNA, 1345 bp, Artificial Sequence
  derived and/or modified sequence
gccgccgccacctctgagcagccggctgggagcgagagccgacagctagtctgcaagccaccgctgtcgccatggggagccgcgtctcgcgggaagacttcgagtgggtctacaccgaccagccgcacgccgaccggcgccgggagatcctggcaaagtatccagagataaagtccttgatgaaacctgatcccaatttgatatggattataattatgatggttctcacccagttgggtgcattttacatagtaaaagacttggactggaaatgggtcatatttggggcctatgcgtttggcagttgcattaaccactcaatgactctggctattcatgagattgcccacaatgctgcctttggcaactgcaaagcaatgtggaatcgctggtttggaatgtttgctaatcttcctattgggattccatattcaatttcctttaagaggtatcacatggatcatcatcggtaccttggagctgatggcgtcgatgtagatattcctaccgattttgagggctggttcttctgtaccgctttcagaaagtttatatgggttattcttcagcctctcttttatgcctttcgacctctgttcatcaaccccaaaccaattacgtatctggaagttatcaataccgtggcacaggtcacttttgacattttaatttattactttttgggaattaaatccttagtctacatgttggcagcatctttacttggcctgggtttgcacccaatttctggacattttatagctgagcattacatgttcttaaagggtcatgaaacttactcatattatgggcctctgaatttacttaccttcaatgtgggttatcataatgaacatcatgatttccccaacattcctggaaaaagtcttccactggtgaggaaaatagcagctgaatactatgacaacctccctcactacaattcctggataaaagtactgtatgattttgtgatggatgatacaataagtccctactcaagaatgaagaggcaccaaaaaggagagatggtgctggagtaaatatcattagtgccaaagggattcttctccaaaactttagatgcaaaaattagccgggcgtggcggcacatgcctgtaatcccagctacatgggaggctgaggtgggagaattgcttgaacccaggaggcggaggcagaggctgcagtgacccaagattgtgccactgcactccaccctgggcaacagagcaagaccccatctcaaaaataaataaatatatataaaaaataaaaagctatttctagtttatttcactataaagttttgctttattaaaaagctaataaacagctattaatc

SEQ ID NO: 140062 - DNA, 957 bp, Artificial Sequence
  derived and/or modified sequence
gccgggagaggacgccggagggaaaggaagggggagcgcgcccagcatcgcttgggcctcctccacccgctcaggaggggaaacaggagagccgggagcacaacagcctcgcgcgcccgccgccgcctcagccttaggggaggccactacgcctctggttacatttcttgatcatggtatctccccagctagcaaagtatccagagataaagtccttgatgaaacctgatcccaatttgatatggattataattatgatggttctcacccagttgggtgcattttacatagtaaaagacttggactggaaatgggtcatatttggggcctatgcgtttggcagttgcattaaccactcaatgactctggctattcatgagattgcccacaatgctgcctttggcaactgcaaagcaatgtggaatcgctggtttggaatgtttgctaatcttcctattgggattccatattcaatttcctttaagaggtatcacatggatcatcatcggtaccttggagctgatggcgtcgatgtagatattcctaccgattttgagggctggttcttctgtaccgctttcagaaagtttatatgggttattcttcagcctctcttttatgcctttcgacctctgttcatcaaccccaaaccaattacgtatctggaagttatcaataccgtggcacaggtcacttttgacattttaatttattactttttgggaattaaatccttagtctacatgttggcagcatctttacttggcctgggtttgcacccaatttctggacattttatagctgagcattacatgttcttaaagggtcatgaaacttactcatattatgggcctctgaatttacttaccttcaatgtgggttatcataatgaacatcatgatttccccaacattcctggaaaaagtcttccactggtgaggaaaatagcagctgaat

SEQ ID NO: 140063 - DNA, 972 bp, Artificial Sequence
  derived and/or modified sequence
atgggcagccgcgtctcgcgcgaagatttcgagtgggtctataccgaccagccacatgcagatcgaaggcgcgaaattctggccaaatacccagagataaagagcctaatgaagcccgacccaaatcttatctggataatcatcatgatggtgttgacccagctcggcgccttctatatcgttaaggacctggactggaagtgggtaattttcggggcttacgcgtttgggtcttgtattaaccactctatgacgctagctattcatgagattgctcataatgcagccttcggaaactgcaaggcaatgtggaaccggtggtttggaatgttcgccaatctgcctattgggattccctacagtatttcctttaagcgctatcacatggaccatcatcggtacttgggtgctgacggcgtcgatgtcgatatcccaacagatttcgagggctggttcttctgcacagcgtttcggaaattcatctgggtaatcttgcagccactcttttacgcatttaggcccctgtttatcaaccctaaacccattacatatctggaagtgattaacactgtagctcaggtgaccttcgacatcctgatctattacttcctggggatcaagagcctcgtttacatgttagcggcctcactgctgggcctgggattgcatccaattagcggacatttcattgccgagcattatatgtttctcaagggtcacgagacctattcatattatggacctctaaatctgttgacttttaatgtcggctaccacaacgaacatcacgattttccgaatattccagggaagtccctccctttggtgaggaagattgcagccgagtactatgacaatctgccacattataatagctggattaaagtactgtacgactttgttatggacgacactatctcaccttattcccgcatgaaacgtcaccagaaaggtgagatggtcctcgagtag

SEQ ID NO: 140064 - DNA, 972 bp, Artificial Sequence
  derived and/or modified sequence
atgggctccagagtctcacgagaggacttcgagtgggtctacaccgaccaaccccacgccgatcggagaagggaaatactggcaaaatatcctgaaataaagtccctaatgaaacccgatcctaacctgatctggattattattatgatggtgctgacacagctgggggccttctatattgtgaaggacttagactggaaatgggtgatcttcggcgcctatgcttttgggagctgtattaaccattctatgacgctggcaatccatgaaatcgcacataatgctgccttcgggaattgtaaggccatgtggaatcgttggttcggcatgttcgctaatcttcccattggaatcccttactctatctccttcaagcgctatcacatggatcaccatcgatatctaggcgccgatggtgtcgatgttgacatcccgaccgactttgagggttggtttttctgcaccgccttcaggaaattcatttgggtgattctccaacccctcttctatgcatttcgtcccctgttcatcaatcccaagcctattacctacctcgaggtcatcaatacagtggcccaggtgaccttcgacatcctgatctattatttccttgggattaagagcctggtttatatgctggctgcctcactgctcggactcgggctgcatcctatcagcgggcactttattgccgagcactatatgttcctgaaaggtcacgaaacttacagctactacggccccctaaacctcctgacttttaatgtgggatatcataacgaacaccatgacttccccaacataccgggcaaatccttgcctctggtgcgcaagatagctgctgaatactatgataatctgccacactataatagctggataaaagttctgtacgatttcgtcatggacgataccatatctccttactctagaatgaaacgccatcagaagggagagatggtgctggagtag

SEQ ID NO: 140065 - DNA, 786 bp, Artificial Sequence
  derived and/or modified sequence
atggtcagtccacaattagctaagtatccggagattaagtctttaatgaaacctgacccaaacctcatttggattattattatgatggtgttgacccagctgggcgctttttacatagtgaaggatctcgattggaaatgggtaatcttcggggcatacgcttttggcagttgtataaaccatagcatgacgctggccatccatgaaattgcgcacaacgccgcattcggcaactgcaaagcaatgtggaacagatggtttggtatgttcgccaacctgcccattggcattccttacagcatcagttttaaaaggtatcatatggatcaccacagatacttgggagccgacggagtggacgtcgatatacccactgatttcgaggggtggtttttctgcaccgcttttcgtaagtttatatgggtgatcctgcagcctctgttctacgcctttagacccttgttcattaatcctaaacctattacctacctggaggtgattaatacagtcgcccaggtgaccttcgatatcctgatctactatttcctcgggattaaatccttggtgtacatgctggctgcctccttgctgggtctcgggctacaccccatctcagggcacttcatcgccgaacactatatgtttctaaaggggcatgaaacttattcctactatgggcccctgaacctcctgacattcaatgttggatatcacaatgaacatcacgactttccaaacattcccggtaaaagtctcccgttggtcaggaagattgccgccgagtag

SEQ ID NO: 140066 - DNA, 972 bp, Artificial Sequence
  derived and/or modified sequence
atgggcagccgggtgtcccgggaggactttgagtgggtgtacacagaccagccccacgccgacagaagaagagagatcctggccaagtacccagagatcaagagcctgatgaagccagaccccaacctgatctggatcatcatcatgatggtgctgacccagctgggcgccttctacatcgtgaaggacctggactggaagtgggtgatctttggagcctatgccttcggcagctgcatcaaccacagcatgaccctggccatccatgaaattgcccacaatgctgcctttggaaactgcaaggccatgtggaaccgctggtttggcatgtttgccaacctgcccatcggcatcccctacagcatctccttcaagcgctaccacatggaccaccaccgctacctgggcgcagatggagtggatgtggacatccccacagactttgagggctggttcttctgcacagccttcaggaagttcatctgggtgatcctgcagcccctcttctacgccttccggcccctcttcatcaaccccaagcccatcacctacctggaggtgatcaacacagtggcccaggtgacctttgacatcctgatctactacttcctgggcatcaagagcctggtgtacatgctggccgccagcctgctgggcctgggcctgcaccccatcagcggccacttcatcgccgagcactacatgttcctgaagggccacgagacctacagctactacggccccctgaacctgctgaccttcaacgtgggctaccacaatgagcaccacgacttccccaacatccctgggaagagcctgcccctggtgaggaagattgctgctgagtactatgacaacctgccccactacaacagctggatcaaggtgctgtatgactttgtgatggatgacaccatcagcccctacagcaggatgaagaggcaccagaagggggagatggtgctggagtag

SEQ ID NO: 140067 - DNA, 786 bp, Artificial Sequence
  derived and/or modified sequence
atggtgagcccccagctggccaagtacccagagatcaagagcctgatgaagccagaccccaacctgatctggatcatcatcatgatggtgctgacccagctgggcgccttctacatcgtgaaggacctggactggaagtgggtgatctttggagcctatgccttcggcagctgcatcaaccacagcatgaccctggccatccacgagatcgcccacaatgctgccttcggcaactgcaaggccatgtggaaccgctggtttggcatgtttgccaacctgcccatcggcatcccctacagcatctccttcaagcgctaccacatggaccaccaccgctacctgggcgcagatggagtggatgtggacatccccacagactttgagggctggttcttctgcacagccttcaggaagttcatctgggtgatcctgcagcccctcttctacgccttccggcccctcttcatcaaccccaagcccatcacctacctggaggtgatcaacacagtggcccaggtgacctttgacatcctgatctactacttcctgggcatcaagagcctggtgtacatgctggccgccagcctgctgggcctgggcctgcaccccatcagcggccacttcatcgccgagcactacatgttcctgaagggccacgagacctacagctactacggccccctgaacctgctgaccttcaacgtgggctaccacaatgagcaccacgacttccccaacatccctgggaagagcctgcccctggtgaggaagattgctgctgagtag

SEQ ID NO: 140068 - DNA, 972 bp, Artificial Sequence
  derived and/or modified sequence
atgggcagccgggtgagccgggaggacttcgagtgggtgtacaccgaccagccccacgccgatcgcaggcgggagatcctggcaaaataccctgagataaaatctctcatgaaaccggaccctaacctgatctggattattatcatgatggtgctcacacaacttggtgccttctacattgtcaaggacctggactggaaatgggtgatctttggcgcatatgcctttggttcttgtatcaatcactctatgacgctcgcgatacatgagattgcccacaatgccgcgttcggaaattgtaaagccatgtggaaccgctggtttggcatgttcgctaacctgcccatcggcatcccatacagtatatccttcaaacgataccatatggaccaccatcgatacctcggcgctgacggagtggacgttgatatacccacagacttcgagggctggttcttttgtaccgcattcagaaaatttatttgggttattcttcagcctctgttctacgcatttaggcccttgttcatcaatcccaaacctattacgtatttggaagtgattaatactgtagctcaagtgacatttgatattttgatttattacttcttaggaatcaagtctttagtgtatatgttggccgcatctctgctcggccttggcctgcatcccatatcgggtcatttcatcgctgagcactacatgtttttgaaagggcacgaaacctatagttattacggacctctgaacctgttgacattcaacgtgggataccataacgaacaccacgattttcctaatatccccggcaagtcattgccactggtgcgaaagatcgctgctgagtactacgacaatcttcctcattacaacagctggattaaagtgctctacgatttcgtgatggatgatacgatcagcccctacagcaggatgaagaggcaccaaaaaggcgagatggtgctggagtag

SEQ ID NO: 140069 - DNA, 972 bp, Artificial Sequence
  derived and/or modified sequence
atgggcagccgggtgagccgggaggacttcgagtgggtgtacaccgatcaacctcatgctgaccgccggagggaaattctggccaagtaccctgagattaaatcactgatgaaaccggatccaaaccttatatggatcatcatcatgatggtgttgacccagctgggggccttctacatcgtgaaggacttagactggaaatgggtgatatttggcgcttacgcctttgggtcttgcatcaatcactccatgactctagcgatccatgagatcgcacataacgccgccttcgggaactgcaaggctatgtggaaccgttggttcggtatgtttgcaaacctgcccattgggataccgtattccataagttttaagaggtaccacatggaccatcatcgatacttgggggccgacggcgtggacgttgatattccgaccgattttgagggatggtttttctgtacagcctttcgaaaatttatctgggttatcctgcagcccttgttttatgctttccggcctctgtttatcaatccgaagcccattacttacctcgaagtgataaacaccgtggcgcaagttacgttcgatattctcatttactattttttgggtattaaaagcctcgtctatatgctggccgcctccttgctgggtcttgggctgcatcctatttccggacactttatcgcggaacactatatgtttctgaagggacacgaaacgtatagctattacggacccctgaacctgttgacattcaatgtggggtaccataatgagcaccacgactttccaaatataccaggcaagagcctgccccttgttcgcaaaatcgcagctgagtattacgacaatctgcctcattacaatagctggatcaaagtgctgtacgacttcgtcatggacgatactataagcccatacagtagaatgaaaagacatcagaagggggagatggtgcttgagtag

SEQ ID NO: 140070 - DNA, 786 bp, Artificial Sequence
  derived and/or modified sequence
atggtgagcccccagctggccaagtaccccgagatcaagagcctgatgaaacccgaccccaatctgatctggattatcatcatgatggtgctcacccagctaggcgccttttatatcgtgaaagacctggattggaagtgggtgatattcggtgcatacgctttcggctcctgtattaaccatagcatgactctagccatacacgaaatcgcccacaatgcggcattcgggaattgtaaggccatgtggaacagatggttcggaatgtttgccaacctcccgattggtattccctactccattagttttaagagatatcacatggatcaccatcggtacctgggggcagatggagtagacgtcgatatccctacagatttcgagggttggttcttctgtacagccttcaggaagtttatctgggtcatactccagcccctcttctatgcctttcgacctctatttattaatcctaagccgatcacatatctcgaggtgatcaataccgtggcccaggtgacgttcgacatcttgatctattattttttaggaatcaaatccctggtgtacatgcttgcagcgagtctacttggcctagggctacacccaatatcagggcactttattgcagaacactacatgtttctgaagggccacgaaacctattcttattatggtccacttaacttgctcactttcaacgttggatatcataatgagcaccacgattttccaaacatcccaggtaagtccctccctttggtgcgtaaaattgccgcggaatag

SEQ ID NO: 140071 - DNA, 972 bp, Artificial Sequence
  derived and/or modified sequence
atgggttccagggtgagcagagaggatttcgagtgggtgtacaccgaccagccacacgccgatcgcaggcgcgaaattttggctaagtaccctgaaataaagtcccttatgaagccagatcccaacctgatctggatcatcataatgatggtcttgactcagcttggtgcattctatatcgtcaaggacctcgattggaagtgggtgatcttcggggcttacgccttcggttcatgcattaatcatagtatgacgctcgcaatacacgagattgcacacaacgccgcttttggcaactgcaaggcaatgtggaacaggtggtttggaatgttcgccaacctacctattggcataccttacagtatatcatttaagaggtatcatatggaccaccataggtacctgggggctgacggggttgacgtggacatcccaaccgatttcgaggggtggtttttctgtaccgcattccgaaagttcatttgggtcattctgcagccgctgttttacgccttccggcctctgtttatcaatcccaaaccgataacatatcttgaagtaataaatactgtcgcccaggtcacttttgacatactgatttactacttcctagggatcaaatccttggtttacatgttagcggcttctttactgggactgggccttcaccccatctctggccacttcattgccgagcactacatgtttcttaagggtcatgaaacatactcttactatggacctttgaatctgctcactttcaacgtcggctaccataacgaacaccacgatttccctaacatcccgggtaagtctttgccacttgtgcggaaaatcgcagcggaatactacgataatctcccacattataactcatggattaaggtgctctatgacttcgtgatggatgacactatcagcccatattcaaggatgaagcgccaccaaaagggcgagatggtgcttgaatag

SEQ ID NO: 140072 - DNA, 972 bp, Artificial Sequence
  derived and/or modified sequence
atgggtagcagggtatccagagaggacttcgagtgggtgtacacagaccagccccacgcggacagaagaagagagatcctcgccaagtacccagagattaaaagtttgatgaaacctgaccccaacctgatttggatcatcatcatgatggtgctcacgcagctgggagccttctacatcgttaaagacctcgactggaagtgggtcatctttggcgcttatgctttcggatcgtgtatcaatcatagtatgactctggctatacatgaaatcgctcacaacgcagcgttcggtaattgcaaggccatgtggaatcgctggtttggcatgttcgccaacctgccgataggcattccttacagcataagctttaagagatatcatatggaccatcacagatatttgggcgcagatggagtcgacgtcgatatccccactgacttcgaaggctggttcttctgcacagcatttcgtaaatttatctgggtgatcctgcaaccacttttttatgcttttagaccactatttataaatccaaagcccatcacatatttggaggtgatcaatacagtggcacaagtgacctttgatattcttatatactattttttgggcataaaatctcttgtgtatatgctcgctgcgtccctcctgggattaggtttgcaccctatatcaggacattttatagctgagcattacatgttcctgaaaggccatgaaacttactcttactacggtccccttaaccttctgacattcaatgtgggttatcataacgaacatcatgatttccctaacattccaggtaagtcccttcctctggtcaggaaaattgccgcagagtactacgacaacctgccacactacaacagttggatcaaggtgttatacgattttgttatggacgatacaatctccccctacagtaggatgaagagacatcagaagggtgagatggtactggagtag

SEQ ID NO: 140073 - DNA, 786 bp, Artificial Sequence
  derived and/or modified sequence
atggtttcccctcagcttgccaagtaccccgagattaaatcactgatgaaacctgacccgaatctgatctggatcattataatgatggttttgacacagctaggcgcattctatatcgttaaagacctcgactggaaatgggtgatattcggcgcatacgccttcgggtcctgtatcaaccacagtatgacgcttgctattcatgagatcgcccataatgctgccttcggcaactgcaaggcgatgtggaaccgttggtttggaatgtttgcaaacctgccaatcggaataccgtactccatttcattcaagagatatcatatggatcaccaccgataccttggggcagatggggtagatgtggacattccaacagactttgagggttggtttttctgtaccgcttttcgcaaatttatctgggtgatcctgcagccattattctatgcctttcgccctctgtttattaatcccaagccaattacttaccttgaagttatcaatactgtggctcaagttacatttgatatattaatctattatttcctggggatcaagtccctggtctacatgctggcggcaagtttgttggggctcgggcttcaccccatcagcggccactttatagcagagcactacatgtttctgaaaggccacgagacatatagctattacgggcctctcaacttgcttaccttcaacgtgggataccacaatgagcaccatgactttccaaacatccccggaaagtcacttccactcgtacggaagattgcagctgagtag

SEQ ID NO: 140074 - protein, 198 aa, Artificial Sequence
  derived and/or modified sequence
MAADISESSGADCKGDPRNSAKLDADYPLRVLYCGVCSLPTEYCEYMPDVAKCRQWLEKNFPNEFAKLTVENSPKQEAGISEGQGTAGEEEEKKKQKRGGRGQIKQKKKTVPQKVTIAKIPRAKKKYVTRVCGLATFEIDLKEAQRFFAQKFSCGASVTGEDEIIIQGDFTDDIIDVIQEKWPEVDDDSIEDLGEVKK

SEQ ID NO: 140075 - DNA, 597 bp, Artificial Sequence
  derived and/or modified sequence
atggccgccgacatcagcgagagcagcggcgccgactgcaagggcgaccccagaaacagcgccaagctggacgccgactaccccctgagagtgctgtactgcggcgtgtgcagcctgcccaccgagtactgcgagtacatgcccgacgtggccaagtgcagacagtggctggagaagaacttccccaacgagttcgccaagctgaccgtggagaacagccccaagcaggaggccggcatcagcgagggccagggcaccgccggcgaggaggaggagaagaagaagcagaagagaggcggcagaggccagatcaagcagaagaagaagaccgtgccccagaaggtgaccatcgccaagatccccagagccaagaagaagtacgtgaccagagtgtgcggcctggccaccttcgagatcgacctgaaggaggcccagagattcttcgcccagaagttcagctgcggcgccagcgtgaccggcgaggacgagatcatcatccagggcgacttcaccgacgacatcatcgacgtgatccaggagaagtggcccgaggtggacgacgacagcatcgaggacctgggcgaggtgaagaagtag

SEQ ID NO: 140076 - DNA, 2769 bp, Artificial Sequence
  derived and/or modified sequence
ctcgcgacatccgcccagcggcggccggaatctcgcgataaaggctcattgtctcgcgggagcgctgctggcggtcgggcgctcgggcggccctggccggggagacgagttgcatgtgttggttcagctggcgatagcggcgggagcggagccggcggggcctgtgcgaccgcctgggtttgtgaaatggctgctgacatttctgaatccagcggggctgactgcaaaggagacccaaggaacagtgccaagttagatgccgattacccacttcgagtcctttattgtggagtctgttcattaccaacagagtactgtgaatatatgcctgatgttgctaaatgtagacaatggttagagaagaattttccaaatgaatttgcaaaacttactgtagaaaattcacccaaacaagaagctggaattagtgagggtcaaggaacagcaggggaagaagaggagaagaaaaaacagaagagaggtggaaggggtcaaataaaacaaaaaaagaagaccgtaccacaaaaggttactatagccaaaattcccagagcaaagaagaaatatgtgacaagagtatgtggccttgcaacttttgaaattgatcttaaagaagcacaaagattttttgctcaaaaattctcctgtggtgcctcagtaacaggggaggatgaaattatcattcagggagattttacagatgacataattgatgtcattcaggaaaaatggccagaggtagatgatgacagcatcgaagatcttggagaagtaaagaagtgaatttgaaaatttgtctgtatttaatggcctgaactgagagttgatatggccaaagggagagaggccttttaaaatatatatatatatacacatatatatgtatatatacacatatatgtatgtatacacatatacacatgtatatatacatgtgtgtatgtatacatgtatatatatatacatacacatatatgtatacatatatacacatatatgtatacatatatacacatatgtatacatatatatatattctacagtaaaactgtagactgtcctcgtccttggcattttcactgttctgtacaaggctgcttgtttttttattgccaaagtcaaataaacgggagactgtcatgctcatgcatgaatagaatttagtcaaataaaaaattttggtcatttggtactgactttctctctctctctctctctcttttttttttttgacagagtctcgcactgttgcctgggctggaatgcagtggtgcgatctcggctcactgcaacctccgcctcccgggttcaagtgattctcctgcctcagcctcccaagtaggtgggattacaggcgcccgccaccacgcccagctaatttttgtatttttagtagagatggggtttcactatgttggccaggctggtctcgaactcctgacctcgtgattggcccacctcagcctcccaaagtgctggtattacagatgtgagccaccgcacccagcctgagtttctctttctctctttttaactttattttttgaaaaacccggtagactttttgtggggagcatttttgttgataattttactgatctaaagctgagtgattttttaaaagaatttgaatttggcttcctcaccagtaatatgtctccttgcttctttgatgtgatagttttgagatgggtgagaatctaatagatctgtggttgaatttgctgtgttgttatgaagtccaccctgtgggcacaataacataactgttggtaggagttgtttgagctattctggagattatttggtaaagtatactaaaagccttaaaaccatgtatgtgcgctgtttgaacccgtaagccacttctttgacattagaagacattagaagaaataatcagccttgcataaaacttatggatgaaagtattcatcacaatattatttataataaaaaattgcaaatgttataaatgaacaattgggaaatggttaaagaagtgatggtgcattgtgtggtagaatattatgcatatgtttaaagaatcatattttctaagattatttggaagcatgtttggtaatgtcaagtggagtaccccagatacattttagacatttatcgtcatcatctgctctgagtggaaggccgttcagagaggctagaggttcttattctggctataaattatgtgagtaaaattgtgctaaccagttaaaagtactgtacacccatgctcaatatatagtcctggaaatagcaattgaaacatgtcttctcacaagagaaaatgacagttttaatgatgtatttgatgaatttaaactttaagtcaggtgctgcaaattggaaagaagacttgtggtgttttaagttgctgtggacacttttaagaaacttagaacccatggaacccttgtttatcgccatgcaaattacaatcttgaatgagtgttttttaaaaataaagtattagaaaaatgtgtagtaaagatgtaaaattaaaaaatggaattctccattaactgtggattttactaaatagaattactggtgaagcagatttatccatcgagactatctggtatgcgttatgtatgtagtctgttgctgctgaaagatgtctgtgtgcctgtatcaacatgtgacttcatgtaaagtttctttgtgttcacagttcttagcaaatgcagttacaatccatagatagccagcagtggatgttactccaggaaaatgcaggattaaaattgtccttgtgtataa

SEQ ID NO: 140077 - DNA, 597 bp, Artificial Sequence
  derived and/or modified sequence
atggctgcggacatatcagaatcttctggggctgactgtaagggcgaccccagaaattctgctaagctcgacgcagattatccccttcgcgtcctgtattgcggcgtgtgttcattaccaactgagtattgtgagtatatgcccgatgtcgctaagtgccggcagtggcttgagaaaaattttcccaatgagtttgccaagctcacggtggagaattccccgaagcaggaggctgggatttctgaggggcaggggactgctggagaggaagaggagaagaagaagcagaaacgcgggggccggggtcaaatcaaacagaagaagaaaactgtgccccagaaagtcacaattgctaagattccccgcgcaaaaaagaagtatgttactagagtctgcggacttgctacattcgaaatcgatctgaaggaggcccagcggttcttcgcccagaagttctcctgcggggctagtgtgacaggggaagacgagataataatccagggcgacttcaccgacgatatcattgacgtgattcaggagaagtggcctgaggtggacgacgattccatcgaggacctcggcgaagtcaaaaagtag

SEQ ID NO: 140078 - DNA, 597 bp, Artificial Sequence
  derived and/or modified sequence
atggctgctgacatcagcgagagcagtggagctgactgcaagggggaccccaggaacagcgccaagctggatgctgactaccccctgcgggtgctgtactgcggcgtgtgcagcctgcccacagagtactgtgagtacatgccagatgtggccaagtgccggcagtggctggagaagaacttccccaatgaatttgccaagctgactgtggagaacagccccaagcaggaggccggcatcagcgagggccagggcacagctggggaggaggaggagaagaagaagcagaagagaggaggccggggccagatcaagcagaagaagaagacagtgccccagaaggtgaccatcgccaagatcccccgggccaagaagaagtatgtgaccagggtgtgtggcctggccacctttgaaattgacctgaaggaggcccagcgcttctttgcccagaagttcagctgtggggcctctgtgactggagaagatgagatcatcatccagggcgacttcacagatgacatcattgatgtgatccaggagaagtggccagaggtggatgatgacagcattgaggacctgggggaggtgaagaagtag

SEQ ID NO: 140079 - DNA, 597 bp, Artificial Sequence
  derived and/or modified sequence
atggccgccgacatcagcgagagcagcggcgccgactgcaagggcgacccaaggaattccgctaagctggacgcggactacccactcagagtgctgtactgcggcgtgtgttccctgccaaccgagtattgcgagtatatgcccgatgttgcaaaatgtaggcaatggctcgagaaaaactttcccaacgagttcgccaaactgacggtagaaaactcccctaaacaggaagcaggcatctctgaagggcagggcaccgcaggtgaggaggaggagaagaagaagcagaagcgagggggacgaggtcagattaagcagaaaaaaaaaacggtaccccagaaagtgactatagctaaaataccacgcgccaaaaaaaagtatgtgacccgcgtgtgcgggctggctacattcgagatcgatctgaaagaggcacagcgcttctttgcacagaagttttcatgtggagcttccgtgaccggggaggatgaaatcataattcagggtgacttcacagacgacattatcgacgtcatccaggaaaagtggccagaagtagatgacgactctatcgaggacctgggcgaggtgaagaagtag

SEQ ID NO: 140080 - DNA, 597 bp, Artificial Sequence
  derived and/or modified sequence
atggccgcagacatttcggaatcctccggagcggactgcaaaggcgacccacggaatagcgccaaactggacgcagactaccctctccgcgtgttatactgcggtgtatgttctctgccaactgaatattgtgagtacatgccagacgttgccaagtgtaggcagtggcttgaaaaaaatttccccaacgagttcgcaaagcttactgtggagaattcccctaagcaggaggccggaatatccgaggggcagggcactgccggagaggaagaagagaaaaagaagcagaagagaggcggacgcggtcagataaagcagaagaagaaaactgtgccgcaaaaagtcactattgcaaaaataccacgcgcaaagaagaagtacgtgaccagggtctgtggactggctacttttgagattgatcttaaagaagcccagcgcttcttcgcacagaaattttcatgcggcgcatccgtcaccggggaggatgagatcattattcagggcgacttcacggatgacatcattgatgtgattcaggaaaaatggcctgaggtggatgatgatagtattgaagacctgggcgaggtgaagaagtag

SEQ ID NO: 140081 - protein, 182 aa, Artificial Sequence
  derived and/or modified sequence
  misc_feature (1)..(1): Xaa can be any naturally occurring amino acid
XGMNAGFEDCLVFDELMDKFSNDLSLCLPVFSRLRIPDDHAISDLSMYNYIEMRAHVNSSWFIFQKNMERFLHAIMPSTFIPLYTMVTFSRIRYHEAVQRWHWQKKVINKGLFFLGSLIAISSTYLLIHYMSPRSFLRLRRPWNWIAHFRNTTCFPAKAVDSLEQISNLISRLLSHSEILQT

SEQ ID NO: 140082 - protein, 486 aa, Artificial Sequence
  derived and/or modified sequence
MDSSVIQRKKVAVIGGGLVGSLQACFLAKRNFQIDVYEAREDTRVATFTRGRSINLALSHRGRQALKAVGLEDQIVSQGIPMRARMIHSLSGKKSAIPYGTKSQYILSVSRENLNKDLLTAAEKYPNVKMHFNHRLLKCNPEEGMITVLGSDKVPKDVTCDLIVGCDGAYSTVRSHLMKKPRFDYSQQYIPHGYMELTIPPKNGDYAMEPNYLHIWPRNTFMMIALPNMNKSFTCTLFMPFEEFEKLLTSNDVVDFFQKYFPDAIPLIGEKLLVQDFFLLPAQPMISVKCSSFHFKSHCVLLGDAAHAIVPFFGQGMNAGFEDCLVFDELMDKFSNDLSLCLPVFSRLRIPDDHAISDLSMYNYIEMRAHVNSSWFIFQKNMERFLHAIMPSTFIPLYTMVTFSRIRYHEAVQRWHWQKKVINKGLFFLGSLIAISSTYLLIHYMSPRSFLRLRRPWNWIAHFRNTTCFPAKAVDSLEQISNLISR

SEQ ID NO: 140083 - DNA, 1461 bp, Artificial Sequence
  derived and/or modified sequence
atggattccagcgtgattcagcggaaaaaagtggccgtgattggaggaggtctggtgggctccctccaggcttgctttctggccaaacggaattttcaaatcgatgtttacgaggcaagagaggacaccagagtggccacattcacccggggacggtccataaaccttgctttatcgcatcggggccggcaggccctgaaagccgtgggcctggaggaccagattgtctcgcaggggatacctatgagggcacggatgattcattctttatcaggcaaaaagagcgccattccctatggtaccaagtcccagtacattttgtccgtttctcgcgagaatctgaacaaagacctgctgactgccgccgagaaatacccgaacgtgaaaatgcattttaatcacaggctgttaaagtgtaaccccgaagagggcatgatcactgtccttgggtccgataaggtccctaaggacgtcacatgcgatctcatcgtggggtgtgatggtgcctactctaccgtgaggtcacacctgatgaaaaaacccaggtttgattatagccagcagtacattccacacggatacatggagctgacgattccaccaaagaatggagactacgccatggagcctaattatctgcatatttggcccaggaatacattcatgatgatcgctctcccgaacatgaacaagtccttcacgtgcaccctgttcatgccattcgaagaattcgaaaaattgctcacctcaaacgatgtcgttgacttcttccaaaaatatttccccgacgccatccctcttattggagagaagttgctggtgcaggattttttcctgctgcccgcccagccaatgatcagtgttaaatgctccagttttcactttaaaagtcactgcgttctcctgggagacgccgcccacgcgattgtgcctttttttggacaggggatgaatgcggggttcgaggactgcctggtgttcgacgagctgatggacaagttctccaacgacctcagcctctgtctgcctgtattctcacgactcagaatccctgacgatcacgccatttcagatctgagtatgtacaactacatcgaaatgcgggcccatgtcaacagttcatggtttatctttcagaagaatatggaaaggttccttcatgccattatgccaagcacattcattcccctatatacaatggtgacattttcgagaatccggtatcatgaggccgttcaaaggtggcactggcaaaaaaaggtgattaacaaggggctgttctttctcggaagcctcatcgctatctcctccacctatctgctaatccactacatgagtccacgaagctttctcagacttagaaggccctggaactggattgcacatttccgtaacacgacttgcttccctgcaaaggccgtcgattccctcgaacagatcagcaacctcatcagccgctag

SEQ ID NO: 140084 - DNA, 1461 bp, Artificial Sequence
  derived and/or modified sequence
atggacagcagcgtcatccagaggaagaaggtggccgtcatcggcggcggcctggtgggcagcctgcaggcctgcttcctggccaagaggaacttccagattgatgtgtatgaggcccgggaggacaccagggtggccaccttcacccggggccgcagcatcaacctggccctgagccaccggggccggcaggccctgaaggctgtgggcctggaggaccagatcgtgtcccagggcatccccatgagggccaggatgatccacagcctgagcggcaagaagagcgccatcccctacggcaccaagagccagtacatcctgtctgtgtcccgggagaacctgaacaaggacctgctgacagctgctgagaagtacccaaatgtgaagatgcacttcaaccaccggctgctgaagtgcaaccctgaggagggcatgatcaccgtgctgggcagtgacaaggtgcccaaggatgtgacctgtgacctgattgtgggctgtgatggagcctacagcacagtgcgcagccacctgatgaagaagcccaggtttgactacagccagcagtacatcccccacggctacatggagctgaccatcccccccaagaatggagactatgccatggagcccaactacctgcacatctggcccaggaacaccttcatgatgattgccctgcccaacatgaacaagagcttcacctgcaccctcttcatgccctttgaggagtttgagaagctgctgaccagcaatgatgtggtggacttcttccagaagtacttcccagatgccatccccctcatcggggagaagctgctggtgcaggacttcttcctgctgcctgcccagcccatgatctctgtgaagtgcagcagcttccacttcaagagccactgtgtgctgctgggagatgctgcccacgccatcgtgcccttcttcggccagggcatgaatgccggctttgaggactgcctggtgtttgatgagctgatggacaagttcagcaatgacctgagcctgtgcctgcctgtgttcagccggctgcgcatcccagatgaccacgccatcagtgacctgtccatgtacaactacatcgagatgagggcccacgtgaacagctcctggttcatcttccagaagaacatggagcgcttcctgcacgccatcatgcccagcaccttcatccccctgtacaccatggtgaccttcagccgcatccgctaccatgaagctgtgcagcgctggcactggcagaagaaggtgatcaacaagggcctcttcttcctgggcagcctgattgccatcagcagcacctacctgctgatccactacatgagccccaggagcttcctgcggctgcggcggccctggaactggatcgcccacttcaggaacaccacctgcttccctgccaaggctgtggacagcctggagcagatcagcaacctgatcagcaggtag

SEQ ID NO: 140085 - DNA, 1461 bp, Artificial Sequence
  derived and/or modified sequence
atggacagcagcgtgatccagcggaagaaggtggccgtgatcggcggaggactggtcggctctctgcaggcctgtttcctcgccaaacgaaattttcaaattgatgtgtatgaggctcgggaggatacgagggtagctactttcactcgggggcggtcgattaatctggcgttgagccaccggggccgccaggcgctcaaagctgtaggtctagaggatcagatcgtttcacaggggatcccaatgcgggctcgcatgatccattccttgtccgggaagaagtccgctattccctacgggactaagtcccagtacatcctgtccgtgagcagggaaaacctcaataaagatttgctgactgcagcagaaaaataccccaacgtcaagatgcacttcaaccatcggttgttaaagtgtaacccagaagaaggtatgatcacagtcctgggcagtgataaagtcccaaaagacgtgacttgtgatctcattgttggttgcgatggcgcctattccactgtgcggagtcaccttatgaaaaaaccccgctttgactactctcagcagtatattccccatggttatatggaactcaccatcccaccaaaaaacggcgattatgccatggagcccaattatctccatatctggccccgcaacacgtttatgatgattgcactcccgaacatgaacaagtccttcacgtgtactcttttcatgccattcgaagaatttgaaaagcttctcacctccaatgatgttgttgacttctttcaaaaatactttcctgatgcaataccactcatcggtgaaaagctgctggtccaggatttctttctcctgcccgcacagcccatgattagcgtgaagtgcagctcctttcacttcaaatctcattgtgtgctgcttggcgatgccgcacatgccatcgtccccttcttcggccaaggcatgaatgcgggattcgaggattgccttgtgttcgatgagctgatggacaagttttcaaatgatctttcgttatgtctgcccgtgttcagcagactcagaatacccgacgatcacgctatttctgacctcagcatgtataattacatcgaaatgcgggctcatgttaattcaagttggtttatctttcagaagaacatggagagatttctgcatgccattatgccaagtacattcatccccctttacaccatggtgaccttctcaaggataagatatcacgaagcagttcagaggtggcattggcagaagaaagtcatcaacaaggggctgttcttccttggctcactcattgccatcagctccacttatcttctgattcactacatgtccccccggagcttcctgaggctgaggcggccatggaactggatcgcgcacttccgcaataccacatgctttcccgctaaagcggttgattcactagaacagatctctaacctgatcagtaggtag

SEQ ID NO: 140086 - DNA, 1461 bp, Artificial Sequence
  derived and/or modified sequence
atggactcctccgtcattcagcgaaaaaaggtggctgtgataggcggtgggctggttggcagtctgcaggcctgttttttggccaagcgcaacttccagattgacgtgtatgaggcgcgtgaagacacccgcgtggccacgtttacacgaggacgatcaatcaatctggccctgagccatagaggacggcaagcacttaaggcagtagggttggaagaccagatagtctcccagggtattccaatgcgcgctaggatgattcacagtctttccggtaagaaatctgccataccgtatggtactaaatcccagtatatcctttctgtgtccagagagaacctgaataaggacttgctgaccgcagccgaaaaatatcccaacgtgaaaatgcacttcaatcacaggctccttaaatgcaatcccgaagagggaatgatcacagtccttggatccgataaggttcccaaggacgtgacatgtgacctgattgttggttgcgacggggcatacagcactgtgcgcagccatctgatgaagaaacctcgctttgattactctcagcagtacattccacacggttacatggaactgaccatccccccaaagaacggcgactacgctatggaacccaactacctgcatatctggccacgcaacacgttcatgatgatcgccctgcccaacatgaataagtcttttacttgtacactcttcatgccatttgaggagttcgagaaactgctgacatctaacgatgtggtagatttttttcaaaagtattttcctgatgccatccctctgattggcgaaaagcttctcgtacaggacttcttcttgctgccagcccagccaatgatctctgtcaaatgttctagctttcactttaaaagccactgcgttctattgggtgacgccgcacacgccatcgtcccgtttttcgggcaaggaatgaatgcgggattcgaagattgccttgtatttgacgaacttatggacaaattcagcaatgacctaagcttatgtttgcctgtgttctcccgacttcgcattccagacgaccatgccatttcagatctctccatgtacaattacattgagatgagagcccacgtgaacagctcttggtttatcttccaaaaaaacatggaacgctttctgcatgctattatgcccagcacgtttatcccactatacacaatggtgacattttcccgaattagatatcacgaagccgtgcagcggtggcattggcaaaagaaggtgattaacaagggtcttttctttctaggctctcttattgctatatcatctacctacctcctaatccattacatgtcccctagatcattcctgaggctgcggaggccttggaattggatcgcccatttccgcaatactacttgtttcccggcaaaggccgtcgatagcttagaacaaatctccaatctaatctctcgctag

SEQ ID NO: 140087 - DNA, 1461 bp, Artificial Sequence
  derived and/or modified sequence
atggacagcagcgtgatccagagaaagaaggtggccgtgatcggcggcggcctggtgggcagcctgcaggcctgcttcctggccaagagaaacttccagatcgacgtgtacgaggccagagaggacaccagagtggccaccttcaccagaggcagaagcatcaacctggccctgagccacagaggcagacaggccctgaaggccgtgggcctggaggaccagatcgtgagccagggcatccccatgagagccagaatgatccacagcctgagcggcaagaagagcgccatcccctacggcaccaagagccagtacatcctgagcgtgagcagagagaacctgaacaaggacctgctgaccgccgccgagaagtaccccaacgtgaagatgcacttcaaccacagactgctgaagtgcaaccccgaggagggcatgatcaccgtgctgggcagcgacaaggtgcccaaggacgtgacctgcgacctgatcgtgggctgcgacggcgcctacagcaccgtgagaagccacctgatgaagaagcccagattcgactacagccagcagtacatcccccacggctacatggagctgaccatcccccccaagaacggcgactacgccatggagcccaactacctgcacatctggcccagaaacaccttcatgatgatcgccctgcccaacatgaacaagagcttcacctgcaccctgttcatgcccttcgaggagttcgagaagctgctgaccagcaacgacgtggtggacttcttccagaagtacttccccgacgccatccccctgatcggcgagaagctgctggtgcaggacttcttcctgctgcccgcccagcccatgatcagcgtgaagtgcagcagcttccacttcaagagccactgcgtgctgctgggcgacgccgcccacgccatcgtgcccttcttcggccagggcatgaacgccggcttcgaggactgcctggtgttcgacgagctgatggacaagttcagcaacgacctgagcctgtgcctgcccgtgttcagcagactgagaatccccgacgaccacgccatcagcgacctgagcatgtacaactacatcgagatgagagcccacgtgaacagcagctggttcatcttccagaagaacatggagagattcctgcacgccatcatgcccagcaccttcatccccctgtacaccatggtgaccttcagcagaatcagataccacgaggccgtgcagagatggcactggcagaagaaggtgatcaacaagggcctgttcttcctgggcagcctgatcgccatcagcagcacctacctgctgatccactacatgagccccagaagcttcctgagactgagaagaccctggaactggatcgcccacttcagaaacaccacctgcttccccgccaaggccgtggacagcctggagcagatcagcaacctgatcagcagatag

SEQ ID NO: 140088 - protein, 312 aa, Artificial Sequence
  derived and/or modified sequence
MEEECRVLSIQSHVIRGYVGNRAATFPLQVLGFEIDAVNSVQFSNHTGYAHWKGQVLNSDELQELYEGLRLNNMNKYDYVLTGYTRDKSFLAMVVDIVQELKQQNPRLVYVCDPVLGDKWDGEGSMYVPEDLLPVYKEKVVPLADIITPNQFEAELLSGRKIHSQEEALRVMDMLHSMGPDTVVITSSDLPSPQGSNYLIVLGSQRRRNPAGSVVMERIRMDIRKVDAVFVGTGDLFAAMLLAWTHKHPNNLKVACEKTVSTLHHVLQRTIQCAKAQAGEGVRPSPMQLELRMVQSKRDIEDPEIVVQATVL

SEQ ID NO: 140089 - protein, 284 aa, Artificial Sequence
  derived and/or modified sequence
MEEECRVLSIQSHVIRGYVGNRAATFPLQVLGFEIDAVNSVQFSNHTGYAHWKGQVLNSDELQELYEGLRLNNMNKYDYVLTVCDPVLGDKWDGEGSMYVPEDLLPVYKEKVVPLADIITPNQFEAELLSGRKIHSQEEALRVMDMLHSMGPDTVVITSSDLPSPQGSNYLIVLGSQRRRNPAGSVVMERIRMDIRKVDAVFVGTGDLFAAMLLAWTHKHPNNLKVACEKTVSTLHHVLQRTIQCAKAQAGEGVRPSPMQLELRMVQSKRDIEDPEIVVQATVL

SEQ ID NO: 140090 - DNA, 939 bp, Artificial Sequence
  derived and/or modified sequence
atggaagaggaatgcagggttctgtccattcagtcacatgtgataagaggctacgtcggtaaccgcgcggccaccttccctctccaagtgctcgggtttgaaattgatgccgtgaatagcgtccaattcagcaatcacaccgggtacgcacattggaagggccaggtgcttaatagcgacgagctccaggagctgtatgaaggtcttaggcttaacaacatgaacaaatatgactatgtcctcacaggttatactagagacaagagctttttggccatggtggtggacatagtgcaggaattgaagcaacagaatcctaggcttgtgtacgtgtgcgaccccgtgctgggcgacaagtgggatggagagggatccatgtacgtgcctgaagacttgctccctgtgtacaaagagaaagtcgtccccctggctgatataattacacccaatcagttcgaggcggagctcctgtctggccgtaagattcacagccaagaggaggcgctaagggttatggatatgctccactctatgggccccgataccgttgttattacttcaagcgatctgccaagccctcaaggaagcaattatctcatcgttcttggttcgcagcggcgcaggaacccggccggaagcgtggttatggaacggatcaggatggatatacggaaagtcgacgccgtgttcgtagggactggtgacctgttcgctgccatgcttctcgcttggacccacaagcaccccaataatttaaaggtggcttgcgagaaaaccgtgtcaactctgcatcatgtgctgcagcggacaattcaatgcgcgaaggcccaggccggcgagggcgttagaccgagtccaatgcagcttgaactgcgtatggtgcagagcaagcgagatattgaagaccctgaaatcgtagtgcaggcaaccgttctgtag

SEQ ID NO: 140091 - DNA, 855 bp, Artificial Sequence
  derived and/or modified sequence
atggaggaggaatgtcgcgtgctgtcaatacagtcccacgtcatccgaggctatgtgggaaaccgcgcggccactttccctctacaggtgctgggctttgagatcgatgccgtgaactctgttcagttttcaaaccacaccggatacgctcattggaagggccaggtgttgaactccgatgagctgcaggaactgtatgaggggcttcggttgaacaatatgaataagtatgactacgtcttgaccgtgtgcgaccctgtgctcggggacaagtgggatggtgaagggtctatgtatgtcccagaggacttgctgccagtctacaaggagaaggtggttccgttggccgacatcatcaccccaaatcagttcgaggcagagctgctgagcggtcgaaagatccacagccaggaagaagctctgcgtgtgatggacatgctgcactcaatgggtccggacaccgtggtgattacttcaagcgacctgccatcccctcagggttcaaactatctgatcgttctaggttcccaacgaagacggaaccccgccgggagcgtggtgatggagcggataagaatggatattcgcaaagtcgacgcggtattcgtgggaaccggagacttgttcgcagcgatgctcttagcttggacccacaagcacccaaataacctgaaagttgcttgcgagaagacagtgtcaactctgcatcacgtcctgcagaggacgatacagtgtgcgaaagcccaggcaggtgaaggcgtgagaccctcaccgatgcaactggaactcaggatggtgcaatctaagcgagatatagaggatccagaaatcgtagtgcaggcgacagtcctgtag

SEQ ID NO: 140092 - DNA, 939 bp, Artificial Sequence
  derived and/or modified sequence
atggaggaggagtgccgggtgctgagcatccagagccacgtgatccggggctacgtgggcaacagagctgccaccttccccctgcaggtgctgggctttgaaattgatgctgtgaacagcgtgcagttcagcaaccacacaggctacgcccactggaagggccaggtgctgaacagtgatgagctgcaggagctgtatgagggcctgcggctgaacaacatgaacaagtatgactatgtgctgaccggctacacccgggacaagagcttcctggccatggtggtggacatcgtgcaggagctgaagcagcagaacccccggctggtgtatgtgtgtgaccctgtgctgggggacaagtgggatggagagggctccatgtatgtgcctgaggacctgctgcctgtgtacaaggagaaggtggtgcccctggccgacatcatcacccccaaccagtttgaggccgagctgctgagcggcaggaagatccacagccaggaggaggccctgcgggtgatggacatgctgcacagcatgggccctgacacagtggtgatcaccagcagtgacctgcccagcccccagggcagcaactacctgattgtgctgggcagccagaggagaagaaatcctgctggctctgtggtgatggagcgcatccgcatggacatcaggaaggtggatgctgtgtttgtgggcactggagacctgtttgctgccatgctgctggcctggacccacaagcaccccaacaacctgaaggtggcctgtgagaagacagtgtccaccctgcaccacgtgctgcagaggaccatccagtgtgccaaggcccaggccggggagggcgtgcggcccagccccatgcagctggagctgaggatggtgcagagcaagagggacattgaagatcctgagatcgtggtgcaggccaccgtgctgtag

SEQ ID NO: 140093 - DNA, 855 bp, Artificial Sequence
  derived and/or modified sequence
atggaggaggagtgccgggtgctgagcatccagagccacgtgatccggggctacgtgggcaacagagctgccaccttccccctgcaggtgctgggctttgaaattgatgctgtgaacagcgtgcagttcagcaaccacacaggctacgcccactggaagggccaggtgctgaacagtgatgagctgcaggagctgtatgagggcctgcggctgaacaacatgaacaagtatgactatgtgctgactgtgtgtgaccctgtgctgggggacaagtgggatggagagggctccatgtatgtgcctgaggacctgctgcctgtgtacaaggagaaggtggtgcccctggccgacatcatcacccccaaccagtttgaggccgagctgctgagcggcaggaagatccacagccaggaggaggccctgcgggtgatggacatgctgcacagcatgggccctgacacagtggtgatcaccagcagtgacctgcccagcccccagggcagcaactacctgattgtgctgggcagccagaggagaagaaatcctgctggctctgtggtgatggagcgcatccgcatggacatcaggaaggtggatgctgtgtttgtgggcactggagacctgtttgctgccatgctgctggcctggacccacaagcaccccaacaacctgaaggtggcctgtgagaagacagtgtccaccctgcaccacgtgctgcagaggaccatccagtgtgccaaggcccaggccggggagggcgtgcggcccagccccatgcagctggagctgaggatggtgcagagcaagagggacattgaagatcctgagatcgtggtgcaggccaccgtgctgtag

SEQ ID NO: 140094 - DNA, 939 bp, Artificial Sequence
  derived and/or modified sequence
atggaggaggagtgccgggtgctgagcatccagagccacgtgatcagaggttatgtaggcaacagagccgctacatttcctctgcaggtgctaggatttgagatcgatgctgtgaatagtgtccagttctccaaccacactggctacgctcactggaaggggcaagtgctgaactcggacgaactgcaagaactctacgagggtttacgattgaacaatatgaacaaatacgactacgtgctcactggttacactcgcgacaagagcttcttagcaatggtggtggatatagtgcaggaacttaagcaacagaatccccggctggtgtatgtctgtgatccagtgctaggggacaagtgggatggtgagggaagcatgtacgttccggaggaccttctccccgtttacaaggaaaaagttgtgcccctggccgatatcattacgcccaaccagttcgaagcggagctgctgtctggtcggaaaatccacagtcaggaggaggctctgcgtgtgatggatatgctgcatagtatgggtcccgacacggtggttatcacctctagtgatctgccatcccctcagggctctaattaccttattgtcctcgggtcccagaggagaagaaaccccgcaggttcagtggtgatggaaagaatcaggatggatattcggaaggtggacgcggtgttcgtcggcaccggcgacctgtttgcggctatgctcttagcctggacgcataaacacccaaataatttgaaggtggcgtgcgagaagactgtatcaaccctccaccacgtgctccaacgaacaattcaatgtgcgaaagcgcaggccggggaaggtgttcgacccagtcccatgcagctggagctcagaatggttcaatctaagcgcgatatcgaagaccccgaaattgtggtccaggccactgtgctctag

SEQ ID NO: 140095 - DNA, 855 bp, Artificial Sequence
  derived and/or modified sequence
atggaggaggagtgccgggtgctgagcatccagagccacgtgatcagagggtacgtggggaatagggccgctacgttccccctacaagtcctgggatttgaaatcgatgcagtgaattctgtacagttttccaaccataccgggtacgcccactggaaggggcaggtgctgaattcagacgaactgcaggaactgtatgaaggacttcgcctgaataatatgaataaatacgattacgtgctcacagtttgtgatccagtactgggagacaagtgggacggagagggcagcatgtacgtgcccgaggacctcctgccagtatataaggagaaagttgtgcccttggccgacattataacccctaatcagttcgaggccgaactgctgagtggacgtaagatccactctcaagaggaggccctgcgggtgatggacatgctgcatagcatgggtcccgacacagtggtgatcacttcctccgacctgccgtctcctcagggctcgaattatttgatcgtcctgggcagccaacgaaggaggaaccccgcgggaagtgtagtgatggagaggatccggatggacattcggaaggttgatgctgtctttgtgggaaccggcgatttgtttgcagccatgttgctggcctggacccacaagcatcctaataatctcaaggtagcatgtgagaaaaccgtgtctacgcttcaccacgtcctacagcggacaatccagtgcgccaaagcccaagccggcgagggcgtgagaccttctcctatgcagcttgaattacgtatggtgcagagtaagagggacatcgaagaccccgagatcgttgttcaggctactgtactctag

SEQ ID NO: 140096 - DNA, 939 bp, Artificial Sequence
  derived and/or modified sequence
atggaggaagaatgcagagtcttgagtattcagtcccatgtgatcagaggatacgtgggtaatcgtgcggctacttttcccctccaagtcctcggcttcgaaattgatgcagtgaacagcgtacagttttctaatcacacaggatacgcccactggaaaggccaggtcctgaattccgacgagttgcaggagctctacgaaggcttgcggctgaataacatgaacaagtatgattacgtactgacagggtacacaagggacaaatcgtttctggccatggtggtcgacatagtccaggaattaaaacagcagaacccgcgtctcgtctacgtctgcgatcccgtcctgggcgacaaatgggacggagaaggctcaatgtacgttcctgaggacttactccccgtgtataaggaaaaggtagtgccccttgccgatataatcacacctaatcagtttgaagcggagctgttgtccggaaggaaaatccactcgcaggaagaggccttgcgtgtcatggacatgctgcatagcatgggtccagacaccgtggtgattacctcctcagaccttccctcgcctcaaggtagcaactatctaattgtcctgggatcacagcggaggaggaacccagctgggagtgtggtaatggagagaattagaatggatatcaggaaggtggacgctgtttttgtgggcacaggggatctgttcgccgctatgctgctggcttggacccacaagcacccaaataacctgaaggtggcttgcgaaaagacagtctccacactgcaccacgtgctgcagcgcactatccagtgcgcgaaagcccaggcaggggagggagtgagacccagccctatgcagttagaactgcgaatggtgcagagtaaacgagatattgaagatccagaaattgtcgtccaggctacagttctctag

SEQ ID NO: 140097 - DNA, 855 bp, Artificial Sequence
  derived and/or modified sequence
atggaggaggagtgtcgcgtactctcaatccagtcccacgtaatcagggggtacgttggaaacagagctgccacatttcccttacaggtgctgggattcgaaattgacgcggtgaactcagttcagtttagcaaccatacagggtacgcgcattggaagggccaagtgctgaatagcgatgagcttcaggagctctacgaaggtctgaggctcaacaacatgaacaaatacgattatgttctaaccgtgtgcgatcccgtcctgggcgacaaatgggacggtgaaggttccatgtatgttcccgaagacctgttacccgtgtacaaagagaaagtagtgccactggcagacattattacccccaatcaattcgaagccgaactattatcagggcgtaagatccattctcaggaagaggctctgcgggttatggacatgctacatagcatgggccctgacaccgtcgttataacctctagtgaccttccatctccacagggatcaaactatctgatagtcctgggttctcagcggcgtcgcaatcccgcaggatcagtcgtcatggagaggataaggatggatatcaggaaggtcgatgctgtttttgtgggaaccggcgacctgttcgcggctatgctgctcgcgtggactcacaagcaccccaataatctcaaggtggcttgcgagaaaaccgtaagcacactccaccatgttctgcagaggaccattcagtgtgccaaagcccaggccggagagggagtcaggccatccccaatgcagctggagctgagaatggtccaatcaaagcgtgacatcgaagaccctgaaatcgtggtacaggctacagtgctttag

SEQ ID NO: 140098 - DNA, 7366 bp, Artificial Sequence
  derived and/or modified sequence
cggagccgcccgctgaggtcagaaggaggcgtctgcgctgatcgggtccgccgcgcgccagagccagagtcgcagccgaggggagccggggccggagcccgagcccgagccgagccggagcccgagcgagcggcggagaccgtgcccccgcctcggccccgcgccgccgcggccaggcccggcatggaggaggagtgccgggtgctctccatacagagccacgtcatccgcggctacgtgggcaaccgggcggccacgttcccgctgcaggttttgggatttgagattgacgcggtgaactctgtccagttttcaaaccacacaggctatgcccactggaagggccaagtgctgaattcagatgagctccaggagttgtacgaaggcctgaggctgaacaacatgaataaatatgactacgtgctcacaggttatacgagggacaagtcgttcctggccatggtggtggacattgtgcaggagctgaagcagcagaaccccaggctggtgtacgtgtgtgatccagtcttgggtgacaagtgggacggcgaaggctcgatgtacgtcccggaggacctccttcccgtctacaaagaaaaagtggtgccgcttgcagacattatcacgcccaaccagtttgaggccgagttactgagtggccggaagatccacagccaggaggaagccttgcgggtgatggacatgctgcactctatgggccccgacaccgtggtcatcaccagctccgacctgccctccccgcagggcagcaactacctgattgtgctggggagtcagaggaggaggaatcccgctggctccgtggtgatggaacgcatccggatggacattcgcaaagtggacgccgtctttgtgggcactggggacctgtttgctgccatgctcctggcgtggacacacaagcaccccaataacctcaaggtggcctgtgagaagaccgtgtctaccttgcaccacgttctgcagaggaccatccagtgtgcaaaagcccaggccggggaaggagtgaggcccagccccatgcagctggagctgcggatggtgcagagcaaaagggacatcgaggacccagagatcgtcgtccaggccacggtgctgtgagggccccgccgcttgcccgtgacacgcagcgcgttggtgtctccgtgtttgtccctgtgaaaacatgtaacgtctgccttagagccatgaccgaaacttgatatttttttctttcatgagtgtccggcatctgctggtcttcattgtgaaacgtgccagtcgtgctttgtgaaaaataacaaagtggtcacagaaatttgtgatctgaaaacccggctcccttccccacaaggctcctgggcctccgggaagacgggcccctgtttgccatctcgggggtgttccctgtgggagggtgagtgggtgaggccgagcctgctgcgtgtggagcctcgagtgggccctggctgccactaccgtacagaggccgtgtcgcgctgggctgggcctgggtggcctctgtctttgcatctctgagaaggagtcgggtggtaacggttggggtcaggaagaattctgccaagtatctttactgtcattctgaccatagcctctttgttcccgcattcgaacttttggttcttactttgctgctcgtttagtccctggggatttcagatcttaggctgttgtttcaccgtatgggagggttgatgtgagcttgcttggagacacacggtgcagcatcagggaccttcccaggccccagcaaattcaagtcggtctgcagacctctcagctacccgcgggacctcttgtaacccatcggcatcttccaggaatccgccgagtgacttgaggaagatgctaacgcagtaaggtctgtgctgggccaagagcagctttgaagctccagagaaccaccccgtcaggttccttgtggaagctcccctcatccgtggtgcagcaggctgagcactgcgcgtttgccacgtgctgcccgtgacagcacattgagccacagcatttgtagacaggacagaggggtgcctgccccctgcccctgctggcacatttaacccttgtcccctgacctcagttctgtgccccaccaaatgcccaggggcaagaggccaccctggaagctgccaatcttccaaggtgggtgtggggcacggtgggggcgggcagctcccaggcccttgggcaggctggggtgacggcagaggccacagcaccagctctgacaagtcctatcatcctctgctcagcagtgacctccctggccccactttgcccagagtttggggtccccccaggtatagctataggcggcagtgcctgtccctggcctgccttgatttcagccacacccctgcagccctgcatcccagctctggggtgtgcagaggtttgtgtctccagggaacccacggctggagagaaatagggagatgcaggaagtgggggcccatggggcccccaagaagcggactctccaaggggtacccccaccccgctaccttccccacggacgggcccctcctggagcccataccctcctgtgaggccattccagtgtcttctagaaagactcgcttgccaggagtgcgttctttgttgaaaaatgccctgaagcgaaaagatgcaggtttatatggaacccccaccccctcccccactctcccactctgttcgttctgaatgtcttcacgagcgtgcatcagggcgcctggctcccccacctcagccagtgagtcagacacgggtttcgcagccatgtttcctggctccgaggacacgggtggcaggcccgttgcagcccagagccactggtccctacagggcgccgccacaccagcaggaaggaggatggctgtgtccggagcctggcggggaggcggcctccccagtatgtgagtgcagggatctgccagaaccacctggccctctgtagggcgtttaactggaaataccctcactgccaagtggagactggggcgtgtgccacattgccagccaccaggaaagcttttctttttcttttttttttttttttaaacaccaagagcacgtatagcatgggggaaagaacctaaatgtctctctgtcctgtgagctggtgaaaaacccagcatgagaacgcagtgtcaggtgtgggactccttctgcccctgcagtgggtgttacgggcggtgtgccctggcgagcaagctttgattcttggttctttgagctcgtttcagaggctgagtccccacatcagctttagttcttggacttccctgtattaagcaagaattaggagaatggctgtccctgcaggcgcctcccgtaaatcctgagctctctggcgcaatctgaaacttctcttctgttttctttggctgtatcagccgaaccaggagaggcctgggctgcgactaaggagaaagaaatcgggggtttctgagagcagatggtgcctttgtgggtgcagggcttttgtggaaattgtcagcctctacgggcagagtccggcatcccctccccagactgcctgctgtcaaaccacggagcagctggagcctgccctgtccacggcccgtttccacccgggcatgttcgtctctcctgacttcggcagaggcccctggtggccttcagtttcagtttctcatccaggaaggtaaccttgggcattggcagtgggtttccctatggcttggatccagattagaattgatctttgttttcactttccatagttaataacatgcaaaataatgagaagaatttattttaaggtgacagctatactggtccaacatcgcctgcttattgtcagggtacagaagtttaatactttcttaatccagtttttcaaacttctccctgtagaccgtaaggatgaattccacaataggatcctttttaaaatcgattttaaattgttgcctagtcctgccaaggttattatgtgcatctgttatttttccaatacatgtaaacagttgcagcatgatgctttgtttaatgtcctgttcttaagctcgttagagccagttttgaaacgtttggtcttaccgtgaacggaggctggcttggcttagccacgctgatgagtaagtgagggatgtctccatcttgagatcaccaggcaagagagttgcctgcaccaggtaagaggccaaagcccctggggtaacagtccccaccgctacccgaggtaaaacaataaaagctatgtggttgagctcaggcctctcgtgcctggtgtcagagaaggcagagcccacagtaggtgcacggtgcaaggccctgggagggcactggccagggaaggtggtatagatggccctcagattgcggggccccgagcagctccccactctgcccgtccaccttccctggctccagcctcattctctctttagtttaactatgcaaagagaggaggttgagagtgttctggcagctggagctcttttccttgtccttcctgccctccgatggggccacctgtgtcggggcagcagtgtccatgtttatggagatcagaggtgtccccactgtgtggctggactgtactctgctgcccgggtagccaggagtctctccctctctcccctgccgcctgcctggtctcatgggcctccttcacacacccctccctgtggatcgcctgcctgggcccagagcaggggaactggagtttgtgagtgagcagagcaggttatgtgcagacagggaaacgagaactttggacctggctttctgagtccaggtgagagctgtgtggccccccgatgccactctgcccgccggagggatgtgcctgctgagccttttccttccacgccgcctctcactgccaggccagcggcttccgctgagactcgctggagaggcggctcccgtgtccgtccaccgagcactcagatggatgctgatcaccagggccgagggggctcccagaaggaccccaggccctggggagggtggctgtgggaggccaagtccactgcccggaagtcttgtcagccctaagccagggaagcctggagcgtggcctggcgggtctgggtggacaccgtccccactccggactcccagcacaggggaggatacctgagcctgtatggccctgtagccctgggcagagctgggcctgtcgtgtgttcctgcctggcaggtgcaggtgctggccatctgcaggtggaaggaggtgggaatcttggattttttgtttttttttgtttttttttttttgaggtgaagtctcgctctgacacccaggctggcgtgcagtggtgtgatctcggctcactgcaaactccgcttcctgggttcaagtggttctcctgccccagcctcccaagtagctgggattacaggcatgcgccaccacgctcagctgatttttgtatttttagtagagatggggtttcaccatgttggccaagctggtctcaaactcctgacctcaagtgatctgcccgcctcggcctcccagagtgctgggattacaggcatgagccagtgcacccggcggaatcttggaatttttatagacagcacctcagtttctgactccagccgcacacctcctgcctctgccagcaggggttgccgccagaccagagccagggccaggtccctgcgtccatcccccccggtaggatggacgtgagccatccttctaggggacttttttcagtgtgcgactcgtctctgttaggtggtaggagccagtttgtgtggcctgtgccacgctccacagtgcgtggctgggctctgtgtgtggcctgtgtcccctgtccctgcaggacccagcaggcatcgtggcgtgacagctgtgtccaagccactgcccgggcatcccatcacccaccagggtgcacggtctctcctgctgggggctttctgtcgcatgtgtgtctcctgtcgactctgcagtttgttctcagagcagaatgtttcctgttctcagtgcacaaagacactggttttcaatcggcgtctaaaaccacgttcctgcctttcattgcaacacggtgtgttcatttgtttaaaacagtttaatgagtaagtttagatgactggtcaatatcttaaaaatgtatattagtaagaagttcttcctggaatttttctttcgattctggcagaataaacaggtgtttttagttttcccactgtctgagccaagcaggaccctgtcccagagcaagagatgtccccttccatctctgacccttgcctgggacaagctttgatggggggccccagcttcaaggctgtggtgggaacagcacccccaaatgccagcctctcctttcttcccatccaccagtatactgcggggccatttctggtctttgtccaacaggaaacccatttctggtgggatatgccttccagtgccacagggccactcaccccatgcatctctgtcctgcccgtcagtgctgggacggacagcaagggcaagcccagtgtctggcggataggtgggtgggaacagagaggggagaatgccgtcctaagcttctgcttggggatcccccacacgacctgggtactgcctgggaaacctgtcctaagtaaaactatggacctcgcctcgcccaccggcctgcgaagccagcatctccgtgaaggtggatggaagcgcctttgtcctcattttgagctgcaagctgggtcagcggctctgaagccctcgagtgactttctaacccaagacccagcccctggcaggaggagggtgggtgcagggctggtgggacaaaaagaggcctcagcaggcctggaagacccttccagtacatcccacagcgtgtcgagcagctgggagaacctgtgtcaagctcgagccgtcataggtccccatgaggtgtctgaagccccttcttggtgatgggaggcagaggtgctgacgttctggagcatggacgtgagtcctcagctggctccgcgtgggcccttggagggtgccaggtgtgtggtgaccttctggatgcctttaacttcatggctgcgtcattcctgatttagaactttaaccggagcttcatctagtgattgcaaaactggaccaatgggaggacggcggcgcagcccgctccctccgtggaatggagctcagctcttcggaggcatcaaagcacctgtcgcctccgtggtccccctgctgagggagtgcggcctctgcaaggttcgggggtggcttcgtttgcctggagtggccggccctgcttgtgccatgtggatgtttgtgagcctcggtcctacagcactgtgtaggctgcatctgtttcgtgctggtcctgttgacttgtatgatatccacaaataaatattttcatggcggtcgtgttga

SEQ ID NO: 140099 - DNA, 7297 bp, Artificial Sequence
  derived and/or modified sequence
cggaactcgcgggttcggagccgcccgctgaggtcagaaggaggcgtctgcgctgatcgggtccgccgcgcgccagagccagagtcgcagccgaggggagccggggccggagcccgagcccgagccgagccggagcccgagcgagcggcggagaccgtgcccccgcctcggccccgcgccgccgcggccaggcccggcatggaggaggagtgccgggtgctctccatacagagccacgtcatccgcggctacgtgggcaaccgggcggccacgttcccgctgcaggttttgggatttgagattgacgcggtgaactctgtccagttttcaaaccacacaggctatgcccactggaagggccaagtgctgaattcagatgagctccaggagttgtacgaaggcctgaggctgaacaacatgaataaatatgactacgtgctcacagtgtgtgatccagtcttgggtgacaagtgggacggcgaaggctcgatgtacgtcccggaggacctccttcccgtctacaaagaaaaagtggtgccgcttgcagacattatcacgcccaaccagtttgaggccgagttactgagtggccggaagatccacagccaggaggaagccttgcgggtgatggacatgctgcactctatgggccccgacaccgtggtcatcaccagctccgacctgccctccccgcagggcagcaactacctgattgtgctggggagtcagaggaggaggaatcccgctggctccgtggtgatggaacgcatccggatggacattcgcaaagtggacgccgtctttgtgggcactggggacctgtttgctgccatgctcctggcgtggacacacaagcaccccaataacctcaaggtggcctgtgagaagaccgtgtctaccttgcaccacgttctgcagaggaccatccagtgtgcaaaagcccaggccggggaaggagtgaggcccagccccatgcagctggagctgcggatggtgcagagcaaaagggacatcgaggacccagagatcgtcgtccaggccacggtgctgtgagggccccgccgcttgcccgtgacacgcagcgcgttggtgtctccgtgtttgtccctgtgaaaacatgtaacgtctgccttagagccatgaccgaaacttgatatttttttctttcatgagtgtccggcatctgctggtcttcattgtgaaacgtgccagtcgtgctttgtgaaaaataacaaagtggtcacagaaatttgtgatctgaaaacccggctcccttccccacaaggctcctgggcctccgggaagacgggcccctgtttgccatctcgggggtgttccctgtgggagggtgagtgggtgaggccgagcctgctgcgtgtggagcctcgagtgggccctggctgccactaccgtacagaggccgtgtcgcgctgggctgggcctgggtggcctctgtctttgcatctctgagaaggagtcgggtggtaacggttggggtcaggaagaattctgccaagtatctttactgtcattctgaccatagcctctttgttcccgcattcgaacttttggttcttactttgctgctcgtttagtccctggggatttcagatcttaggctgttgtttcaccgtatgggagggttgatgtgagcttgcttggagacacacggtgcagcatcagggaccttcccaggccccagcaaattcaagtcggtctgcagacctctcagctacccgcgggacctcttgtaacccatcggcatcttccaggaatccgccgagtgacttgaggaagatgctaacgcagtaaggtctgtgctgggccaagagcagctttgaagctccagagaaccaccccgtcaggttccttgtggaagctcccctcatccgtggtgcagcaggctgagcactgcgcgtttgccacgtgctgcccgtgacagcacattgagccacagcatttgtagacaggacagaggggtgcctgccccctgcccctgctggcacatttaacccttgtcccctgacctcagttctgtgccccaccaaatgcccaggggcaagaggccaccctggaagctgccaatcttccaaggtgggtgtggggcacggtgggggcgggcagctcccaggcccttgggcaggctggggtgacggcagaggccacagcaccagctctgacaagtcctatcatcctctgctcagcagtgacctccctggccccactttgcccagagtttggggtccccccaggtatagctataggcggcagtgcctgtccctggcctgccttgatttcagccacacccctgcagccctgcatcccagctctggggtgtgcagaggtttgtgtctccagggaacccacggctggagagaaatagggagatgcaggaagtgggggcccatggggcccccaagaagcggactctccaaggggtacccccaccccgctaccttccccacggacgggcccctcctggagcccataccctcctgtgaggccattccagtgtcttctagaaagactcgcttgccaggagtgcgttctttgttgaaaaatgccctgaagcgaaaagatgcaggtttatatggaacccccaccccctcccccactctcccactctgttcgttctgaatgtcttcacgagcgtgcatcagggcgcctggctcccccacctcagccagtgagtcagacacgggtttcgcagccatgtttcctggctccgaggacacgggtggcaggcccgttgcagcccagagccactggtccctacagggcgccgccacaccagcaggaaggaggatggctgtgtccggagcctggcggggaggcggcctccccagtatgtgagtgcagggatctgccagaaccacctggccctctgtagggcgtttaactggaaataccctcactgccaagtggagactggggcgtgtgccacattgccagccaccaggaaagcttttctttttcttttttttttttttttaaacaccaagagcacgtatagcatgggggaaagaacctaaatgtctctctgtcctgtgagctggtgaaaaacccagcatgagaacgcagtgtcaggtgtgggactccttctgcccctgcagtgggtgttacgggcggtgtgccctggcgagcaagctttgattcttggttctttgagctcgtttcagaggctgagtccccacatcagctttagttcttggacttccctgtattaagcaagaattaggagaatggctgtccctgcaggcgcctcccgtaaatcctgagctctctggcgcaatctgaaacttctcttctgttttctttggctgtatcagccgaaccaggagaggcctgggctgcgactaaggagaaagaaatcgggggtttctgagagcagatggtgcctttgtgggtgcagggcttttgtggaaattgtcagcctctacgggcagagtccggcatcccctccccagactgcctgctgtcaaaccacggagcagctggagcctgccctgtccacggcccgtttccacccgggcatgttcgtctctcctgacttcggcagaggcccctggtggccttcagtttcagtttctcatccaggaaggtaaccttgggcattggcagtgggtttccctatggcttggatccagattagaattgatctttgttttcactttccatagttaataacatgcaaaataatgagaagaatttattttaaggtgacagctatactggtccaacatcgcctgcttattgtcagggtacagaagtttaatactttcttaatccagtttttcaaacttctccctgtagaccgtaaggatgaattccacaataggatcctttttaaaatcgattttaaattgttgcctagtcctgccaaggttattatgtgcatctgttatttttccaatacatgtaaacagttgcagcatgatgctttgtttaatgtcctgttcttaagctcgttagagccagttttgaaacgtttggtcttaccgtgaacggaggctggcttggcttagccacgctgatgagtaagtgagggatgtctccatcttgagatcaccaggcaagagagttgcctgcaccaggtaagaggccaaagcccctggggtaacagtccccaccgctacccgaggtaaaacaataaaagctatgtggttgagctcaggcctctcgtgcctggtgtcagagaaggcagagcccacagtaggtgcacggtgcaaggccctgggagggcactggccagggaaggtggtatagatggccctcagattgcggggccccgagcagctccccactctgcccgtccaccttccctggctccagcctcattctctctttagtttaactatgcaaagagaggaggttgagagtgttctggcagctggagctcttttccttgtccttcctgccctccgatggggccacctgtgtcggggcagcagtgtccatgtttatggagatcagaggtgtccccactgtgtggctggactgtactctgctgcccgggtagccaggagtctctccctctctcccctgccgcctgcctggtctcatgggcctccttcacacacccctccctgtggatcgcctgcctgggcccagagcaggggaactggagtttgtgagtgagcagagcaggttatgtgcagacagggaaacgagaactttggacctggctttctgagtccaggtgagagctgtgtggccccccgatgccactctgcccgccggagggatgtgcctgctgagccttttccttccacgccgcctctcactgccaggccagcggcttccgctgagactcgctggagaggcggctcccgtgtccgtccaccgagcactcagatggatgctgatcaccagggccgagggggctcccagaaggaccccaggccctggggagggtggctgtgggaggccaagtccactgcccggaagtcttgtcagccctaagccagggaagcctggagcgtggcctggcgggtctgggtggacaccgtccccactccggactcccagcacaggggaggatacctgagcctgtatggccctgtagccctgggcagagctgggcctgtcgtgtgttcctgcctggcaggtgcaggtgctggccatctgcaggtggaaggaggtgggaatcttggattttttgtttttttttgtttttttttttttgaggtgaagtctcgctctgacacccaggctggcgtgcagtggtgtgatctcggctcactgcaaactccgcttcctgggttcaagtggttctcctgccccagcctcccaagtagctgggattacaggcatgcgccaccacgctcagctgatttttgtatttttagtagagatggggtttcaccatgttggccaagctggtctcaaactcctgacctcaagtgatctgcccgcctcggcctcccagagtgctgggattacaggcatgagccagtgcacccggcggaatcttggaatttttatagacagcacctcagtttctgactccagccgcacacctcctgcctctgccagcaggggttgccgccagaccagagccagggccaggtccctgcgtccatcccccccggtaggatggacgtgagccatccttctaggggacttttttcagtgtgcgactcgtctctgttaggtggtaggagccagtttgtgtggcctgtgccacgctccacagtgcgtggctgggctctgtgtgtggcctgtgtcccctgtccctgcaggacccagcaggcatcgtggcgtgacagctgtgtccaagccactgcccgggcatcccatcacccaccagggtgcacggtctctcctgctgggggctttctgtcgcatgtgtgtctcctgtcgactctgcagtttgttctcagagcagaatgtttcctgttctcagtgcacaaagacactggttttcaatcggcgtctaaaaccacgttcctgcctttcattgcaacacggtgtgttcatttgtttaaaacagtttaatgagtaagtttagatgactggtcaatatcttaaaaatgtatattagtaagaagttcttcctggaatttttctttcgattctggcagaataaacaggtgtttttagttttcccactgtctgagccaagcaggaccctgtcccagagcaagagatgtccccttccatctctgacccttgcctgggacaagctttgatggggggccccagcttcaaggctgtggtgggaacagcacccccaaatgccagcctctcctttcttcccatccaccagtatactgcggggccatttctggtctttgtccaacaggaaacccatttctggtgggatatgccttccagtgccacagggccactcaccccatgcatctctgtcctgcccgtcagtgctgggacggacagcaagggcaagcccagtgtctggcggataggtgggtgggaacagagaggggagaatgccgtcctaagcttctgcttggggatcccccacacgacctgggtactgcctgggaaacctgtcctaagtaaaactatggacctcgcctcgcccaccggcctgcgaagccagcatctccgtgaaggtggatggaagcgcctttgtcctcattttgagctgcaagctgggtcagcggctctgaagccctcgagtgactttctaacccaagacccagcccctggcaggaggagggtgggtgcagggctggtgggacaaaaagaggcctcagcaggcctggaagacccttccagtacatcccacagcgtgtcgagcagctgggagaacctgtgtcaagctcgagccgtcataggtccccatgaggtgtctgaagccccttcttggtgatgggaggcagaggtgctgacgttctggagcatggacgtgagtcctcagctggctccgcgtgggcccttggagggtgccaggtgtgtggtgaccttctggatgcctttaacttcatggctgcgtcattcctgatttagaactttaaccggagcttcatctagtgattgcaaaactggaccaatgggaggacggcggcgcagcccgctccctccgtggaatggagctcagctcttcggaggcatcaaagcacctgtcgcctccgtggtccccctgctgagggagtgcggcctctgcaaggttcgggggtggcttcgtttgcctggagtggccggccctgcttgtgccatgtggatgtttgtgagcctcggtcctacagcactgtgtaggctgcatctgtttcgtgctggtcctgttgacttgtatgatatccacaaataaatattttcatggcggtcgtgttga

SEQ ID NO: 140100 - DNA, 939 bp, Artificial Sequence
  derived and/or modified sequence
atggaggaggagtgcagagtgctgagcatccagagccacgtgatcagaggctacgtgggcaacagagccgccaccttccccctgcaggtgctgggcttcgagatcgacgccgtgaacagcgtgcagttcagcaaccacaccggctacgcccactggaagggccaggtgctgaacagcgacgagctgcaggagctgtacgagggcctgagactgaacaacatgaacaagtacgactacgtgctgaccggctacaccagagacaagagcttcctggccatggtggtggacatcgtgcaggagctgaagcagcagaaccccagactggtgtacgtgtgcgaccccgtgctgggcgacaagtgggacggcgagggcagcatgtacgtgcccgaggacctgctgcccgtgtacaaggagaaggtggtgcccctggccgacatcatcacccccaaccagttcgaggccgagctgctgagcggcagaaagatccacagccaggaggaggccctgagagtgatggacatgctgcacagcatgggccccgacaccgtggtgatcaccagcagcgacctgcccagcccccagggcagcaactacctgatcgtgctgggcagccagagaagaagaaaccccgccggcagcgtggtgatggagagaatcagaatggacatcagaaaggtggacgccgtgttcgtgggcaccggcgacctgttcgccgccatgctgctggcctggacccacaagcaccccaacaacctgaaggtggcctgcgagaagaccgtgagcaccctgcaccacgtgctgcagagaaccatccagtgcgccaaggcccaggccggcgagggcgtgagacccagccccatgcagctggagctgagaatggtgcagagcaagagagacatcgaggaccccgagatcgtggtgcaggccaccgtgctgtag

SEQ ID NO: 140101 - DNA, 855 bp, Artificial Sequence
  derived and/or modified sequence
atggaggaggagtgcagagtgctgagcatccagagccacgtgatcagaggctacgtgggcaacagagccgccaccttccccctgcaggtgctgggcttcgagatcgacgccgtgaacagcgtgcagttcagcaaccacaccggctacgcccactggaagggccaggtgctgaacagcgacgagctgcaggagctgtacgagggcctgagactgaacaacatgaacaagtacgactacgtgctgaccgtgtgcgaccccgtgctgggcgacaagtgggacggcgagggcagcatgtacgtgcccgaggacctgctgcccgtgtacaaggagaaggtggtgcccctggccgacatcatcacccccaaccagttcgaggccgagctgctgagcggcagaaagatccacagccaggaggaggccctgagagtgatggacatgctgcacagcatgggccccgacaccgtggtgatcaccagcagcgacctgcccagcccccagggcagcaactacctgatcgtgctgggcagccagagaagaagaaaccccgccggcagcgtggtgatggagagaatcagaatggacatcagaaaggtggacgccgtgttcgtgggcaccggcgacctgttcgccgccatgctgctggcctggacccacaagcaccccaacaacctgaaggtggcctgcgagaagaccgtgagcaccctgcaccacgtgctgcagagaaccatccagtgcgccaaggcccaggccggcgagggcgtgagacccagccccatgcagctggagctgagaatggtgcagagcaagagagacatcgaggaccccgagatcgtggtgcaggccaccgtgctgtag

SEQ ID NO: 140102 - protein, 461 aa, Artificial Sequence
  derived and/or modified sequence
MVSRVQLPPEIQLAQRLAGNEQVTRDRAVRKLRKYIVARTQRAAGGFTHDELLKVWKGLFYCMWMQDKPLLQEELGRTISQLVHAFQTTEAQHLFLQAFWQTMNREWTGIDRLRLDKFYMLMRMVLNESLKVLKMQGWEERQIEELLELLMTEILHPSSQAPNGVKSHFIEIFLEELTKVGAEELTADQNLKFIDPFCRIAARTKDSLVLNNITRGIFETIVEQAPLAIEDLLNELDTQDEEVASDSDESSEGGERGDALSQKRSEKPPAGSICRAEPEAGEEQAGDDRDSGGPVLQFDYEAVANRLFEMASRQSTPSQNRKRLYKVIRKLLPWFSGIFPEDEIPEKACRRLLEGRRQKKTKKQKRLLRLQQERGKGEKEPPSPGMERKRSRRRGVGADPEARAEAGEQPGTAERALLRDQPRGRGQRGARQRRRTPRPLTSARAKAANVQEPEKKKKRRE

SEQ ID NO: 140103 - protein, 461 aa, Artificial Sequence
  derived and/or modified sequence
MVSRVQLPPEIQLAQRLAGNEQVTRDRAVRKLRKYIVARTQRAAGGFTHDELLKVWKGLFYCMWMQDKPLLQEELGRTISQLVHAFQTTEAQHLFLQAFWQTMNREWTGIDRLRLDKFYMLMRMVLNESLKVLKMQGWEERQIEELLELLMTEILHPSSQAPNGVKSHFIEIFLEELTKVGAEELTADQNLKFIDPFCRIAARTKDSLVLNNITRGIFETIVEQAPLAIEDLLNELDTQDEEVASDSDESSEGGERGDALSQKRSEKPPAGSICRAEPEAGEEQAGDDRDSGGPVLQFDYEAVANRLFEMASRQSTPSQNRKRLYKVIRKLQDLAGGIFPEDEIPEKACRRLLEGRRQKKTKKQKRLLRLQQERGKGEKEPPSPGMERKRSRRRGVGADPEARAEAGEQPGTAERALLRDQPRGRGQRGARQRRRTPRPLTSARAKAANVQEPEKKKKRRE

SEQ ID NO: 140104 - DNA, 1386 bp, Artificial Sequence
  derived and/or modified sequence
atggttagtcgggtccagttaccccctgaaattcagctcgcccagaggctggctggtaacgagcaggtcacccgggacagagcagtgcgtaagctcagaaagtacattgttgcaaggacacagcgcgctgccggtggctttactcacgacgagctgttgaaggtgtggaaaggccttttctactgtatgtggatgcaggacaagccattactgcaagaagagcttggacgaactatatcccagctggtgcatgcatttcagactactgaggcccagcatctcttcctgcaggcattctggcagacgatgaatcgggagtggacaggcatcgatcggctaaggttagataaattttacatgctaatgagaatggtcctcaacgagagcctgaaggtcctgaaaatgcagggatgggaagaaagacaaatcgaggagctgctggaactgctgatgactgagattcttcaccccagttcacaggctcctaatggcgttaagtctcatttcattgaaatcttcctggaagagctgactaaagtcggtgccgaagaactgacagctgaccaaaatctcaagttcattgatcccttctgtcggatagcagcaaggaccaaggatagtctggtcctgaataatattaccagagggatatttgaaacaatcgtggaacaggcccctctggcaatcgaggacctgcttaacgagctcgatactcaggatgaggaagttgcttctgacagcgacgagagctcagagggcggggaacgaggggacgccctgagccagaagcgatcagaaaagcctccagccggtagcatatgccgcgctgagccagaggccggtgaggaacaggcaggcgatgacagggattccggaggaccggttctgcagtttgactacgaggctgtggccaatcggctgttcgagatggccagtagacagtcaacaccgtcacaaaacagaaagcggctgtacaaggtgattaggaagctgttgccttggttctctggcatcttccccgaggacgaaatccccgagaaagcatgccgcaggctgctcgagggcaggaggcagaaaaaaacaaagaagcagaagcgacttctgcgcctgcaacaggagagaggtaagggcgagaaagagcccccatcaccgggaatggagcggaagagaagcagacgccgcggcgtgggggccgacccagaagcgagggccgaagctggggagcagcccggtactgctgagcgagcacttctgagagaccagcctcggggcagagggcaaaggggcgccagacaacgcaggaggactccccggcctcttacgtccgcccgcgccaaagccgctaacgttcaagaaccggaaaaaaaaaaaaagcggcgggaatag

SEQ ID NO: 140105 - DNA, 1386 bp, Artificial Sequence
  derived and/or modified sequence
atggtctctcgcgttcagctccctccagagattcagctcgctcagcggctagccggcaacgaacaggtgactagagacagagccgtgcggaagcttcgtaagtacatagtggctcggacacagcgcgccgccggcggcttcacccatgatgagttgctcaaagtgtggaaaggccttttctattgtatgtggatgcaggacaagccgttgctccaagaggaactgggacgcactattagccagcttgtgcacgcatttcagactaccgaggcccagcacttgtttcttcaggctttctggcagacaatgaatcgcgagtggactgggattgaccgtctgagactggataagttttacatgctgatgcgaatggtgctcaacgagtccctgaaagtgctcaaaatgcaggggtgggaagagcggcagatcgaggaacttttagagttgttaatgaccgaaatcctccacccctccagccaagctcccaacggcgttaaaagtcacttcatagagattttcctagaagagctcacgaaggtcggtgcagaggaactcacagccgaccagaatctgaaatttatcgatcccttctgtagaatcgcagccagaactaaagatagcctggtgctcaacaatatcacccgcgggatcttcgaaaccatcgtcgagcaggcccctctggctatagaagatctgcttaacgagctggacacccaggacgaagaggtggcatctgactctgacgagtccagtgaaggcggcgaacggggcgacgccctgagccaaaaaaggagcgaaaagccaccggccgggtccatctgtagggcagaacccgaggctggcgaggagcaggctggggacgaccgtgactccggcggcccagtgctgcagttcgactatgaggctgtggccaatcgactgttcgagatggcatcccggcagtctaccccaagtcagaacagaaaacggctgtacaaggtaattagaaagctccaagatctcgccggaggcatcttcccagaggatgaaatacctgaaaaggcctgtaggcgcttattagaggggagaaggcagaagaagaccaagaagcagaagcggctcctcagactccagcaggagaggggaaaaggggaaaaagaaccccctagccccgggatggagcggaaacgtagcaggagaagaggagtgggagccgatcctgaggctcgtgctgaagcaggggagcagcctggcaccgctgaacgagccctcctacgcgaccaacccagagggagaggccaacggggggccaggcagaggagaaggacaccacggcccctcacctctgctagagctaaggcagctaacgtccaagagcccgaaaagaagaaaaagagacgggaatag

SEQ ID NO: 140106 - DNA, 1386 bp, Artificial Sequence
  derived and/or modified sequence
atggtgtcccgggtgcagctgcccccagagatccagctggcccagaggctggccggaaatgagcaggtgacccgggacagagctgtgaggaagctgaggaagtacatcgtggcccggacccagagagctgctgggggcttcacccatgatgagctgctgaaggtgtggaagggcctcttctactgcatgtggatgcaggacaagcccctgctgcaggaggagctgggccgcaccatcagccagctggtgcacgccttccagaccacagaggcccagcacctgttcctgcaggccttctggcagaccatgaaccgggagtggacaggcatcgaccggctgcggctggacaagttctacatgctgatgaggatggtgctgaatgaaagcctgaaggtgctgaagatgcagggctgggaggagcggcagatcgaggagctgctggagctgctgatgacagagatcctgcaccccagcagccaggccccaaatggagtgaagagccacttcatcgagatcttcctggaggagctgaccaaggtgggcgctgaggagctgacagctgaccagaacctgaagttcatcgaccccttctgcagaattgctgcccggaccaaggacagcctggtgctgaacaacatcacccggggcatctttgagaccatcgtggagcaggcccccctggccatcgaggacctgctgaatgagctggacacccaggatgaggaggtggccagtgacagtgatgagagcagcgagggcggggagagaggagatgccctgagccagaagaggtctgagaagcccccagctggcagcatctgcagagctgagcctgaggccggggaggagcaggccggagatgaccgggacagcggcggccctgtgctgcagtttgattatgaggccgtggccaacagactctttgagatggccagccggcagagcacccccagccagaacaggaagaggctgtacaaggtgatcaggaagctgctgccctggttcagcggcatcttcccagaagatgagatccctgagaaggcctgccggcggctgctggagggccggcggcagaagaagaccaagaagcagaagaggctgctgcggctgcagcaggagcggggcaagggggagaaggagccccccagccctggcatggagaggaagaggagcagaagaagaggagtgggcgctgaccctgaggcccgggcagaggccggggagcagcccggcacagctgagcgggccctgctgcgggaccagccccggggccggggccagagaggagcccggcagaggaggaggaccccccggcccctgaccagcgcccgggccaaggccgccaacgtgcaggagcctgagaagaagaagaagagaagagaatag

SEQ ID NO: 140107 - DNA, 1386 bp, Artificial Sequence
  derived and/or modified sequence
atggtgtcccgggtgcagctgcccccagagatccagctggcccagaggctggccggaaatgagcaggtgacccgggacagagctgtgaggaagctgaggaagtacatcgtggcccggacccagagagctgctgggggcttcacccatgatgagctgctgaaggtgtggaagggcctcttctactgcatgtggatgcaggacaagcccctgctgcaggaggagctgggccgcaccatcagccagctggtgcacgccttccagaccacagaggcccagcacctgttcctgcaggccttctggcagaccatgaaccgggagtggacaggcatcgaccggctgcggctggacaagttctacatgctgatgaggatggtgctgaatgaaagcctgaaggtgctgaagatgcagggctgggaggagcggcagatcgaggagctgctggagctgctgatgacagagatcctgcaccccagcagccaggccccaaatggagtgaagagccacttcatcgagatcttcctggaggagctgaccaaggtgggcgctgaggagctgacagctgaccagaacctgaagttcatcgaccccttctgcagaattgctgcccggaccaaggacagcctggtgctgaacaacatcacccggggcatctttgagaccatcgtggagcaggcccccctggccatcgaggacctgctgaatgagctggacacccaggatgaggaggtggccagtgacagtgatgagagcagcgagggcggggagagaggagatgccctgagccagaagaggtctgagaagcccccagctggcagcatctgcagagctgagcctgaggccggggaggagcaggccggagatgaccgggacagcggcggccctgtgctgcagtttgattatgaggccgtggccaacagactctttgagatggccagccggcagagcacccccagccagaacaggaagaggctgtacaaggtgatcaggaagctgcaggacctggccggcggcatcttcccagaagatgagatccctgagaaggcctgccggcggctgctggagggccggcggcagaagaagaccaagaagcagaagaggctgctgcggctgcagcaggagcggggcaagggggagaaggagccccccagccctggcatggagaggaagaggagcagaagaagaggagtgggcgctgaccctgaggcccgggcagaggccggggagcagcccggcacagctgagcgggccctgctgcgggaccagccccggggccggggccagagaggagcccggcagaggaggaggaccccccggcccctgaccagcgcccgggccaaggccgccaacgtgcaggagcctgagaagaagaagaagagaagagaatag

SEQ ID NO: 140108 - DNA, 1764 bp, Artificial Sequence
  derived and/or modified sequence
cagtgtgctgggtaccaggcgactccgggacagggggtctcggccgtcggcgtcatggtttcgcgcgtgcagctcccgcctgagatccagctggctcagcgcctggcggggaatgagcaggtgacccgggaccgggcggtgaggaagctccggaaatacatcgtcgccaggactcagcgggccgcaggtggttttacgcacgacgagctgctgaaggtgtggaaaggactgttttattgcatgtggatgcaggacaagccactcctccaggaagaattaggaaggactatttcccagctcgttcatgcttttcagaccacggaggcgcagcacctgttccttcaggccttctggcagaccatgaatcgcgagtggacgggcattgacaggctgcgcctggataaattctacatgctcatgcggatggtcctgaacgagtccttgaaggttctgaagatgcaaggctgggaagaaagacagatcgaggagctgctagagctgctgatgactgagatcctgcaccccagcagccaggcccccaacggtgtgaagagccacttcatcgagatcttcctggaggagctgaccaaagtgggcgccgaggagcttacggcagaccagaacctgaagttcatcgaccccttctgcagaattgctgcccggaccaaggattccttggttttgaacaacatcactcgaggcatctttgagacgattgtggagcaggccccgcttgccattgaagacctcctgaatgaactggacacacaggatgaggaggtggcgtcggacagtgatgagtcctctgagggtggtgagcgtggagacgcgctgtcccagaagaggtctgagaagccgcccgcaggctccatctgcagggctgaacctgaggctggtgaggagcaggcaggtgacgacagggacagtggcggccccgttctccagtttgactacgaggcagttgctaacagactgtttgaaatggccagccgccagagcaccccttctcagaacagaaagcgtctctacaaagtgatccggaaacttctgccctggttctcaggcattttccctgaagatgagatcccagagaaggcctgcaggcgcctgcttgaagggaggcggcagaagaagacgaagaagcagaagcgtctgctcaggttgcagcaggagagagggaaaggtgagaaggagcccccgagcccgggcatggagaggaagaggagcaggaggaggggtgtaggggccgaccccgaggcgcgggcagaggctggtgagcagccaggcacagctgagcgggccctgctccgagatcagcccaggggccgtggccagagaggggctcgccagagaaggaggacacctcggcccctgaccagtgcccgagcaaaggcggccaatgtccaggagccggagaagaagaagaaacgcagggagtgatgtggccgggccaaggacaggcagggagggaggccaggcctcgcttgcaccgcgggacgaggctgaccgggctgttctgtagactcaggaccgtggctccagaactcctgtgccaggcgggagggaagggcggcactggagagatgggcccatcattaggggccagcatcccaggaactggacctttccccagagcctccgcctgtggctgtgatgaccttgggccagaaggtcaaactccgaagactgaaactctgcctgcagcaggactggccgcccctgctgtggggggttcagaaaataaaatgccgcgcagcccttgcc

SEQ ID NO: 140109 - DNA, 3022 bp, Artificial Sequence
  derived and/or modified sequence
gcgggctgtgacgtcacgccacgcgccggggccaggaggaggcgggcgcaggaggcgcgtgctcagtgtgctgggtaccaggcgactccgggacagggggtctcggccgtcggcgtcatggtttcgcgcgtgcagctcccgcctgagatccagctggctcagcgcctggcggggaatgagcaggtgacccgggaccgggcggtgaggaagctccggaaatacatcgtcgccaggactcagcgggccgcaggtggttttacgcacgacgagctgctgaaggtgtggaaaggactgttttattgcatgtggatgcaggacaagccactcctccaggaagaattaggaaggactatttcccagctcgttcatgcttttcagaccacggaggcgcagcacctgttccttcaggccttctggcagaccatgaatcgcgagtggacgggcattgacaggctgcgcctggataaattctacatgctcatgcggatggtcctgaacgagtccttgaaggttctgaagatgcaaggctgggaagaaagacagatcgaggagctgctagagctgctgatgactgagatcctgcaccccagcagccaggcccccaacggtgtgaagagccacttcatcgagatcttcctggaggagctgaccaaagtgggcgccgaggagcttacggcagaccagaacctgaagttcatcgaccccttctgcagaattgctgcccggaccaaggattccttggttttgaacaacatcactcgaggcatctttgagacgattgtggagcaggccccgcttgccattgaagacctcctgaatgaactggacacacaggatgaggaggtggcgtcggacagtgatgagtcctctgagggtggtgagcgtggagacgcgctgtcccagaagaggtctgagaagccgcccgcaggctccatctgcagggctgaacctgaggctggtgaggagcaggcaggtgacgacagggacagtggcggccccgttctccagtttgactacgaggcagttgctaacagactgtttgaaatggccagccgccagagcaccccttctcagaacagaaagcgtctctacaaagtgatccggaagctgcaggacctggcaggaggcattttccctgaagatgagatcccagagaaggcctgcaggcgcctgcttgaagggaggcggcagaagaagacgaagaagcagaagcgtctgctcaggttgcagcaggagagagggaaaggtgagaaggagcccccgagcccgggcatggagaggaagaggagcaggaggaggggtgtaggggccgaccccgaggcgcgggcagaggctggtgagcagccaggcacagctgagcgggccctgctccgagatcagcccaggggccgtggccagagaggggctcgccagagaaggaggacacctcggcccctgaccagtgcccgagcaaaggcggccaatgtccaggagccggagaagaagaagaaacgcagggagtgatgtggccgggccaaggacaggcagggagggaggccaggcctcgcttgcaccgcgggacgaggctgaccgggctgttctgtagactcaggaccgtggctccagaactcctgtgccaggcgggagggaagggcggcactggagagatgggcccatcattaggggccagcatcccaggaactggacctttccccagagcctccgcctgtggctgtgatgaccttgggccagaaggtcaaactccgaagactgaaactctgcctgcagcaggactggccgcccctgctgtggggggttcagaaaataaaatgccgcgcagcccttgccaggggaagtgtcgcttcaggtgtgtcctacggacgtgtgggaggtggcaggcgccagcctccgagcagtgtggtggtttatattcatgtttgtggaaaaatcttgcaagacatttctcctttcacagaactgcccaggtgttaacagggctgtctggacggggctcttttgcttccccctcaatctggggtctagagttgtgcaaggaattcagctccagtaaggcctggattgcccggggtgagcgtgtgtgtggtgggaagacctggcttccgcgagagccttgttcctggaggcaggagcgccccgccatcctgggtacccgcgggtccgcaggctgcgcacctctttccctcagccaggtcaccctcagcgtcctccctgcccctctccccttcacacctgctggagcctgtgagggaggtggcgggtccccactgtggcgacggagagctgacagtagcccagggctttccacctgcatggaacaagggcctgtctgccgccagcgctgtggccacagcctgcataggtgacaaggggccgctgcgttgggttttgcccgcatcttctgttccatgggtgcccagccagccaggccgtgtgggatccagcgagaggccagggcttggagtgggcctgggaccaggaaggacctctaggctgtggctggccttgtgcagaccctggactgcatccggttccccaaagccctgctgcattcgagtgtcccccaaccccgggcaggtggcacctggtgacacctccttcagtcccactcagctgggcggccggggcaggcttagggcacagttaggggccaaggagagggaaggccagggcccctgttctaggggttagggttctttccccaaaggaacttaaaaagacaagcgtggccaggcacagtggctcacacctgtaatcccagcactttgggaggccgaggtggccagatcacctgaggtcaggagtttgagaccagactgaccaacatggagaaaccccatctctactaaaatacaaaattagccaggcgtggtggcacatgcctgtaatcccagctactcgggaggctgaggcaggagaattgcttgaacctgggaggcagaggttgtggtgagctaagatcacgccattgcactccagcctgggcaacgagagggaaactctgtttcaaaaaaaaaaaaaaaaa

SEQ ID NO: 140110 - DNA, 1386 bp, Artificial Sequence
  derived and/or modified sequence
atggtgagccgggtgcagctgccccccgagatccagctggcccagcgcctggctggcaatgagcaggtgacgcgggacagggccgtacgtaagctacgcaagtacatcgtggctcggacccaacgcgctgcaggtgggttcacacacgatgagctgctgaaggtgtggaaaggactgttttattgtatgtggatgcaggacaagccactcctccaggaggagctgggcagaacaataagtcagctagtccatgctttccagaccaccgaagctcaacacttattcttacaggcattctggcagacaatgaaccgcgagtggactggcatagacaggctgcgtctcgacaagttttatatgctcatgcggatggtgctgaacgaatctctcaaagtgctgaaaatgcaggggtgggaggaacgccaaattgaagagttgctggaactgctaatgacagaaatcctgcaccctagcagccaagcacctaacggggtcaaatcacatttcatcgagatcttcttggaagagctgaccaaggtcggggcagaagagctgacggctgaccaaaatctcaagttcattgatccattttgtcgtattgccgctcggacaaaggactcccttgttctaaacaatattacccgaggtatctttgaaaccatcgttgaacaggctcctttagctatcgaggaccttcttaacgaactagatactcaagatgaggaggtcgccagcgatagtgatgaatcaagcgaaggaggagagagaggtgacgccctgtcccagaagaggtctgaaaaacctcccgctggatcaatctgccgtgctgaacctgaggccggggaagagcaggccggtgacgaccgcgattccggtggtcccgtgctgcaatttgactacgaagctgtggctaaccgcctcttcgagatggcctcacgacagtcaaccccaagccagaatcggaaaagattgtacaaagttattagaaagctgctcccttggttttcagggatcttcccagaggatgaaattccagaaaaggcctgccggcgcctcctggaaggcagacggcagaagaaaacaaagaagcaaaagcggctgttacggctgcagcaggaaaggggaaagggggagaaggagccaccatctcccgggatggagcgaaagcggtctcgacgaagaggtgtcggcgcagatcctgaagcaagagccgaagcaggcgagcagccaggtaccgccgagcgggctcttctacgcgaccagccccgcggcagaggacagcgaggtgcccgacagcgaagacgaactcccaggcccctgacatctgcccgggcaaaagctgccaatgtccaagaaccggaaaaaaaaaagaagagacgagaatag

SEQ ID NO: 140111 - DNA, 1386 bp, Artificial Sequence
  derived and/or modified sequence
atggtgagccgggtgcagctgccccccgagatccagctggcccagaggctcgctgggaatgagcaggttacaagggatcgtgctgtaaggaagcttagaaagtatattgtcgcgcgaactcagcgggccgccggtgggtttacgcacgacgaattgcttaaggtttggaagggtcttttttattgtatgtggatgcaagacaagcccctgttgcaggaggagttggggcggacaatctcacagcttgtgcatgcctttcaaaccactgaggctcagcacttattcctgcaggctttctggcagactatgaatagagagtggaccggaatcgaccgtctcaggctggacaaattctacatgcttatgcgtatggtgttgaatgaatctctgaaagtgctgaagatgcagggatgggaagagaggcagattgaagagctgctcgagctcctgatgaccgagatcctccaccccagcagccaggcaccaaatggagtgaagagccattttatagaaatttttttggaggaactgacgaaggtcggggccgaagaacttacagcagatcagaatctgaaatttatagacccgttctgcagaatagccgcgagaacgaaggattccctcgttttgaacaacatcacacgggggatattcgaaactatcgtggaacaggcccccctcgcaatcgaagatctgttgaacgagcttgacacccaagatgaagaggtggcgtcggatagcgacgaaagctctgaagggggggaacgtggcgatgccttgagccagaagaggagcgaaaaacctcccgctggcagcatctgtcgcgccgaaccagaggccggagaagagcaggctggggacgaccgagattccggcggtcccgtcttgcagttcgactatgaagccgtggctaaccggctgtttgagatggcatccagacagtctactccaagtcaaaatcgaaaaaggctttataaggtgattagaaagctacaagacctggccgggggaatatttcctgaagacgagattccagagaaggcctgccgtagattgttggagggtagaagacaaaagaaaacaaagaagcagaagcgactccttcgactgcagcaggagaggggcaagggcgaaaaggaacctccaagcccgggtatggaaagaaaaagatcccggagacgcggagttggggccgaccctgaggcccgggccgaagcaggggaacaacccggtactgcggagagagccctgttgagagaccagcccagaggacgtggtcagagaggggcccgccaacggcgccgtactcctcggccattgaccagcgcaagggcaaaggcagctaatgtgcaggagcccgaaaagaaaaaaaaacgccgagagtag

SEQ ID NO: 140112 - DNA, 1386 bp, Artificial Sequence
  derived and/or modified sequence
atggtatctcgggtccagcttccaccagagattcagctagcacagcgtctggctgggaacgaacaggtgacacgcgacagagccgtgcgaaagttgcgaaagtatatcgtcgccaggactcagcgggctgccggaggattcacccacgatgagttattgaaagtgtggaaggggttgttttactgtatgtggatgcaggacaagcctctcctgcaggaagagctgggcagaactatcagtcagctggtgcacgcatttcaaaccacggaagcccagcacctgttcctacaggcattttggcagacgatgaatagagagtggacagggatcgatcgacttcggctcgacaaattctatatgctgatgcggatggtgctgaacgaaagtctcaaagtgctgaaaatgcaggggtgggaggaacggcagattgaggaacttcttgaactgctgatgactgagatactacatcccagctcgcaggctccgaacggggttaagagccactttattgagatatttcttgaagagctcaccaaagtcggcgctgaagaactgacggctgatcagaatctaaagtttatcgacccattttgccgcatcgccgctagaaccaaggactctcttgttctcaataatatcaccagggggatcttcgagactattgtcgaacaggccccattggctatagaagatctacttaatgagttagacacgcaggatgaggaagtcgcttcagactcagatgagagtagtgagggaggcgagcggggtgacgcactgtctcaaaaacgcagcgaaaagccaccagcaggatctatttgccgcgcagagcctgaagccggagaggaacaggctggggatgatcgcgattccggaggccctgtcctgcagttcgactacgaggctgtggcaaaccgccttttcgaaatggcctctaggcagtccactccttcgcagaataggaagcgactgtataaggtaatccgaaagctgctgccctggttctcgggcattttccctgaggacgagataccagaaaaggcctgccgcagactgctggagggcagacgacaaaaaaaaaccaagaagcagaaacggttgttgaggctccagcaagaacgcggaaagggcgaaaaggagccaccctcacccggtatggaaagaaagcgcagccggagaagaggtgttggggctgatcccgaagctagggccgaagcgggagagcagccaggcacagcagaacgagccctgctcagagaccagccccgtggcagaggccaaaggggcgctcggcaaaggcgcagaacacccaggccactgacaagcgccagagcgaaagccgctaatgtacaagaacctgagaagaagaaaaagagacgggagtag

SEQ ID NO: 140113 - DNA, 1386 bp, Artificial Sequence
  derived and/or modified sequence
atggtgtcccgcgtgcaactgccaccagagatccaactagcccagaggctggccggaaacgagcaggtgactcgcgatcgggctgttcgaaagctccggaaatacatagtagctagaacccagagggccgctgggggatttactcacgacgaactgctaaaagtgtggaagggccttttttactgcatgtggatgcaggacaagcccctactacaggaggagctgggacgcaccatcagtcagcttgtccacgcctttcagacaactgaggcgcagcatctgttcctccaagctttttggcaaactatgaatcgtgagtggacaggcatagataggctccgtctggataagttctacatgctaatgagaatggtgctcaatgaatcgctgaaggtcctcaagatgcagggctgggaggagcgacagattgaggagctgctagagctgcttatgactgaaatcttacacccctcctcgcaggcccctaatggtgtgaaatctcatttcatcgaaatctttcttgaggagctgacaaaggtcggggctgaggaactcaccgctgaccagaaccttaaatttattgatcccttctgccgcatagcagcacgaaccaaagactccttggtgctgaacaatattacacgaggtatattcgaaaccatcgtcgaacaggcacccctcgcgatcgaggatctgttgaacgaactggacacacaggacgaagaggtcgccagcgactccgacgagtctagcgaaggaggagagagaggcgacgcgttgtctcagaagaggtctgaaaagccacccgctggctctatctgtagggcagaacccgaggctggggaggaacaggccggagacgacagagatagcgggggaccagtactgcagttcgattacgaagccgtggccaaccgtctcttcgagatggcctctcgccagagcaccccttcacagaaccgcaagaggttgtataaggtgattcgcaaactacaggacctagccggaggcatatttcctgaagacgaaatcccggagaaggcttgccgtcggctccttgagggcagaaggcaaaagaaaactaagaagcaaaagagactcttgaggttgcagcaggagaggggaaaaggggaaaaggagccacctagccctggtatggagcgtaagcggagccgtcggaggggcgtaggggcagatccagaagcccgtgccgaggctggcgaacaacccggaactgcagagagagccctgttgcgcgaccaacccaggggtcgcggacagcgaggagccagacagcgaagacggacccccagaccactgacatctgcccgagccaaggccgctaacgttcaagagccagaaaagaaaaagaagaggcgcgagtag

SEQ ID NO: 140114 - DNA, 1386 bp, Artificial Sequence
  derived and/or modified sequence
atggtgagcagagtgcagctgccccccgagatccagctggcccagagactggccggcaacgagcaggtgaccagagacagagccgtgagaaagctgagaaagtacatcgtggccagaacccagagagccgccggcggcttcacccacgacgagctgctgaaggtgtggaagggcctgttctactgcatgtggatgcaggacaagcccctgctgcaggaggagctgggcagaaccatcagccagctggtgcacgccttccagaccaccgaggcccagcacctgttcctgcaggccttctggcagaccatgaacagagagtggaccggcatcgacagactgagactggacaagttctacatgctgatgagaatggtgctgaacgagagcctgaaggtgctgaagatgcagggctgggaggagagacagatcgaggagctgctggagctgctgatgaccgagatcctgcaccccagcagccaggcccccaacggcgtgaagagccacttcatcgagatcttcctggaggagctgaccaaggtgggcgccgaggagctgaccgccgaccagaacctgaagttcatcgaccccttctgcagaatcgccgccagaaccaaggacagcctggtgctgaacaacatcaccagaggcatcttcgagaccatcgtggagcaggcccccctggccatcgaggacctgctgaacgagctggacacccaggacgaggaggtggccagcgacagcgacgagagcagcgagggcggcgagagaggcgacgccctgagccagaagagaagcgagaagccccccgccggcagcatctgcagagccgagcccgaggccggcgaggagcaggccggcgacgacagagacagcggcggccccgtgctgcagttcgactacgaggccgtggccaacagactgttcgagatggccagcagacagagcacccccagccagaacagaaagagactgtacaaggtgatcagaaagctgctgccctggttcagcggcatcttccccgaggacgagatccccgagaaggcctgcagaagactgctggagggcagaagacagaagaagaccaagaagcagaagagactgctgagactgcagcaggagagaggcaagggcgagaaggagccccccagccccggcatggagagaaagagaagcagaagaagaggcgtgggcgccgaccccgaggccagagccgaggccggcgagcagcccggcaccgccgagagagccctgctgagagaccagcccagaggcagaggccagagaggcgccagacagagaagaagaacccccagacccctgaccagcgccagagccaaggccgccaacgtgcaggagcccgagaagaagaagaagagaagagagtag

SEQ ID NO: 140115 - DNA, 1386 bp, Artificial Sequence
  derived and/or modified sequence
atggtgagcagagtgcagctgccccccgagatccagctggcccagagactggccggcaacgagcaggtgaccagagacagagccgtgagaaagctgagaaagtacatcgtggccagaacccagagagccgccggcggcttcacccacgacgagctgctgaaggtgtggaagggcctgttctactgcatgtggatgcaggacaagcccctgctgcaggaggagctgggcagaaccatcagccagctggtgcacgccttccagaccaccgaggcccagcacctgttcctgcaggccttctggcagaccatgaacagagagtggaccggcatcgacagactgagactggacaagttctacatgctgatgagaatggtgctgaacgagagcctgaaggtgctgaagatgcagggctgggaggagagacagatcgaggagctgctggagctgctgatgaccgagatcctgcaccccagcagccaggcccccaacggcgtgaagagccacttcatcgagatcttcctggaggagctgaccaaggtgggcgccgaggagctgaccgccgaccagaacctgaagttcatcgaccccttctgcagaatcgccgccagaaccaaggacagcctggtgctgaacaacatcaccagaggcatcttcgagaccatcgtggagcaggcccccctggccatcgaggacctgctgaacgagctggacacccaggacgaggaggtggccagcgacagcgacgagagcagcgagggcggcgagagaggcgacgccctgagccagaagagaagcgagaagccccccgccggcagcatctgcagagccgagcccgaggccggcgaggagcaggccggcgacgacagagacagcggcggccccgtgctgcagttcgactacgaggccgtggccaacagactgttcgagatggccagcagacagagcacccccagccagaacagaaagagactgtacaaggtgatcagaaagctgcaggacctggccggcggcatcttccccgaggacgagatccccgagaaggcctgcagaagactgctggagggcagaagacagaagaagaccaagaagcagaagagactgctgagactgcagcaggagagaggcaagggcgagaaggagccccccagccccggcatggagagaaagagaagcagaagaagaggcgtgggcgccgaccccgaggccagagccgaggccggcgagcagcccggcaccgccgagagagccctgctgagagaccagcccagaggcagaggccagagaggcgccagacagagaagaagaacccccagacccctgaccagcgccagagccaaggccgccaacgtgcaggagcccgagaagaagaagaagagaagagagtag

SEQ ID NO: 140116 - protein, 710 aa, Artificial Sequence
  derived and/or modified sequence
MSDYSTGGPPPGPPPPAGGGGGAGGAGGGPPPGPPGAGDRGGGGPGGGGPGGGSAGGPSQPPGGGGPGIRKDAFADAVQRARQIAAKIGGDAATTVNNSTPDFGFGGQKRQLEDGDQPESKKLASQGDSISSQLGPIHPPPRTSMTEEYRVPDGMVGLIIGRGGEQINKIQQDSGCKVQISPDSGGLPERSVSLTGAPESVQKAKMMLDDIVSRGRGGPPGQFHDNANGGQNGTVQEIMIPAGKAGLVIGKGGETIKQLQERAGVKMILIQDGSQNTNVDKPLRIIGDPYKVQQACEMVMDILRERDQGGFGDRNEYGSRIGGGIDVPVPRHSVGVVIGRSGEMIKKIQNDAGVRIQFKQDDGTGPEKIAHIMGPPDRCEHAARIINDLLQSLRSGPPGPPGGPGMPPGGRGRGRGQGNWGPPGGEMTFSIPTHKCGLVIGRGGENVKAINQQTGAFVEISRQLPPNGDPNFKLFIIRGSPQQIDHAKQLIEEKIEGPLCPVGPGPGGPGPAGPMGPFNPGPFNQGPPGAPPHAGGPPPHQYPPQGWGNTYPQWQPPAPHDPSKAAAAAADPNAAWAAYYSHYYQQPPGPVPGPAPAPAAPPAQGEPPQPPPTGQSDYTKAWEEYYKKIGQQPQQPGAPPQQDYTKAWEEYYKKQAQVATGGGPGAPPGFLAPPTVFQPLLSSALAQLPRPRPSPLPGLVCCLFICSRGD

SEQ ID NO: 140117 - protein, 711 aa, Artificial Sequence
  derived and/or modified sequence
MSDYSTGGPPPGPPPPAGGGGGAGGAGGGPPPGPPGAGDRGGGGPGGGGPGGGSAGGPSQPPGGGGPGIRKDAFADAVQRARQIAAKIGGDAATTVNNSTPDFGFGGQKRQLEDGDQPESKKLASQGDSISSQLGPIHPPPRTSMTEEYRVPDGMVGLIIGRGGEQINKIQQDSGCKVQISPDSGGLPERSVSLTGAPESVQKAKMMLDDIVSRGRGGPPGQFHDNANGGQNGTVQEIMIPAGKAGLVIGKGGETIKQLQERAGVKMILIQDGSQNTNVDKPLRIIGDPYKVQQACEMVMDILRERDQGGFGDRNEYGSRIGGGIDVPVPRHSVGVVIGRSGEMIKKIQNDAGVRIQFKQDDGTGPEKIAHIMGPPDRCEHAARIINDLLQSLRSGPPGPPGGPGMPPGGRGRGRGQGNWGPPGGEMTFSIPTHKCGLVIGRGGENVKAINQQTGAFVEISRQLPPNGDPNFKLFIIRGSPQQIDHAKQLIEEKIEGPLCPVGPGPGGPGPAGPMGPFNPGPFNQGPPGAPPHAGGPPPHQYPPQGWGNTYPQWQPPAPHDPSKAAAAAADPNAAWAAYYSHYYQQPPGPVPGPAPAPAAPPAQGEPPQPPPTGQSDYTKAWEEYYKKIGQQPQQPGAPPQQDYTKAWEEYYKKQAQVATGGGPGAPPGSQPDYSAAWAEYYRQQAAYYGQTPGPGGPQPPPTQQGQQQAQ

SEQ ID NO: 140118 - protein, 135 aa, Artificial Sequence
  derived and/or modified sequence
MGIQGLLQFIKEASEPIHVRKYKGQVVAVDTYCWLHKGAIACAEKLAKGEPTDRYVGFCMKFVNMLLSHGIKPILVFDGCTLPSKKEVERSRRERRQANLLKGKQLLREGKVSEARECFTRSINITHAMAHKVIK

SEQ ID NO: 140119 - protein, 803 aa, Artificial Sequence
  derived and/or modified sequence
MGIQGLLQFIKEASEPIHVRKYKGQVVAVDTYCWLHKGAIACAEKLAKGEPTDRYVGFCMKFVNMLLSHGIKPILVFDGCTLPSKKEVERSRRERRQANLLKGKQLLREGKVSEARECFTRSINITHAMAHKVIKAARSQGVDCLVAPYEADAQLAYLNKAGIVQAIITEDSDLLAFGCKKVILKMDQFGNGLEIDQARLGMCRQLGDVFTEEKFRYMCILSGCDYLSSLRGIGLAKACKVLRLANNPDIVKVIKKIGHYLKMNITVPEDYINGFIRANNTFLYQLVFDPIKRKLIPLNAYEDDVDPETLSYAGQYVDDSIALQIALGNKDINTFEQIDDYNPDTAMPAHSRSHSWDDKTCQKSANVSSIWHRNYSPRPESGTVSDAPQLKENPSTVGVERVISTKGLNLPRKSSIVKRPRSAELSEDDLLSQYSLSFTKKTKKNSSEGNKSLSFSEVFVPDLVNGPTNKKSVSTPPRTRNKFATFLQRKNEESGAVVVPGTRSRFFCSSDSTDCVSNKVSIQPLDETAVTDKENNLHESEYGDQEGKRLVDTDVARNSSDDIPNNHIPGDHIPDKATVFTDEESYSFESSKFTRTISPPTLGTLRSCFSWSGGLGDFSRTPSPSPSTALQQFRRKSDSPTSLPENNMSDVSQLKSEESSDDESHPLREEACSSQSQESGEFSLQSSNASKLSQCSSKDSDSEESDCNIKLLDSQSDQTSKLRLSHFSKKDTPLRNKVPGLYKSSSADSLSTTKIKPLGPARASGLSKKPASIQKRKHHNAENKPGLQIKLNELWKNFGFKKF

SEQ ID NO: 140120 - DNA, 2412 bp, Artificial Sequence
  derived and/or modified sequence
atgggcatccagggcctgctgcagttcatcaaggaggccagcgagcccatccacgtgagaaagtacaagggccaggtggtggccgtggacacctactgctggctgcacaagggcgccatcgcctgcgccgagaagctggccaagggcgagcccaccgacagatacgtgggcttctgcatgaagttcgtgaacatgctgctgagccacggcatcaagcccatcctggtgttcgacggctgcaccctgcccagcaagaaggaggtggagagaagcagaagagagagaagacaggccaacctgctgaagggcaagcagctgctgagagagggcaaggtgagcgaggccagagagtgcttcaccagaagcatcaacatcacccacgccatggcccacaaggtgatcaaggccgccagaagccagggcgtggactgcctggtggccccctacgaggccgacgcccagctggcctacctgaacaaggccggcatcgtgcaggccatcatcaccgaggacagcgacctgctggccttcggctgcaagaaggtgatcctgaagatggaccagttcggcaacggcctggagatcgaccaggccagactgggcatgtgcagacagctgggcgacgtgttcaccgaggagaagttcagatacatgtgcatcctgagcggctgcgactacctgagcagcctgagaggcatcggcctggccaaggcctgcaaggtgctgagactggccaacaaccccgacatcgtgaaggtgatcaagaagatcggccactacctgaagatgaacatcaccgtgcccgaggactacatcaacggcttcatcagagccaacaacaccttcctgtaccagctggtgttcgaccccatcaagagaaagctgatccccctgaacgcctacgaggacgacgtggaccccgagaccctgagctacgccggccagtacgtggacgacagcatcgccctgcagatcgccctgggcaacaaggacatcaacaccttcgagcagatcgacgactacaaccccgacaccgccatgcccgcccacagcagaagccacagctgggacgacaagacctgccagaagagcgccaacgtgagcagcatctggcacagaaactacagccccagacccgagagcggcaccgtgagcgacgccccccagctgaaggagaaccccagcaccgtgggcgtggagagagtgatcagcaccaagggcctgaacctgcccagaaagagcagcatcgtgaagagacccagaagcgccgagctgagcgaggacgacctgctgagccagtacagcctgagcttcaccaagaagaccaagaagaacagcagcgagggcaacaagagcctgagcttcagcgaggtgttcgtgcccgacctggtgaacggccccaccaacaagaagagcgtgagcaccccccccagaaccagaaacaagttcgccaccttcctgcagagaaagaacgaggagagcggcgccgtggtggtgcccggcaccagaagcagattcttctgcagcagcgacagcaccgactgcgtgagcaacaaggtgagcatccagcccctggacgagaccgccgtgaccgacaaggagaacaacctgcacgagagcgagtacggcgaccaggagggcaagagactggtggacaccgacgtggccagaaacagcagcgacgacatccccaacaaccacatccccggcgaccacatccccgacaaggccaccgtgttcaccgacgaggagagctacagcttcgagagcagcaagttcaccagaaccatcagcccccccaccctgggcaccctgagaagctgcttcagctggagcggcggcctgggcgacttcagcagaacccccagccccagccccagcaccgccctgcagcagttcagaagaaagagcgacagccccaccagcctgcccgagaacaacatgagcgacgtgagccagctgaagagcgaggagagcagcgacgacgagagccaccccctgagagaggaggcctgcagcagccagagccaggagagcggcgagttcagcctgcagagcagcaacgccagcaagctgagccagtgcagcagcaaggacagcgacagcgaggagagcgactgcaacatcaagctgctggacagccagagcgaccagaccagcaagctgagactgagccacttcagcaagaaggacacccccctgagaaacaaggtgcccggcctgtacaagagcagcagcgccgacagcctgagcaccaccaagatcaagcccctgggccccgccagagccagcggcctgagcaagaagcccgccagcatccagaagagaaagcaccacaacgccgagaacaagcccggcctgcagatcaagctgaacgagctgtggaagaacttcggcttcaagaagttctag

SEQ ID NO: 140121 - DNA, 2412 bp, Artificial Sequence
  derived and/or modified sequence
atggggatccagggtttgctgcaattcattaaagaggcatcggaacccatccacgtgcgaaaatacaaaggtcaggttgtggcagtagacacatactgttggctccacaagggcgccattgcctgcgccgagaaactcgcgaagggagaaccaaccgaccgatatgtgggcttttgcatgaagttcgtgaacatgctgctttctcatggtattaagcccatcctagtatttgatgggtgcacactcccctccaaaaaggaggttgagcgatccagaagggagcgcaggcaggcgaacttgctgaagggcaagcaactgctgcgcgaggggaaggtgagtgaggcgagggagtgcttcactaggagtataaatatcactcatgccatggcccataaggtgattaaagcagcccgcagtcaaggagtggactgcctggtggcaccttatgaggctgatgcacaattggcctatcttaataaggcaggtatagtgcaagcgattatcactgaggactcagatcttttggccttcggatgcaagaaggtgatactcaagatggaccagtttgggaatgggttggaaatcgaccaggctcgattgggcatgtgcaggcagctgggggatgtgttcaccgaggagaaatttcgttatatgtgcatcctcagtggctgtgactacctttcaagtttacgggggatcggtctcgcaaaggcatgtaaagtgctcaggttggccaataaccctgacattgttaaggttattaagaaaatcggacattacctcaagatgaacattaccgtgcccgaggattatattaacggattcattcgcgcgaataatacctttctataccaactggtattcgaccccatcaagcggaaactcatcccgttgaatgcctacgaggacgacgtggaccccgagacactatcctacgcgggccagtatgtggatgattccattgctctgcagatcgcacttggcaataaggatataaacacgttcgaacaaatcgacgattataatcctgacacagcaatgcccgcacattctaggtcccatagctgggatgataaaacctgccaaaagagcgctaatgtgagttctatatggcaccgtaactacagccctagaccagaatctggtactgtgagtgatgccccgcagctgaaggagaatcctagcacagtgggggtcgaacgggtgatctcaaccaagggcctgaatctgccgcggaagagttcaattgtgaagcgtcccagaagtgcggagctcagtgaagatgatctcctatcacaatatagtctatctttcaccaagaaaaccaagaagaactcttctgaaggaaacaaatcgttaagcttctctgaggtcttcgtacccgacctcgtaaatggtccaactaacaagaagtcagtatcaactccacctcgcacaaggaataagtttgccacttttctgcagcgtaaaaatgaggaatctggagccgtcgtagtgccgggcactcgtagtagattcttctgctcaagcgactccactgactgcgtgtccaacaaggtgagtatccagcctttggacgagaccgccgtaacagacaaagaaaacaaccttcacgagagtgaatatggcgaccaggagggaaagagactagttgatacagatgtcgctagaaacagctctgacgacataccgaacaaccatattcctggagatcacatccctgacaaagcaacagtttttaccgatgaagaatcctactcatttgagagcagtaaatttacccggactatttcaccaccgacactgggtacgctgcgaagctgtttctcctggagcggagggctcggcgatttcagtagaaccccctctccatcaccttccactgcgttgcagcagtttcgtcgcaaaagcgattcacctaccagcctgcccgaaaataatatgagcgatgtctctcaactcaagtcagaggagtcaagcgacgatgaatcccaccccttgcgcgaggaagcttgctcttctcagtcacaggaatctggggagtttagtctccagagttcaaacgcatctaaactctcacaatgctctagcaaagatagcgatagcgaggaaagcgattgtaatataaagttactggactcccagagcgaccagacttccaaactgcggctgagccacttttctaaaaaagacaccccgctgcgtaacaaggtaccaggcctctataagagtagctctgctgattcactgtctaccaccaaaatcaagcccctcggacccgctcgggcatccgggctaagcaagaaacccgcttccatacagaagcggaaacaccataatgctgaaaacaaaccgggcctgcaaattaaactgaatgaactatggaagaatttcggatttaagaaattctag

SEQ ID NO: 140122 - DNA, 2899 bp, Artificial Sequence
  derived and/or modified sequence
cgagtgccacatgcgacctctgagatatgtacacagtcattcttactatcgcactcagccattcttactacgctaaagaagaaataattattcgaggatatttgcctggcccagaagaaacttatgtaaatttcatgaactattatatccgttttcctcggagtgagagaaaactctttttagatatcatctgagaggtagttaatttggcaccatggggatacagggattgctacaatttatcaaagaagcttcagaacccatccatgtgaggaagtataaagggcaggtagtagctgtggatacatattgctggcttcacaaaggagctattgcttgtgctgaaaaactagccaaaggtgaacctactgataggtatgtaggattttgtatgaaatttgtaaatatgttactatctcatgggatcaagcctattctcgtatttgatggatgtactttaccttctaaaaaggaagtagagagatctagaagagaaagacgacaagccaatcttcttaagggaaagcaacttcttcgtgaggggaaagtctcggaagctcgagagtgtttcacccggtctatcaatatcacacatgccatggcccacaaagtaattaaagctgcccggtctcagggggtagattgcctcgtggctccctatgaagctgatgcgcagttggcctatcttaacaaagcgggaattgtgcaagccataattacagaggactcggatctcctagcttttggctgtaaaaaggtaattttaaagatggaccagtttggaaatggacttgaaattgatcaagctcggctaggaatgtgcagacagcttggggatgtattcacggaagagaagtttcgttacatgtgtattctttcaggttgtgactacctgtcatcactgcgtgggattggattagcaaaggcatgcaaagtcctaagactagccaataatccagatatagtaaaggttatcaagaaaattggacattatctcaagatgaatatcacggtaccagaggattacatcaacgggtttattcgggccaacaataccttcctctatcagctagtttttgatcccatcaaaaggaaacttattcctctgaacgcctatgaagatgatgttgatcctgaaacactaagctacgctgggcaatatgttgatgattccatagctcttcaaatagcacttggaaataaagatataaatacttttgaacagatcgatgactacaatccagacactgctatgcctgcccattcaagaagtcatagttgggatgacaaaacatgtcaaaagtcagctaatgttagcagcatttggcataggaattactctcccagaccagagtcgggtactgtttcagatgccccacaattgaaggaaaatccaagtactgtgggagtggaacgagtgattagtactaaagggttaaatctcccaaggaaatcatccattgtgaaaagaccaagaagtgcagagctgtcagaagatgacctgttgagtcagtattctctttcatttacgaagaagaccaagaaaaatagctctgaaggcaataaatcattgagcttttctgaagtgtttgtgcctgacctggtaaatggacctactaacaaaaagagtgtaagcactccacctaggacgagaaataaatttgcaacatttttacaaaggaaaaatgaagaaagtggtgcagttgtggttccagggaccagaagcaggtttttttgcagttcagattctactgactgtgtatcaaacaaagtgagcatccagcctctggatgaaactgctgtcacagataaagagaacaatctgcatgaatcagagtatggagaccaagaaggcaagagactggttgacacagatgtagcacgtaattcaagtgatgacattccgaataatcatattccaggtgatcatattccagacaaggcaacagtgtttacagatgaagagtcctactcttttgagagcagcaaatttacaaggaccatttcaccacccactttgggaacactaagaagttgttttagttggtctggaggtcttggagatttttcaagaacgccgagcccctctccaagcacagcattgcagcagttccgaagaaagagcgattcccccacctctttgcctgagaataatatgtctgatgtgtcgcagttaaagagcgaggagtccagtgacgatgagtctcatcccttacgagaagaggcatgttcttcacagtcccaggaaagtggagaattctcactgcagagttcaaatgcatcaaagctttctcagtgctctagtaaggactctgattcagaggaatctgattgcaatattaagttacttgacagtcaaagtgaccagacctccaagctacgtttatctcatttctcaaaaaaagacacacctctaaggaacaaggttcctgggctatataagtccagttctgcagactctctttctacaaccaagatcaaacctctaggacctgccagagccagtgggctgagcaagaagccggcaagcatccagaagagaaagcatcataatgccgagaacaagccggggttacagatcaaactcaatgagctctggaaaaactttggatttaaaaaattctgaaaagcttcctccttgtaagaaacccctgtccccagtcagagataacatccaactaactccagaagcggaagaggatatatttaacaaacctgaatgtggccgtgttcaaagagcaatattccagtaaatgcagactgctgcaaagcttttgcctgcaagagaatctgatcaatttgaagtccctgtttgggaatgaggcacttatcagcatgaagaattttttctcattctgtgccattttaaaaatagaatacattttgtatattaacttta

SEQ ID NO: 140123 - DNA, 2412 bp, Artificial Sequence
  derived and/or modified sequence
atgggcatccagggcctgctgcagttcatcaaggaggccagcgagcccatccacgtgaggaagtacaagggccaggtggtggccgtggacacctactgctggctgcacaagggggccatcgcctgtgccgagaagctggccaagggggagcccacagacagatatgtgggcttctgcatgaagtttgtgaacatgctgctgagccacggcatcaagcccatcctggtgtttgatggctgcaccctgcccagcaagaaggaggtggagaggagccggcgggagcggcggcaggccaacctgctgaagggcaagcagctgctgcgggagggcaaggtgtctgaggcccgggagtgcttcaccaggagcatcaacatcacccacgccatggcccacaaggtgatcaaggccgcccggagccagggcgtggactgcctggtggccccctatgaagcagatgcccagctggcctacctgaacaaggccggcatcgtgcaggccatcatcacagaggacagcgacctgctggccttcggctgcaagaaggtgatcctgaagatggaccagtttggaaatggcctggagattgaccaggcccggctgggcatgtgccggcagctgggagatgtgttcacagaggagaagttccgctacatgtgcatcctgagcggctgtgactacctgagcagcctgcggggcatcggcctggccaaggcctgcaaggtgctgcggctggccaacaacccagacatcgtgaaggtgatcaagaagattggccactacctgaagatgaacatcaccgtgcctgaggactacatcaatggcttcatccgggccaacaacaccttcctgtaccagctggtgtttgaccccatcaagaggaagctgatccccctgaatgcctatgaagatgatgtggaccctgagaccctgtcctatgccggccagtatgtggatgacagcatcgccctgcagatcgccctgggcaacaaggacatcaacacctttgagcagattgatgactacaacccagacacagccatgcctgcccacagccgcagccacagctgggatgacaagacctgccagaagagcgccaacgtgagcagcatctggcacaggaactacagccccaggcctgagagcggcaccgtgtctgatgccccccagctgaaggagaaccccagcacagtgggcgtggagagggtcatcagcaccaagggcctgaacctgcccaggaagagcagcatcgtgaagaggcccaggtctgctgagctgtctgaagatgacctgctgagccagtacagcctgtccttcaccaagaagaccaagaagaacagcagcgagggcaacaagagcctgtccttcagcgaggtgtttgtgcctgacctggtgaatggccccaccaacaagaagtctgtgtccaccccacccaggaccaggaacaagtttgccaccttcctgcagaggaagaatgaggagagcggggctgtggtggtgcccggcaccaggagccgcttcttctgcagcagtgacagcacagactgtgtgagcaacaaggtgtccatccagcccctggatgaaacagctgtgacagacaaggagaacaacctgcacgagagtgaatatggagaccaggagggcaagaggctggtggacacagatgtggccaggaacagcagtgatgacatccccaacaaccacatccctggggaccacatcccagacaaggccaccgtcttcacagatgaggagagctacagctttgagagcagcaagttcaccaggaccatcagcccccccaccctgggcaccctgcggagctgcttctcctggagcggcggcctgggggacttcagcaggacccccagccccagccccagcacagccctgcagcagttccggaggaagagtgacagccccaccagcctgcctgagaacaacatgtctgatgtgtcccagctgaagtctgaggagagcagtgatgatgagagccaccccctgcgggaggaggcctgcagcagccagagccaggagagcggggagttcagcctgcagagcagcaatgccagcaagctgagccagtgcagcagcaaggacagcgacagcgaggagagtgactgcaacatcaagctgctggacagccagagcgaccagaccagcaagctgcggctgagccacttcagcaagaaggacacccccctgaggaacaaggtgcccggcctgtacaagagcagcagcgctgacagcctgagcaccaccaagatcaagcccctgggccctgcccgggccagcggcctgagcaagaagccagccagcatccagaagaggaagcaccacaatgctgagaacaagccaggcctgcagatcaagctgaatgagctgtggaagaactttggcttcaagaagttctag

SEQ ID NO: 140124 - DNA, 2412 bp, Artificial Sequence
  derived and/or modified sequence
atgggcatccagggcctgctgcagttcatcaaggaggccagcgagccaatccatgttcgcaagtataaggggcaggttgtcgctgtcgatacctactgctggttgcataagggcgcaattgcttgtgctgagaaactcgctaaaggtgaaccaaccgacaggtatgtgggcttctgcatgaaatttgtgaatatgcttctctcacacgggattaagcccatcctggtctttgacggctgcacgctcccttcgaagaaggaggtggagagaagccgcagagaacgacggcaagcaaacctcctgaaaggcaaacagctgctacgcgagggaaaggtcagcgaagcacgcgaatgttttactcgatctataaatataacacacgccatggcacacaaggtgatcaaggccgcccgcagtcaaggcgtcgattgccttgtggcaccctacgaggctgacgcccagctggcctatttgaataaggcagggatcgtccaggcgatcattaccgaagacagtgacctcttggcctttggatgtaagaaggtgatattgaaaatggatcagttcggcaatggacttgagattgatcaggcacgactgggtatgtgtcggcagttgggcgacgtctttacagaggaaaaatttaggtatatgtgcatcctctcaggatgcgattacctgtcctccctccgaggcattggactggctaaagcatgtaaagtgctcagactggcgaataatcccgacattgtcaaagtaattaagaagatagggcactatctaaagatgaatattaccgtgcccgaggattacattaatggcttcatccgcgcgaataatacctttctgtatcagctggtgttcgaccctattaaacgcaaactcattcctttgaacgcatatgaggacgatgttgacccagaaacgctgtcatatgcaggacagtatgtggatgatagtatagcgctccagatcgctctgggcaataaggatatcaacacattcgagcagattgatgactacaatccagatactgccatgcctgcccactccagaagtcattcctgggatgataaaacttgccagaagtcagctaacgtttcctctatttggcaccgaaattacagtcccaggcctgaaagcggcaccgtgtcagacgcccctcaattgaaagaaaatcctagcacggttggggtagagagggtgattagcacgaagggcctgaatttgccaaggaagagctccatcgtcaaacggcccaggagcgccgagcttagtgaagacgatcttctttcacagtactctctgtcttttactaaaaaaactaaaaagaattccagtgaaggaaataagtcccttagtttttcggaagtgttcgttcccgacctggtcaatggaccgacaaataagaaatccgtgtccacgcccccgaggactcggaataaattcgctactttcctccagcgtaagaatgaggagtctggcgccgtcgtcgtccccgggaccagatcacgctttttctgtagctcagactccacggactgtgtatccaataaagtttcgattcagcccctcgacgaaacggcagtcacagataaagagaacaacctgcacgaatcagaatacggagaccaggaaggtaaacggcttgtggatacggacgtagcccggaattcctctgacgacatcccaaataaccatatccccggcgatcacatcccagataaggccacggtgttcacagacgaagagtcctactccttcgagagctcgaagttcactcggaccatctcaccgcccaccctgggtacgctccgctcatgcttctcatggtccggcggtctgggcgacttttccagaacaccctctccatccccttctactgcactccagcagttcaggcggaagtcagacagcccaacaagcttgccagaaaacaacatgtctgacgtgagtcagctcaagagcgaggagtccagcgacgatgagagccatcctttacgagaagaggcatgcagttcccagtcacaggagagcggggagtttagccttcagtcttctaacgccagtaagctcagccagtgttccagcaaggactccgactctgaagagagcgattgtaacattaagttgcttgatagccagtcagatcagacgtctaagcttagactcagccactttagcaagaaagacaccccgctcaggaataaagttccagggctgtacaagagctccagcgcagactctctatctaccaccaagattaagccattaggacccgcccgagccagcggcctgagcaagaaacccgcctccatccagaaacggaagcaccataacgcagagaacaagccaggcctgcagatcaagttaaacgagttgtggaagaactttggttttaagaagttttag

SEQ ID NO: 140125 - DNA, 2412 bp, Artificial Sequence
  derived and/or modified sequence
atgggcatccaggggttgctgcagttcattaaagaagcgagcgagcccattcacgtccggaagtataaaggtcaggttgtggccgttgacacctactgctggctgcataaaggggctatcgcatgtgccgagaagctggcaaagggcgagccgaccgacagatacgtaggattttgtatgaaattcgtaaatatgctcctctcccatggcatcaaaccgattctggtattcgatggctgcaccctgccatctaagaaggaagtggagcggtcaaggcgggagaggaggcaggctaatctcctgaagggaaagcagctgcttagagaggggaaagtgagcgaggctcgtgaatgtttcactaggagcatcaacataacgcatgctatggcccataaggtcataaaagctgcacggtcccagggtgtagattgcctggtggcgccatatgaggcagacgctcaactcgcctacctgaacaaggccggtatcgtgcaggctatcatcacagaggacagcgatctcctcgctttcggatgcaagaaagtaatcttgaaaatggaccagtttggcaatggacttgagattgatcaagccaggctcggcatgtgtcgccagttgggagatgtgttcactgaggaaaaattcaggtacatgtgcattctctctggctgtgactatctgagtagcctccggggaatcgggcttgcaaaagcatgcaaggtgcttcgtctcgctaacaacccggacattgtgaaggtcataaaaaagatagggcattatctgaaaatgaatatcactgttccagaggactacattaacgggtttattcgggctaacaataccttcctgtaccaactggtgtttgatccaattaagaggaaattaatcccactgaacgcctacgaagatgacgtcgacccggagaccctaagctacgctggccagtatgtcgatgattctattgccctgcagattgccttaggaaataaggacatcaacaccttcgagcaaattgatgattataaccccgacacggccatgcccgctcacagcagatcccactcttgggatgataagacatgtcagaaaagcgctaacgtgtccagcatctggcacagaaactattcacccagacctgagagcgggacagtgtctgatgctcctcagctcaaggaaaaccctagcactgtcggggtcgaacgggtcatatcgacaaaggggttaaacctgccccgaaagtcatccatagtgaagagaccgagatcagccgaactgagcgaggacgatctcctgagtcagtattcactcagcttcaccaaaaagaccaaaaagaacagttccgaaggaaataaaagcttgagctttagcgaggtctttgtgcctgatctcgtgaatgggcctactaataagaagagcgtttccacacctccacggacgcgaaataagttcgctactttcctacagaggaagaatgaggaaagcggggctgtggtcgttcccggaacccgttcacgctttttctgcagcagcgattccactgattgtgtttccaacaaggtgagtatccaacccctcgatgaaacggcggtcactgacaaagaaaacaacctgcacgaatcggagtacggggaccaggaaggcaagcgcttagtggacacagatgtcgctcggaactcctcggacgatatcccgaacaaccacattccaggggatcacatcccagacaaagctactgtgtttaccgacgaggaatcttatagcttcgagtccagcaaattcacccgtactatttccccccctactctggggacactgcgcagctgtttcagctggagcggcggattgggagacttttctaggacaccttcaccaagtcctagtaccgcgttgcagcagttccgccgtaagtctgattctcctacttccctgcccgagaataacatgtcagatgtctcccagctgaaaagtgaagagtcaagtgatgacgaaagccaccccctccgagaggaggcatgttccagtcaatcacaggagtctggagagtttagtctgcagtcttccaacgctagcaaactatcacagtgctcctctaaagactccgactctgaagagtctgactgtaatatcaaattattggatagtcaatcagaccagacaagtaaactccggctctcgcattttagcaagaaagacacccccctgcggaacaaagtcccgggtctctataaatccagctcggcggattcactgtccacaacaaagatcaaacctctaggacccgctcgtgccagcgggctcagcaaaaaaccagcctctatacagaagcggaagcaccataacgcagaaaataagcccggattacaaatcaaactcaatgagctgtggaaaaatttcggatttaaaaaattctag

SEQ ID NO: 140126 - protein, 330 aa, Artificial Sequence
  derived and/or modified sequence
MPHSVTLRGPSPWGFRLVGGRDFSAPLTISRVHAGSKAALAALCPGDLIQAINGESTELMTHLEAQNRIKGCHDHLTLSVSRPEGRSWPSAPDDSKAQAHRIHIDPEIQDGSPTTSRRPSGTGTGPEDGRPSLGSPYGQPPRFPVPHNGSSEATLPAQMSTLHVSPPPSADPARGLPRSRDCRVDLGSEVYRMLREPAEPVAAEPKQSGSFRYLQGMLEAGEGGDWPGPGGPRNLKPTASKLGAPLSGLQGLPECTRCGHGIVGTIVKARDKLYHPECFMCSDCGLNLKQRGYFFLDERLYCESHAKARVKPPEGYDVVAVYPNAKVELV

SEQ ID NO: 140127 - DNA, 993 bp, Artificial Sequence
  derived and/or modified sequence
atgccccacagcgtgaccctgagaggccccagcccctggggcttcagactggtgggcggcagagacttcagcgcccccctgaccatcagcagagtgcacgccggcagcaaggccgccctggccgccctgtgccccggcgacctgatccaggccatcaacggcgagagcaccgagctgatgacccacctggaggcccagaacagaatcaagggctgccacgaccacctgaccctgagcgtgagcagacccgagggcagaagctggcccagcgcccccgacgacagcaaggcccaggcccacagaatccacatcgaccccgagatccaggacggcagccccaccaccagcagaagacccagcggcaccggcaccggccccgaggacggcagacccagcctgggcagcccctacggccagccccccagattccccgtgccccacaacggcagcagcgaggccaccctgcccgcccagatgagcaccctgcacgtgagccccccccccagcgccgaccccgccagaggcctgcccagaagcagagactgcagagtggacctgggcagcgaggtgtacagaatgctgagagagcccgccgagcccgtggccgccgagcccaagcagagcggcagcttcagatacctgcagggcatgctggaggccggcgagggcggcgactggcccggccccggcggccccagaaacctgaagcccaccgccagcaagctgggcgcccccctgagcggcctgcagggcctgcccgagtgcaccagatgcggccacggcatcgtgggcaccatcgtgaaggccagagacaagctgtaccaccccgagtgcttcatgtgcagcgactgcggcctgaacctgaagcagagaggctacttcttcctggacgagagactgtactgcgagagccacgccaaggccagagtgaagccccccgagggctacgacgtggtggccgtgtaccccaacgccaaggtggagctggtgtag

SEQ ID NO: 140128 - DNA, 993 bp, Artificial Sequence
  derived and/or modified sequence
atgccacactccgtgactttgcgaggtccttctccatgggggttccgcctcgtaggaggccgcgatttttctgcccctttgacaatttctcgagtgcacgctggatcaaaggctgctctcgcagcattgtgcccaggagaccttattcaggctatcaatggtgaatcaaccgagctgatgactcatctcgaagctcaaaatcggatcaaagggtgccatgatcatctaactctgtctgtgagccgacctgaaggccggtcctggccctctgccccagacgattcaaaggcccaggctcacagaatacacattgatcccgagatccaagatggatctcccacaacaagccgaagaccctcaggcaccggcacaggaccagaagatggtcgcccatcactgggcagcccatatgggcagcccccccgctttcccgtgccacacaacggttccagcgaagcgacattgcctgcccagatgtcaacgttgcacgtgagtccgcccccttcggcggatccagcgcggggactgccgagatctagagactgtagggtcgacttaggaagcgaggtttatcgaatgctgagagaaccagctgagcccgtggctgccgagccaaaacagtccggttcattccgatatctgcagggaatgctggaagccggagaaggaggggattggccggggccaggaggccctcgcaatctgaagccaacagccagcaaactgggcgccccactttccggtctccaagggcttccagagtgcacccgctgcgggcatgggatcgtgggaaccattgtgaaagcccgggataaactgtaccacccagagtgttttatgtgcagcgattgtgggcttaacctgaagcagagaggctatttctttctggatgagaggctgtattgtgagagccacgctaaagcccgcgtgaaaccgccagagggctacgatgtggtggccgtgtatcctaacgctaaggtagagttggtgtag

SEQ ID NO: 140129 - DNA, 993 bp, Artificial Sequence
  derived and/or modified sequence
atgccccacagcgtgaccctgcggggccccagcccctggggcttccggctggtgggcggccgggacttcagcgcccccctgaccatcagccgggtgcacgccggcagcaaggccgccctggccgccctgtgccctggggacctgatccaggccatcaatggagagagcacagagctgatgacccacctggaggcccagaaccgcatcaagggctgccacgaccacctgaccctgtctgtgtccaggcctgagggccgctcctggcccagcgccccagatgacagcaaggcccaggcccaccgcatccacatcgaccctgagatccaggacggcagccccaccaccagcagaagacccagcggcaccggcaccggcccagaagatggccggcccagcctgggcagcccctacggccagcccccacgcttccctgtgccccacaacggcagcagcgaggccaccctgcctgcccagatgagcaccctgcacgtgagccccccaccttctgctgaccctgcccggggcctgcccaggagccgggactgccgggtggacctgggcagcgaggtgtacaggatgctgcgggagcctgctgagcctgtggccgctgagcccaagcagagcggcagcttccgctacctgcagggcatgctggaggccggggagggcggggactggccaggccctgggggccccaggaacctgaagcccacagccagcaagctgggcgcccccctgagcggcctgcagggcctgcctgagtgcacccgctgtggccacggcatcgtgggcaccatcgtgaaggcccgggacaagctgtaccaccctgagtgcttcatgtgcagcgactgtggcctgaacctgaagcagaggggctacttcttcctggatgagcggctgtactgtgagagccacgccaaggcccgggtgaagcccccagagggctatgatgtggtggccgtgtacccaaatgccaaggtggagctggtgtag

SEQ ID NO: 140130 - DNA, 993 bp, Artificial Sequence
  derived and/or modified sequence
atgccccacagcgtgaccctgcggggccccagcccctggggcttccgattggtgggaggccgagacttttctgccccactgacaatctccagggtgcacgcagggagtaaagccgccctggccgctctatgcccaggcgatttgatacaggccatcaacggtgagtccacagagctgatgacacacttggaagctcagaaccgaataaaagggtgtcacgatcacttgacacttagtgtttcgcgccccgaaggccgatcctggccctccgctccagatgattcaaaggcccaggcgcacaggattcatatcgacccagagattcaagacggctcccccactacctcaagaaggccaagtggcactgggacggggcccgaagatggccgcccctccctcggaagcccctatggacaacctcctagattccccgtgcctcataacggaagcagtgaagcaacgctacccgcacaaatgagcacgctccatgtgagtccaccaccaagtgctgaccccgccagagggctgccgcggtctagagactgcagagtcgatctgggatcagaggtctaccgaatgctgcgagaacctgccgaacctgtagccgctgaacctaaacaatccggttctttcagatatcttcaggggatgctggaggctggtgagggaggcgattggcccggtcctggaggcccacggaacctcaaacccaccgctagcaaattaggtgcgcccttgagtgggctccagggacttcctgagtgtacacgatgcgggcacggtattgttggcacaattgtgaaggcccgcgataagctctaccaccccgagtgtttcatgtgcagcgactgtggacttaatcttaagcagagaggttatttcttcctcgatgaacgtctttactgtgaatctcacgccaaagctagggtgaagcctccagagggctacgatgtcgtggctgtgtaccccaatgctaaggtggaactggtctag

SEQ ID NO: 140131 - DNA, 993 bp, Artificial Sequence
  derived and/or modified sequence
atgcctcatagcgtgactctgcgaggtccatcaccttgggggtttcgactagtgggcggaagggacttttcggctcctttgaccatttctcgcgttcatgccggatcaaaagccgctttggccgctctctgtcccggagatctgatccaggcaattaacggagaaagtaccgagttaatgacccacctggaagcccaaaatcgaatcaaaggctgccatgaccacctgaccctctcagtgtctagacctgagggcagaagctggccgtccgcacctgacgatagcaaggctcaggcacatcgcatccacatcgaccctgaaattcaggacgggagccccactacatctcgcaggccaagcggtaccggcaccggcccagaggacggccgtccttcacttggctcaccatatgggcagcccccacgcttccccgtgcctcataatgggtcctcagaagccacgctccctgcccaaatgtccaccctgcatgtgtcccctcctccatctgctgatcctgcacgcggtctgcccaggtcaagagactgtcgtgtggacctcgggtctgaggtctatcgtatgctcagggagccggctgagcccgtggcggcagaacctaagcaatccgggagctttcgttatctgcagggcatgcttgaggctggggaaggcggtgattggccgggtcctggaggacctcgtaatctgaaaccaaccgctagtaagttgggcgctcctctgtccgggctccaggggctccccgaatgtactcgatgtggtcacggtattgtggggaccatcgtgaaagctagggataaattgtaccacccagagtgttttatgtgttcagactgcggattaaatctcaagcaaaggggttacttttttcttgacgagagactttattgcgaatcccacgctaaggccagagtgaaaccccctgaaggctacgatgttgtcgcggtgtaccccaatgctaaggtcgaattggtctag

SEQ ID NO: 140132 - DNA, 2282 bp, Artificial Sequence
  derived and/or modified sequence
gctgcggcggcggcggctcctcctcagagtccggctcaggctccggctgcggctccagcccgcgatgccccattccgtgaccctgcgcgggccttcgccctggggcttccgcctggtgggcggccgggacttcagcgcgcccctcaccatctcacgggtccatgctggcagcaaggctgcattggctgccctgtgcccaggagacctgatccaggccatcaatggtgagagcacagagctcatgacacacctggaggcacagaaccgcatcaagggctgccacgatcacctcacactgtctgtgagcaggcctgagggtaggagctggcccagtgcccctgatgacagcaaggctcaggcacacaggatccacatcgatcctgagatccaggacggcagcccaacaaccagcaggcggccctcaggcaccgggactgggccagaagatggcagaccaagcctgggatctccatatggacaaccccctcgctttccagtccctcacaatggcagcagcgaggccaccctgccagcccagatgagcaccctgcatgtgtctccaccccccagcgctgacccagccagaggcctcccgcggagccgggactgcagagtcgacctgggctccgaggtgtacaggatgctgcgggagccagccgagcccgtggccgcggagcccaagcagtcaggctccttccgctacttgcagggcatgctagaggccggcgagggcggggattggcccgggcctggcggcccccggaacctcaagcccacggccagcaagctgggcgctccgctgagcggcctgcaggggctgcccgagtgcacgcgctgcggccacggcatcgtgggcaccatcgtcaaggcacgggacaagctctaccatcccgagtgcttcatgtgcagtgactgcggcctgaacctcaagcagcgtggttacttctttctggacgagcggctctactgtgagagccacgccaaggcgcgcgtgaagccgcccgagggctacgacgtggtggcggtgtaccccaatgccaaggtggaactcgtctgagctgggaccctgctcccacgcctgcttcttaaggtccctgctcggccggtgtaaatatgtttcaccctgtccctctaataaagctcctctgctccaccttgaacctgtcacctggcctgccaccctcctgcgcaggccatgcatggctcccgagtacagtagtatctgcttaggtgccaggcatgtcctaggctctgggtgcagtagtgagcaggacgggtaccatgctgccctgaagggggccacagcctgggtggaaggcagacctgaatcacaacgggccagctctagtaatacgaaggtgaggtctgggatgctgcgtgcggcgcgacgacaggaggtatgacctgggtggggtcagggaaagtcttagctgagaactaagagatgagggaggcacaaactctgcacgggggaactgtgtgtgcaaaggtgagctgggggcgagaaaggcctctgtggccgtcatcggcactagcgggttgggggtggtggtggggtgctggcagcctcaggagcgatcgctcccctggagagggtgattgagtgtggagatcaccggggccgccgcgggccgtctgcacttctgttccaggtttttctggcattttctgttccaggtttcttccacccacgagcactttattctcctccgagacccccttttcttccccttcctctctcccccaccagggggcgcgcttaaatttccagacagagaccagaaggaaggtttagaaagaaaagaacacttgcccagggcagctttgccctccaagaggctccctcctgtctctaagtcaattccacccctcctcgaagtcccggcttccacccctctcctcagagtcccggcgtttacctcgtggtgtgtttgccttgggcctttcatgccccggctgcacacatcgtctgtgaattgtggctgttcactcccgaggatgtgtcctagactccgggtcgcgtggatctaccctctagtttacttgctcgggagaagaaactgactcgttttatttagtgcctatttagcgagcccagagtaacgtacatttgtgctgttttcaattttgtgctatcgcaaatcacaaaaaaactgttatcaattcacattcatcatcagcacgagacccatttccttgtgctcctgccagctcaggatattatgtttcttttttcatttttgccagtctgttaagtaaaatgtcatatgcgtttgttttaa

SEQ ID NO: 140133 - protein, 921 aa, Artificial Sequence
  derived and/or modified sequence
MADDDVLFEDVYELCEVIGKGPFSVVRRCINRETGQQFAVKIVDVAKFTSSPGLSTEDLKREASICHMLKHPHIVELLETYSSDGMLYMVFEFMDGADLCFEIVKRADAGFVYSEAVASHYMRQILEALRYCHDNNIIHRDVKPHCVLLASKENSAPVKLGGFGVAIQLGESGLVAGGRVGTPHFMAPEVVKREPYGKPVDVWGCGVILFILLSGCLPFYGTKERLFEGIIKGKYKMNPRQWSHISESAKDLVRRMLMLDPAERITVYEALNHPWLKERDRYAYKIHLPETVEQLRKFNARRKLKGAVLAAVSSHKFNSFYGDPPEELPDFSEDPTSSVLLIVSRAVSQVLDSLEEIHALTDCSEKDLDFLHSVFQDQHLHTLLDLYDKINTKSSPQIRNPPSDAVQRAKEVLEEISCYPENNDAKELKRILTQPHFMALLQTHDVVAHEVYSDEALRVTPPPTSPYLNGDSPESANGDMDMENVTRVRLVQFQKNTDEPMGITLKMNELNHCIVARIMHGGMIHRQGTLHVGDEIREINGISVANQTVEQLQKMLREMRGSITFKIVPSYRTQSSSCERDSPSTSRQSPANGHSSTNNSVSDLPSTTQPKGRQIYVRAQFEYDPAKDDLIPCKEAGIRFRVGDIIQIISKDDHNWWQGKLENSKNGTAGLIPSPELQEWRVACIAMEKTKQEQQASCTWFGKKKKQYKDKYLAKHNADLVTYEEVVKLPAFKRKTLVLLGAHGVGRRHIKNTLITKHPDRFAYPIPHTTRPPKKDEENGKNYYFVSHDQMMQDISNNEYLEYGSHEDAMYGTKLETIRKIHEQGLIAILDVEPQALKVLRTAEFAPFVVFIAAPTITPGLNEDESLQRLQKESDILQRTYAHYFDLTIINNEIDETIRHLEEAVELVCTAPQWVPVSWVY

SEQ ID NO: 140134 - protein, 909 aa, Artificial Sequence
  derived and/or modified sequence
MADDDVLFEDVYELCEVIGKGPFSVVRRCINRETGQQFAVKIVDVAKFTSSPGLSTEDLKREASICHMLKHPHIVELLETYSSDGMLYMVFEFMDGADLCFEIVKRADAGFVYSEAVASHYMRQILEALRYCHDNNIIHRDVKPHCVLLASKENSAPVKLGGFGVAIQLGESGLVAGGRVGTPHFMAPEVVKREPYGKPVDVWGCGVILFILLSGCLPFYGTKERLFEGIIKGKYKMNPRQWSHISESAKDLVRRMLMLDPAERITVYEALNHPWLKERDRYAYKIHLPETVEQLRKFNARRKLKGAVLAAVSSHKFNSFYGDPPEELPDFSEDPTSSVLLIVSRAVSQVLDSLEEIHALTDCSEKDLDFLHSVFQDQHLHTLLDLYDKINTKSSPQIRNPPSDAVQRAKEVLEEISCYPENNDAKELKRILTQPHFMALLQTHDVVAHEVYSDEALRVTPPPTSPYLNGDSPESANGDMDMENVTRVRLVQFQKNTDEPMGITLKMNELNHCIVARIMHGGMIHRQGTLHVGDEIREINGISVANQTVEQLQKMLREMRGSITFKIVPSYRTQSSSCERDSPSTSRQSPANGHSSTNNSVSIYVRAQFEYDPAKDDLIPCKEAGIRFRVGDIIQIISKDDHNWWQGKLENSKNGTAGLIPSPELQEWRVACIAMEKTKQEQQASCTWFGKKKKQYKDKYLAKHNADLVTYEEVVKLPAFKRKTLVLLGAHGVGRRHIKNTLITKHPDRFAYPIPHTTRPPKKDEENGKNYYFVSHDQMMQDISNNEYLEYGSHEDAMYGTKLETIRKIHEQGLIAILDVEPQALKVLRTAEFAPFVVFIAAPTITPGLNEDESLQRLQKESDILQRTYAHYFDLTIINNEIDETIRHLEEAVELVCTAPQWVPVSWVY

SEQ ID NO: 140135 - protein, 909 aa, Artificial Sequence
  derived and/or modified sequence
MADDDVLFEDVYELCEVIGKGPFSVVRRCINRETGQQFAVKIVDVAKFTSSPGLSTEDLKREASICHMLKHPHIVELLETYSSDGMLYMVFEFMDGADLCFEIVKRADAGFVYSEAVASHYMRQILEALRYCHDNNIIHRDVKPHCVLLASKENSAPVKLGGFGVAIQLGESGLVAGGRVGTPHFMAPEVVKREPYGKPVDVWGCGVILFILLSGCLPFYGTKERLFEGIIKGKYKMNPRQWSHISESAKDLVRRMLMLDPAERITVYEALNHPWLKERDRYAYKIHLPETVEQLRKFNARRKLKGAVLAAVSSHKFNSFYGDPPEELPDFSEDPTSSGLLAAERAVSQVLDSLEEIHALTDCSEKDLDFLHSVFQDQHLHTLLDLYDKINTKSSPQIRNPPSDAVQRAKEVLEEISCYPENNDAKELKRILTQPHFMALLQTHDVVAHEVYSDEALRVTPPPTSPYLNGDSPESANGDMDMENVTRVRLVQFQKNTDEPMGITLKMNELNHCIVARIMHGGMIHRQGTLHVGDEIREINGISVANQTVEQLQKMLREMRGSITFKIVPSYRTQSSSCERDSPSTSRQSPANGHSSTNNSVSIYVRAQFEYDPAKDDLIPCKEAGIRFRVGDIIQIISKDDHNWWQGKLENSKNGTAGLIPSPELQEWRVACIAMEKTKQEQQASCTWFGKKKKQYKDKYLAKHNADLVTYEEVVKLPAFKRKTLVLLGAHGVGRRHIKNTLITKHPDRFAYPIPHTTRPPKKDEENGKNYYFVSHDQMMQDISNNEYLEYGSHEDAMYGTKLETIRKIHEQGLIAILDVEPQALKVLRTAEFAPFVVFIAAPTITPGLNEDESLQRLQKESDILQRTYAHYFDLTIINNEIDETIRHLEEAVELVCTAPQWVPVSWVY

SEQ ID NO: 140136 - protein, 926 aa, Artificial Sequence
  derived and/or modified sequence
MADDDVLFEDVYELCEVIGKGPFSVVRRCINRETGQQFAVKIVDVAKFTSSPGLSTEDLKREASICHMLKHPHIVELLETYSSDGMLYMVFEFMDGADLCFEIVKRADAGFVYSEAVASHYMRQILEALRYCHDNNIIHRDVKPHCVLLASKENSAPVKLGGFGVAIQLGESGLVAGGRVGTPHFMAPEVVKREPYGKPVDVWGCGVILFILLSGCLPFYGTKERLFEGIIKGKYKMNPRQWSHISESAKDLVRRMLMLDPAERITVYEALNHPWLKERDRYAYKIHLPETVEQLRKFNARRKLKGAVLAAVSSHKFNSFYGDPPEELPDFSEDPTSSGLLAAERAVSQVLDSLEEIHALTDCSEKDLDFLHSVFQDQHLHTLLDLYDKINTKSSPQIRNPPSDAVQRAKEVLEEISCYPENNDAKELKRILTQPHFMALLQTHDVVAHEVYSDEALRVTPPPTSPYLNGDSPESANGDMDMENVTRVRLVQFQKNTDEPMGITLKMNELNHCIVARIMHGGMIHRQGTLHVGDEIREINGISVANQTVEQLQKMLREMRGSITFKIVPSYRTQSSSCERDSPSTSRQSPANGHSSTNNSVSDLPSTTQPKGRQIYVRAQFEYDPAKDDLIPCKEAGIRFRVGDIIQIISKDDHNWWQGKLENSKNGTAGLIPSPELQEWRVACIAMEKTKQEQQASCTWFGKKKKQYKDKYLAKHNAVFDQLDLVTYEEVVKLPAFKRKTLVLLGAHGVGRRHIKNTLITKHPDRFAYPIPHTTRPPKKDEENGKNYYFVSHDQMMQDISNNEYLEYGSHEDAMYGTKLETIRKIHEQGLIAILDVEPQALKVLRTAEFAPFVVFIAAPTITPGLNEDESLQRLQKESDILQRTYAHYFDLTIINNEIDETIRHLEEAVELVCTAPQWVPVSWVY

SEQ ID NO: 140137 - protein, 921 aa, Artificial Sequence
  derived and/or modified sequence
MADDDVLFEDVYELCEVIGKGPFSVVRRCINRETGQQFAVKIVDVAKFTSSPGLSTEDLKREASICHMLKHPHIVELLETYSSDGMLYMVFEFMDGADLCFEIVKRADAGFVYSEAVASHYMRQILEALRYCHDNNIIHRDVKPHCVLLASKENSAPVKLGGFGVAIQLGESGLVAGGRVGTPHFMAPEVVKREPYGKPVDVWGCGVILFILLSGCLPFYGTKERLFEGIIKGKYKMNPRQWSHISESAKDLVRRMLMLDPAERITVYEALNHPWLKERDRYAYKIHLPETVEQLRKFNARRKLKGAVLAAVSSHKFNSFYGDPPEELPDFSEDPTSSGLLAAERAVSQVLDSLEEIHALTDCSEKDLDFLHSVFQDQHLHTLLDLYDKINTKSSPQIRNPPSDAVQRAKEVLEEISCYPENNDAKELKRILTQPHFMALLQTHDVVAHEVYSDEALRVTPPPTSPYLNGDSPESANGDMDMENVTRVRLVQFQKNTDEPMGITLKMNELNHCIVARIMHGGMIHRQGTLHVGDEIREINGISVANQTVEQLQKMLREMRGSITFKIVPSYRTQSSSCERDSPSTSRQSPANGHSSTNNSVSDLPSTTQPKGRQIYVRAQFEYDPAKDDLIPCKEAGIRFRVGDIIQIISKDDHNWWQGKLENSKNGTAGLIPSPELQEWRVACIAMEKTKQEQQASCTWFGKKKKQYKDKYLAKHNADLVTYEEVVKLPAFKRKTLVLLGAHGVGRRHIKNTLITKHPDRFAYPIPHTTRPPKKDEENGKNYYFVSHDQMMQDISNNEYLEYGSHEDAMYGTKLETIRKIHEQGLIAILDVEPQALKVLRTAEFAPFVVFIAAPTITPGLNEDESLQRLQKESDILQRTYAHYFDLTIINNEIDETIRHLEEAVELVCTAPQWVPVSWVY

SEQ ID NO: 140138 - DNA, 2766 bp, Artificial Sequence
  derived and/or modified sequence
atggcagatgacgacgtccttttcgaagacgtgtatgagctgtgtgaagtgatcggtaaagggccattcagcgttgtgcgaaggtgtattaaccgagagacaggacagcagtttgccgttaaaatcgttgacgtcgccaagttcaccagctcccctggtttatcaacggaagacctaaagagggaggcgtcgatttgccatatgctgaagcacccacacatcgttgagctcctggagacttatagtagcgacggtatgctgtatatggtgtttgaatttatggacggagccgatttgtgtttcgaaatcgtgaagcgcgcggatgcgggatttgtgtattcagaggccgtagcaagtcattatatgcggcagattcttgaagcattgagatactgccacgataataacataatccatcgcgatgtcaaaccacactgtgtccttttggcgtctaaagaaaactctgctccggtgaagttgggtggcttcggagtagctatccagctgggagagagtgggctggtggcaggaggccgtgtaggaacaccccatttcatggccccggaggtggtgaagcgagagccatatggcaaaccagtggacgtgtggggctgcggagtcattctctttatcctgctctccggttgcctacctttttatggaaccaaggagaggctgtttgaagggatcatcaaaggcaagtacaagatgaatccgagacagtggtcccatatttccgaaagcgccaaggatctggtacgtagaatgctgatgctcgacccagcggaacgcattaccgtctacgaagccttgaaccacccgtggctcaaagaacgggacagatatgcttataaaattcaccttccagagacagtcgagcagctaagaaaatttaacgctcgccggaagcttaagggtgctgtgcttgcagccgtgagttctcataaattcaatagcttttacggagatccaccagaggaactcccagacttctcagaggatcccacatcttctgttttgttgatagtgtctcgggctgtcagccaggtactcgactccctggaggaaatccatgccctcactgattgttctgagaaagatctcgatttcttgcatagcgtgtttcaagaccagcatcttcacactctcttggatctgtacgacaaaatcaacacaaagagttccccccagatcagaaatcctccatctgacgccgtccagcgcgcaaaggaggtcctggaagagatctcgtgctacccagagaacaacgacgctaaagagttgaaaaggattctcacacagccccactttatggcactgctccaaacccacgacgtggtggcccacgaagtgtatagcgacgaggccctgcgggtcacacctccacccacctctccttatctgaacggggattccccagaatctgccaacggcgatatggatatggaaaacgtcacaagagtgaggctggtacagtttcagaagaataccgatgaacctatgggcattaccctgaagatgaacgagttaaaccattgcattgttgcccgtatcatgcacggcggcatgatccaccgccagggaacactccacgtcggcgatgaaatcagagagatcaacggaatctcggtggccaatcagactgtggagcaactgcagaagatgcttagggagatgcgggggtctattaccttcaaaatcgtgccttcgtaccgtacacaatcatcatcatgtgagagggattcccccagtacatctagacagtctcccgcaaatggacatagctccacaaataactcagtgtccgatctgccctcgacaacccagccaaaaggaaggcagatttacgtgagggcacagtttgaatatgatccagcaaaggacgacctgattccatgcaaggaggctggaataagattcagagtcggggacatcatccaaataattagcaaagacgaccacaactggtggcagggaaaacttgagaactctaaaaatggaactgcaggcttgatccccagccctgaactgcaagagtggagagtagcctgcattgcaatggagaaaaccaagcaggagcaacaggccagctgcacttggtttggcaaaaagaagaagcaatacaaagataaatacctggctaaacacaatgctgacttggtgacatatgaggaggtcgtcaagcttccggcgtttaagcggaagactctggtcctgcttggggcccacggggtcggcagacgtcacatcaaaaatactctcatcacgaaacaccctgaccgcttcgcataccccatccctcacactacccgtcctccaaaaaaggacgaagaaaatggaaagaattactactttgtttcccacgaccagatgatgcaggacatctccaacaatgaatacttggagtatggcagtcacgaagatgcgatgtatggcactaagctggagacaattcgcaagatccacgaacaggggttgatcgcaatcctcgatgtggagccacaggccttgaaggtgctgaggacggcagagttcgccccgtttgttgtgttcatcgcggcccccaccataacccctgggttaaacgaagatgagagcctacaaagactccagaaggagtccgatattcttcagaggacatacgcacactactttgacctcacgatcatcaacaacgaaatcgacgagaccattcgacacctcgaagaagccgtggaattggtgtgcaccgccccacaatgggttccggtgtcttgggtgtattag

SEQ ID NO: 140139 - DNA, 2730 bp, Artificial Sequence
  derived and/or modified sequence
atggccgacgatgacgtcttatttgaagatgtgtatgaattatgtgaggttatcggaaagggaccattctcagtggtgcggcggtgtataaacagagaaacggggcaacagtttgctgtgaaaatcgtggacgtagcaaaattcacaagctcacctgggctcagtactgaggatctgaagcgtgaagctagcatatgtcatatgttaaaacatccgcatatcgttgaacttctggaaacttactcttccgacgggatgctgtacatggtgtttgagttcatggatggtgcggatctctgttttgagatcgtaaaacgcgctgatgccggctttgtgtattccgaagccgtcgctagccactatatgaggcagatcctggaggccctgcggtattgtcacgataataacattattcatcgcgatgtgaaaccccattgtgtcttgctggcctcgaaagaaaactcagcccccgtcaaactgggtggattcggagtcgctatccagcttggggaatcagggctggtcgctggaggaagagtgggaactcctcactttatggcccccgaagtagtaaagagagagccttacggcaagcccgtggacgtgtggggatgcggagtcattctttttatacttctgtccggatgtctgcccttttacggaaccaaggagcggctgtttgagggaatcattaagggcaagtacaagatgaacccacgacagtggagccacatctctgaatccgccaaggacctcgtccgcaggatgttgatgctggaccctgctgagcggatcacagtttatgaggccctaaatcacccctggcttaaagagcgggaccgatacgcatataagattcatctgcctgaaactgtggagcaactgcgcaagtttaacgcacgcaggaagctgaagggagctgtgctcgcagcagtgtctagccacaagttcaactcattttacggggaccccccagaagaacttccggatttcagcgaggatcctacttctagcgtcttgctcatcgtaagtagagccgtttcacaggtgctggatagcttggaggagatccatgcactcaccgattgcagcgagaaggatctagacttcctccactctgttttccaggaccagcacctgcataccctgctggatctgtacgacaaaattaacacaaaaagctctccacagatcagaaatcctccttctgacgctgtgcagagagctaaggaagtcctggaagagatctcatgttatcccgagaacaacgatgccaaagagttaaagcgcattctgacccagcctcatttcatggcactgttacagacccatgacgtcgtggctcacgaagtctatagcgacgaagctctgcgtgtgaccccaccccctaccagtccttaccttaacggggatagtcctgagtcagcaaacggagatatggatatggagaacgtcacaagagtcaggcttgtccaatttcagaagaataccgatgaaccaatgggaatcaccctgaaaatgaatgaactgaaccactgtatagtggctcgcataatgcacgggggaatgattcacagacaaggcaccctgcacgttggagatgagatacgcgagatcaatggtatctccgtggctaatcagaccgtggagcagctgcagaaaatgctgcgggagatgagaggcagcataacattcaaaattgtaccctcctaccgcacccagtcctcctcgtgcgagcgcgatagtcctagcacaagtaggcaaagcccggcaaacggtcacagctccaccaataattccgtctccatctatgtaagagcgcagttcgaatatgaccctgccaaagacgatctgataccttgcaaagaggcaggaattcgcttccgagtgggcgacatcatccaaatcatctccaaagacgatcacaattggtggcagggtaagctggagaactccaaaaacggcacagccgggttgattcctagccctgaattgcaggagtggcgagtagcctgcatcgcgatggaaaagactaaacaggagcagcaagcatcctgcacatggtttgggaagaagaaaaaacaatataaagacaagtacttagccaagcacaatgccgatctggtaacctacgaggaggtggtgaagcttccggcctttaaaagaaagaccctggtgctgctgggtgcacacggcgttgggaggaggcatattaaaaatactcttatcaccaagcacccagatcgtttcgcctatccaatcccacatactacccgcccaccaaaaaaagacgaagagaacggaaagaactattactttgtgtcccacgaccaaatgatgcaggacatcagtaacaacgaatatttggagtacgggagccacgaagacgccatgtacgggacaaaactcgaaactattcgaaaaatacacgaacagggattgatcgccattcttgacgttgaacctcaggcactgaaagtcctgagaacggcagaatttgcacccttcgtcgtctttatcgccgcccctacaataacacctggcctgaatgaagacgaatctctacaacggctgcaaaaggagagcgatatcctgcagagaacttatgcgcactacttcgacctgaccattattaacaatgaaatcgatgagactatccgccatctggaagaagctgtggaactggtttgcactgcccctcagtgggttcccgtctcctgggtctattag

SEQ ID NO: 140140 - DNA, 2730 bp, Artificial Sequence
  derived and/or modified sequence
atggccgatgacgacgtcctcttcgaagacgtgtacgaactgtgtgaagtcatcggaaagggcccgttctctgttgtgaggcggtgtatcaacagagaaactggccagcaatttgcagtcaaaatcgtagatgtggccaagttcactagctcccccggcttgagcacagaagatctgaagagggaggcctccatctgtcacatgctgaagcatccccatatagtggaattgctggaaacatattcgagcgatggcatgctatatatggtgttcgagttcatggatggggcggacttgtgtttcgagatcgtgaaacgagccgacgccggttttgtgtactctgaagctgttgcctctcactacatgagacagatcctcgaggctcttagatattgccatgataacaacataatccaccgggacgtgaaacctcattgcgtgctgcttgccagcaaggagaattctgctcctgtcaagctaggggggttcggagtggccattcaactgggggagtccgggctagtggctggggggcgagtgggcacaccacatttcatggctcctgaagtggtaaagagggagccctatggcaaacctgtcgatgtttggggttgtggagtgattctattcatactcctcagtggttgtctgcccttctatggcactaaagagcggctcttcgagggcattataaagggaaaatacaaaatgaacccccgccagtggtcgcacatctccgagtcagccaaagatctagtgcggcgaatgctgatgttggaccctgcagagaggatcaccgtctatgaagcgctaaaccatccatggctcaaggagcgggatcggtatgcttacaaaatccacctaccagagaccgttgaacagctccgtaaattcaatgcacgacgcaagttgaagggcgcagtgttggccgctgtttcatcccacaaattcaactcattttatggggaccctcctgaggaactaccggatttctctgaggacccaacatcgagcggtcttttggccgcagagagagccgtgagccaggtgcttgactccctggaagaaatacatgctctgacggactgctctgaaaaggacttggactttctgcatagcgtatttcaggaccaacacctgcacaccctgcttgacctgtacgacaagattaacacaaagtcctctccccagattaggaatcccccctccgatgccgtccaaagggctaaggaggtcttggaagagattagttgttaccctgaaaacaatgacgccaaggaactgaaacgtatactcactcagccccatttcatggccctcctgcaaacccatgacgttgtggcacatgaggtgtatagtgacgaagccctgcgagtcaccccccctcccacgtccccctacctgaacggagattcccctgaatctgccaatggcgatatggatatggagaacgttacgcgggtacgcctggtgcagtttcagaaaaataccgatgaacccatgggcatcacgctaaagatgaatgaactgaaccattgtattgtggctaggataatgcatggcggcatgatacatcgccagggcaccctgcatgtcggagacgagatccgcgagattaatggaatttcggtggcaaaccagacagtggagcagctgcagaagatgcttagagagatgaggggaagcattacgttcaagatcgtcccaagctaccggacgcaatctagcagctgcgaacgcgacagcccaagtacttcaagacagagtcctgcgaacgggcactcttctaccaataactccgtctcaatttacgtcagggcgcagtttgagtacgaccctgccaaggacgacctgatcccatgcaaggaggctggcatcagattcagagttggtgacatcatacagatcattagtaaggatgaccataattggtggcagggtaagttggaaaattccaagaacgggactgcaggcttgattccgtcccccgagctgcaggaatggcgcgtcgcctgcattgccatggagaagactaaacaggagcaacaggctagttgcacttggtttgggaaaaaaaaaaagcaatacaaagacaagtaccttgcaaaacataatgccgacctggtgacgtacgaggaggtagtgaagttacctgcctttaagcgaaaaactctggtgctgctcggtgcccacggcgtaggccgccgccatatcaaaaacactcttatcacaaagcacccagatcgattcgcatacccgatcccacataccacacggcctcctaaaaaggacgaggagaatggcaagaattattatttcgtaagccatgatcaaatgatgcaggatatcagcaataacgagtatcttgagtatggcagccacgaagacgccatgtacgggaccaagctcgaaaccatccggaaaatccacgagcagggcctaattgcaatcttggatgtggaacctcaggcactgaaagtgttgaggaccgctgagttcgcgccttttgttgtgtttattgcagctcctactattacacctgggctcaatgaagacgagtctcttcagcgacttcagaaagagagtgatattttgcaacgaacctacgcacactatttcgacctcacaattataaacaatgagatcgatgagacaattcgccacctagaggaagccgttgagcttgtgtgtacagcacctcaatgggttcccgtgtcatgggtctactag

SEQ ID NO: 140141 - DNA, 2781 bp, Artificial Sequence
  derived and/or modified sequence
atggcagatgacgacgttctattcgaagacgtctacgagctttgtgaggtcatcggaaaaggccctttttcggtggtgagacgctgcattaaccgagaaaccgggcaacagtttgcggtgaaaatcgtggatgtggccaaattcacaagcagccctggattatcgaccgaagacctcaagcgagaggcctcgatctgtcacatgctgaaacacccacacatagtagagctcctcgaaacctattcaagcgacggaatgttgtacatggtgttcgagttcatggacggagccgatctgtgttttgaaatagtcaaaagagccgatgccggcttcgtttattccgaggccgtagcaagccactacatgcggcagatactggaggccttgcgctattgtcatgataataacatcattcacagagacgtcaaaccccactgtgtactgctcgctagtaaagagaattcagcccctgttaagctcggggggtttggggttgccatacaattgggcgagagcggcctcgtagctggcgggcgtgtgggaactccacattttatggctcccgaggtagtgaaacgcgagccttatgggaaacccgtggatgtttggggatgtggtgtcatactgtttatcctgctgagcggctgcctccccttctacggcacgaaggagagactgttcgaaggcattataaaaggaaagtataagatgaatcctagacagtggtcacacatctccgaatcagcgaaggatctggtgcgacgtatgctgatgttggatcctgcggagcgcattactgtctatgaagcacttaaccatccgtggctgaaggagagagacagatatgcttataagatacacttgccagaaacagtggagcaactcagaaagttcaatgcccgacggaagttgaagggcgctgtgctggcagcggtgagcagccataaattcaattccttctatggagatccccctgaagaactccccgatttctcagaagatcccacgtcaagtggccttttagcagccgagagggctgtgtcacaggtgctcgactcactggaggaaatccacgccctgaccgattgttctgagaaggatttggatttcctgcattcagttttccaggatcaacatctgcacactctgctggacctctacgataagatcaatacgaaatcctcgccccagatccggaaccctccgagtgacgctgtgcagagagccaaagaggtgctcgaggaaatatcatgttaccctgagaataacgatgccaaagagctcaaaagaattctcacacagccccattttatggcccttttgcaaacccatgatgtggtcgctcatgaggtgtattccgacgaggcacttagggtgacgcccccacctacatcgccatatctaaacggtgattctcccgagtccgctaatggggacatggatatggaaaacgttacccgagtgcgtctggtgcagttccagaagaacacagacgagcccatgggcataaccttgaagatgaacgaacttaatcactgcatagtggcgcgcattatgcatgggggaatgatccacaggcaagggaccctgcatgttggcgacgagattcgagagatcaacggcatctccgtggctaatcagaccgtggaacagctccagaaaatgctaagagaaatgagaggctctatcacttttaagatcgtgccttcttatagaacacagagttcaagctgtgagagagacagccctagtacaagcagacagagtcccgcaaatggacactcaagcaccaacaattctgtgagtgacctgcccagtacaacccagcctaaagggaggcagatttacgtgagggcgcagtttgagtacgatcctgcaaaagatgatcttatcccgtgcaaggaggccggcattagattcagagtgggtgacattatacagattattagtaaggatgatcacaactggtggcagggaaagttggaaaacagcaagaacggcacggctggtctcattcccagtcctgaactgcaagaatggcgggtagcttgcatagcaatggagaaaacaaaacaagagcagcaggctagttgcacatggtttggcaagaaaaaaaagcagtataaagataagtacctggctaaacacaacgctgttttcgatcagcttgatctggttacatacgaagaagtggtcaagttgcccgcattcaaacgcaagacattggtgctgctcggtgcacatggagtcggacgcaggcatattaaaaataccttgattacgaagcaccccgatcgctttgcatatcctataccccatacgactagaccccctaaaaaggacgaggaaaacggcaagaattactatttcgtgtcccatgaccagatgatgcaggacatcagcaataacgagtatttagagtatggttcccacgaagatgctatgtacggcactaaactggagacaatcaggaaaatccatgaacaggggctgatcgctatactggacgtagagcctcaggcattgaaggttttgcgcacagcagagtttgcgccttttgtcgtgttcattgccgctcctacaatcaccccagggctgaatgaagacgagtcccttcaaaggttacagaaagaatctgacatactgcaacgaacctacgcgcattattttgatctgacaattataaataacgagatcgatgagactattagacacctggaggaagcagtcgagttggtgtgcactgcaccacagtgggtcccggtgtcctgggtgtattag

SEQ ID NO: 140142 - DNA, 2766 bp, Artificial Sequence
  derived and/or modified sequence
atggccgacgacgatgtgctgtttgaagacgtgtacgagctgtgtgaggtgatagggaagggtccattctctgttgtgcggagatgcataaacagggagacaggacagcagtttgcagtcaagatcgtcgatgtagccaaatttacctcctcgcctggcctgagcaccgaggacctaaaacgtgaagcatccatatgccacatgcttaagcatccgcacatcgtggagttgttggagacctactcatctgatggcatgctctatatggtgttcgagtttatggacggcgcagatttatgctttgagattgtgaaacgcgcagatgccggatttgtctacagcgaagcggtcgccagccattacatgcgccagattctcgaggctctgaggtattgtcacgataacaacatcatccaccgcgacgtcaagccacactgtgtcttactagccagcaaagagaactctgctccggtaaagctgggtggtttcggtgtggcaatacagttgggcgagtctggcctggtggctggtggccgcgtgggtacacctcattttatggctccagaggttgtgaagcgcgaaccttacggaaagcctgtggatgtgtgggggtgcggggtcattctattcatcctgctgagtggctgtcttcctttctatgggactaaagagaggttattcgagggtattattaaggggaagtacaaaatgaacccgcggcagtggagccacatctccgagtccgccaaagacctagtccgtagaatgctgatgctcgaccccgccgagcggatcacagtgtacgaagctctgaatcatccatggctcaaggaaagggatcgctacgcctacaagatccacctgcccgaaacagtcgaacagttacgcaaattcaacgcacggcgcaaactgaaaggcgctgtgctggctgctgtctccagccataagtttaactcattttacggcgaccctcctgaggaactgccagatttcagtgaagacccgacctcatccggactgctagctgccgaaagagcagtctcccaggtgctagactcactagaggagatccatgctctgaccgattgcagtgagaaggacctcgattttctgcacagcgtgttccaggatcaacatctgcacacgctcttagacctatacgacaagattaacaccaagtcctcaccacagatcaggaatcccccttccgacgccgtacagcgtgctaaagaagtgctcgaggagatctcatgctacccagagaacaacgacgcaaaggagctgaaaagaatcttaactcaaccccacttcatggcgctgctccagacccacgacgtggtggcacacgaagtgtactcagacgaggccttacgggttacccccccgccgacctctccttatctgaacggcgactcgccggaaagcgccaatggggatatggacatggaaaatgttacaagggttcgtctcgtccagtttcagaaaaataccgacgagcccatggggatcacattgaagatgaatgaacttaaccattgtattgtcgcccggataatgcatggcggcatgatccatagacagggaaccctacacgtgggagatgaaatccgcgagatcaatggaatctctgtggctaatcaaacagtggagcagctgcagaagatgctgcgtgaaatgagagggtccattacctttaaaattgtgccttcataccgcacgcagtcctcgtcttgcgagagagattcaccgtcgacgtcaagacagagccctgccaatggacatagttctacaaataacagtgtcagcgatctccctagcaccacccagccaaagggacggcagatctacgtccgggctcagtttgaatacgatccagcaaaggacgatcttatcccgtgcaaggaggcagggatcagatttcgggtgggggacatcatccagattatttccaaagacgaccacaactggtggcaaggtaagctggaaaactccaaaaacggtaccgctggcttgatcccaagccccgagctgcaggagtggagggtagcctgtatcgccatggagaagaccaaacaggagcagcaggcatcatgcacatggtttgggaaaaagaagaagcaatataaggataaatacttagcaaaacataacgccgacctcgtgacctacgaagaggtggttaagctgccggcattcaaacggaaaaccttagtcctgctaggggcccacggggtcggccgcaggcacattaaaaatactctgatcaccaagcaccccgatcggtttgcttacccaatcccccatacaaccaggccccccaaaaaggatgaagaaaatggcaaaaactattacttcgtgtcccacgaccagatgatgcaagatatttcaaataacgaatatctcgaatatgggtcacacgaagatgcaatgtacggaacaaaactggaaacgatcaggaagatccacgagcaggggctcatcgcgatcttagatgtggagcctcaggcactaaaagtcctacgcacagcagaattcgcccccttcgtggtgtttatagcggcccctacaatcacaccgggtctgaacgaggatgagtctctgcagaggctgcagaaagaatcagacatcctgcagaggacttatgctcattacttcgacttaacgattattaacaatgagattgatgaaactataaggcatctggaagaggccgttgaactggtttgtaccgcccctcaatgggtcccagtgtcttgggtgtactag

SEQ ID NO: 140143 - DNA, 2766 bp, Artificial Sequence
  derived and/or modified sequence
atggctgatgatgatgtgctgtttgaagatgtgtatgagctgtgtgaggtgattggcaagggccccttctctgtggtgcggcgctgcatcaaccgggagaccggccagcagtttgctgtgaagatcgtggatgtggccaagttcaccagcagccctggcctgagcacagaggacctgaagcgggaggccagcatctgccacatgctgaagcacccccacatcgtggagctgctggagacctacagcagtgatggcatgctgtacatggtgtttgagttcatggatggagctgacctgtgctttgaaattgtgaagagagcagatgctggctttgtgtacagcgaggccgtggccagccactacatgaggcagatcctggaggccctgcgctactgccacgacaacaacatcatccacagagatgtgaagccccactgtgtgctgctggccagcaaagaaaattctgcccctgtgaagctgggcggctttggagtggccatccagctgggggagagcggcctggtggccggcggccgggtgggcaccccccacttcatggcccctgaggtggtgaagcgggagccctacggcaagcctgtggatgtgtggggctgtggggtcatcctcttcatcctgctgagcggctgcctgcccttctacggcaccaaggagcggctgtttgagggcatcatcaagggcaagtacaagatgaacccccggcagtggagccacatcagcgagagcgccaaggacctggtgcggaggatgctgatgctggaccctgctgagcgcatcaccgtgtatgaggccctgaaccacccctggctgaaggagcgggacagatatgcctacaagatccacctgcctgagaccgtggagcagctgaggaagttcaatgcccggaggaagctgaagggagctgtgctggccgctgtgagcagccacaagttcaacagcttctatggagaccccccagaggagctgcctgacttcagcgaggaccccaccagctctgtgctgctgattgtgtccagagctgtgtcccaggtgctggacagcctggaggagatccacgccctgacagactgcagcgagaaggacctggacttcctgcacagcgtcttccaggaccagcacctgcacaccctgctggacctgtatgacaagatcaacaccaagagcagcccccagatcagaaatcctccttctgatgctgtgcagagggccaaggaggtgctggaggagatcagctgctacccagaaaataatgatgccaaggagctgaagaggatcctgacccagccccacttcatggccctgctgcagacccatgatgtggtggcccacgaggtgtacagtgatgaggccctgcgggtgaccccaccacccaccagcccctacctgaatggagacagccctgagagcgccaatggagacatggacatggagaatgtgaccagggtgcggctggtgcagttccagaagaacacagatgagcccatgggcatcaccctgaagatgaatgagctgaaccactgcatcgtggcccgcatcatgcacggcggcatgatccaccggcagggcaccctgcacgtgggagatgagatccgggagatcaatggcatctctgtggccaaccagacagtggagcagctgcagaagatgctgcgggagatgaggggcagcatcaccttcaagatcgtgcccagctaccgcacccagagcagcagctgtgagcgggacagccccagcaccagccggcagagccctgccaacggccacagcagcaccaacaacagcgtgtctgacctgcccagcaccacccagcccaagggccggcagatctacgtgcgggcccagtttgaatatgaccctgccaaggatgacctgatcccctgcaaggaggccggcatccgcttccgggtgggggacatcatccagatcatcagcaaggatgaccacaactggtggcagggcaagctggagaacagcaagaatggaacagctggcctcatccccagccctgagctgcaggagtggagggtggcctgcatcgccatggagaagaccaagcaggagcagcaggccagctgcacctggtttgggaagaagaagaagcagtacaaggacaagtacctggccaagcacaatgctgacctggtgacctatgaggaggtggtgaagctgcctgccttcaagaggaagaccctggtgctgctgggcgcccatggagtgggcagaagacacatcaagaacaccctcatcaccaagcacccagacagatttgcctaccccatcccccacaccacccggccccccaagaaggatgaggagaatggcaagaactactactttgtgtcccatgaccagatgatgcaggacatcagcaacaatgagtacctggagtatggcagccatgaagatgccatgtatggcaccaagctggagaccatcaggaagatccacgagcagggcctgattgccatcctggatgtggagccccaggccctgaaggtgctgaggacagctgagtttgccccctttgtggtgttcatcgccgcccccaccatcaccccaggcctgaatgaagatgagagcctgcagaggctgcagaaggagagtgacatcctgcagaggacctacgcccactactttgacctgaccatcatcaacaatgaaattgatgagaccatccgccacctggaggaggccgtggagctggtgtgcacagccccccagtgggtgcctgtgtcctgggtgtactag

SEQ ID NO: 140144 - DNA, 2730 bp, Artificial Sequence
  derived and/or modified sequence
atggctgatgatgatgtgctgtttgaagatgtgtatgagctgtgtgaggtgattggcaagggccccttctctgtggtgcggcgctgcatcaaccgggagaccggccagcagtttgctgtgaagatcgtggatgtggccaagttcaccagcagccctggcctgagcacagaggacctgaagcgggaggccagcatctgccacatgctgaagcacccccacatcgtggagctgctggagacctacagcagtgatggcatgctgtacatggtgtttgagttcatggatggagctgacctgtgctttgaaattgtgaagagagcagatgctggctttgtgtacagcgaggccgtggccagccactacatgaggcagatcctggaggccctgcgctactgccacgacaacaacatcatccacagagatgtgaagccccactgtgtgctgctggccagcaaagaaaattctgcccctgtgaagctgggcggctttggagtggccatccagctgggggagagcggcctggtggccggcggccgggtgggcaccccccacttcatggcccctgaggtggtgaagcgggagccctacggcaagcctgtggatgtgtggggctgtggggtcatcctcttcatcctgctgagcggctgcctgcccttctacggcaccaaggagcggctgtttgagggcatcatcaagggcaagtacaagatgaacccccggcagtggagccacatcagcgagagcgccaaggacctggtgcggaggatgctgatgctggaccctgctgagcgcatcaccgtgtatgaggccctgaaccacccctggctgaaggagcgggacagatatgcctacaagatccacctgcctgagaccgtggagcagctgaggaagttcaatgcccggaggaagctgaagggagctgtgctggccgctgtgagcagccacaagttcaacagcttctatggagaccccccagaggagctgcctgacttcagcgaggaccccaccagctctgtgctgctgattgtgtccagagctgtgtcccaggtgctggacagcctggaggagatccacgccctgacagactgcagcgagaaggacctggacttcctgcacagcgtcttccaggaccagcacctgcacaccctgctggacctgtatgacaagatcaacaccaagagcagcccccagatcagaaatcctccttctgatgctgtgcagagggccaaggaggtgctggaggagatcagctgctacccagaaaataatgatgccaaggagctgaagaggatcctgacccagccccacttcatggccctgctgcagacccatgatgtggtggcccacgaggtgtacagtgatgaggccctgcgggtgaccccaccacccaccagcccctacctgaatggagacagccctgagagcgccaatggagacatggacatggagaatgtgaccagggtgcggctggtgcagttccagaagaacacagatgagcccatgggcatcaccctgaagatgaatgagctgaaccactgcatcgtggcccgcatcatgcacggcggcatgatccaccggcagggcaccctgcacgtgggagatgagatccgggagatcaatggcatctctgtggccaaccagacagtggagcagctgcagaagatgctgcgggagatgaggggcagcatcaccttcaagatcgtgcccagctaccgcacccagagcagcagctgtgagcgggacagccccagcaccagccggcagagccctgccaacggccacagcagcaccaacaacagcgtgtccatctacgtgcgggcccagtttgaatatgaccctgccaaggatgacctgatcccctgcaaggaggccggcatccgcttccgggtgggggacatcatccagatcatcagcaaggatgaccacaactggtggcagggcaagctggagaacagcaagaatggaacagctggcctcatccccagccctgagctgcaggagtggagggtggcctgcatcgccatggagaagaccaagcaggagcagcaggccagctgcacctggtttgggaagaagaagaagcagtacaaggacaagtacctggccaagcacaatgctgacctggtgacctatgaggaggtggtgaagctgcctgccttcaagaggaagaccctggtgctgctgggcgcccatggagtgggcagaagacacatcaagaacaccctcatcaccaagcacccagacagatttgcctaccccatcccccacaccacccggccccccaagaaggatgaggagaatggcaagaactactactttgtgtcccatgaccagatgatgcaggacatcagcaacaatgagtacctggagtatggcagccatgaagatgccatgtatggcaccaagctggagaccatcaggaagatccacgagcagggcctgattgccatcctggatgtggagccccaggccctgaaggtgctgaggacagctgagtttgccccctttgtggtgttcatcgccgcccccaccatcaccccaggcctgaatgaagatgagagcctgcagaggctgcagaaggagagtgacatcctgcagaggacctacgcccactactttgacctgaccatcatcaacaatgaaattgatgagaccatccgccacctggaggaggccgtggagctggtgtgcacagccccccagtgggtgcctgtgtcctgggtgtactag

SEQ ID NO: 140145 - DNA, 2730 bp, Artificial Sequence
  derived and/or modified sequence
atggctgatgatgatgtgctgtttgaagatgtgtatgagctgtgtgaggtgattggcaagggccccttctctgtggtgcggcgctgcatcaaccgggagaccggccagcagtttgctgtgaagatcgtggatgtggccaagttcaccagcagccctggcctgagcacagaggacctgaagcgggaggccagcatctgccacatgctgaagcacccccacatcgtggagctgctggagacctacagcagtgatggcatgctgtacatggtgtttgagttcatggatggagctgacctgtgctttgaaattgtgaagagagcagatgctggctttgtgtacagcgaggccgtggccagccactacatgaggcagatcctggaggccctgcgctactgccacgacaacaacatcatccacagagatgtgaagccccactgtgtgctgctggccagcaaagaaaattctgcccctgtgaagctgggcggctttggagtggccatccagctgggggagagcggcctggtggccggcggccgggtgggcaccccccacttcatggcccctgaggtggtgaagcgggagccctacggcaagcctgtggatgtgtggggctgtggggtcatcctcttcatcctgctgagcggctgcctgcccttctacggcaccaaggagcggctgtttgagggcatcatcaagggcaagtacaagatgaacccccggcagtggagccacatcagcgagagcgccaaggacctggtgcggaggatgctgatgctggaccctgctgagcgcatcaccgtgtatgaggccctgaaccacccctggctgaaggagcgggacagatatgcctacaagatccacctgcctgagaccgtggagcagctgaggaagttcaatgcccggaggaagctgaagggagctgtgctggccgctgtgagcagccacaagttcaacagcttctatggagaccccccagaggagctgcctgacttcagcgaggaccccaccagcagcggcctgctggccgctgagagagctgtgtcccaggtgctggacagcctggaggagatccacgccctgacagactgcagcgagaaggacctggacttcctgcacagcgtcttccaggaccagcacctgcacaccctgctggacctgtatgacaagatcaacaccaagagcagcccccagatcagaaatcctccttctgatgctgtgcagagggccaaggaggtgctggaggagatcagctgctacccagaaaataatgatgccaaggagctgaagaggatcctgacccagccccacttcatggccctgctgcagacccatgatgtggtggcccacgaggtgtacagtgatgaggccctgcgggtgaccccaccacccaccagcccctacctgaatggagacagccctgagagcgccaatggagacatggacatggagaatgtgaccagggtgcggctggtgcagttccagaagaacacagatgagcccatgggcatcaccctgaagatgaatgagctgaaccactgcatcgtggcccgcatcatgcacggcggcatgatccaccggcagggcaccctgcacgtgggagatgagatccgggagatcaatggcatctctgtggccaaccagacagtggagcagctgcagaagatgctgcgggagatgaggggcagcatcaccttcaagatcgtgcccagctaccgcacccagagcagcagctgtgagcgggacagccccagcaccagccggcagagccctgccaacggccacagcagcaccaacaacagcgtgtccatctacgtgcgggcccagtttgaatatgaccctgccaaggatgacctgatcccctgcaaggaggccggcatccgcttccgggtgggggacatcatccagatcatcagcaaggatgaccacaactggtggcagggcaagctggagaacagcaagaatggaacagctggcctcatccccagccctgagctgcaggagtggagggtggcctgcatcgccatggagaagaccaagcaggagcagcaggccagctgcacctggtttgggaagaagaagaagcagtacaaggacaagtacctggccaagcacaatgctgacctggtgacctatgaggaggtggtgaagctgcctgccttcaagaggaagaccctggtgctgctgggcgcccatggagtgggcagaagacacatcaagaacaccctcatcaccaagcacccagacagatttgcctaccccatcccccacaccacccggccccccaagaaggatgaggagaatggcaagaactactactttgtgtcccatgaccagatgatgcaggacatcagcaacaatgagtacctggagtatggcagccatgaagatgccatgtatggcaccaagctggagaccatcaggaagatccacgagcagggcctgattgccatcctggatgtggagccccaggccctgaaggtgctgaggacagctgagtttgccccctttgtggtgttcatcgccgcccccaccatcaccccaggcctgaatgaagatgagagcctgcagaggctgcagaaggagagtgacatcctgcagaggacctacgcccactactttgacctgaccatcatcaacaatgaaattgatgagaccatccgccacctggaggaggccgtggagctggtgtgcacagccccccagtgggtgcctgtgtcctgggtgtactag

SEQ ID NO: 140146 - DNA, 2781 bp, Artificial Sequence
  derived and/or modified sequence
atggctgatgatgatgtgctgtttgaagatgtgtatgagctgtgtgaggtgattggcaagggccccttctctgtggtgcggcgctgcatcaaccgggagaccggccagcagtttgctgtgaagatcgtggatgtggccaagttcaccagcagccctggcctgagcacagaggacctgaagcgggaggccagcatctgccacatgctgaagcacccccacatcgtggagctgctggagacctacagcagtgatggcatgctgtacatggtgtttgagttcatggatggagctgacctgtgctttgaaattgtgaagagagcagatgctggctttgtgtacagcgaggccgtggccagccactacatgaggcagatcctggaggccctgcgctactgccacgacaacaacatcatccacagagatgtgaagccccactgtgtgctgctggccagcaaagaaaattctgcccctgtgaagctgggcggctttggagtggccatccagctgggggagagcggcctggtggccggcggccgggtgggcaccccccacttcatggcccctgaggtggtgaagcgggagccctacggcaagcctgtggatgtgtggggctgtggggtcatcctcttcatcctgctgagcggctgcctgcccttctacggcaccaaggagcggctgtttgagggcatcatcaagggcaagtacaagatgaacccccggcagtggagccacatcagcgagagcgccaaggacctggtgcggaggatgctgatgctggaccctgctgagcgcatcaccgtgtatgaggccctgaaccacccctggctgaaggagcgggacagatatgcctacaagatccacctgcctgagaccgtggagcagctgaggaagttcaatgcccggaggaagctgaagggagctgtgctggccgctgtgagcagccacaagttcaacagcttctatggagaccccccagaggagctgcctgacttcagcgaggaccccaccagcagcggcctgctggccgctgagagagctgtgtcccaggtgctggacagcctggaggagatccacgccctgacagactgcagcgagaaggacctggacttcctgcacagcgtcttccaggaccagcacctgcacaccctgctggacctgtatgacaagatcaacaccaagagcagcccccagatcagaaatcctccttctgatgctgtgcagagggccaaggaggtgctggaggagatcagctgctacccagaaaataatgatgccaaggagctgaagaggatcctgacccagccccacttcatggccctgctgcagacccatgatgtggtggcccacgaggtgtacagtgatgaggccctgcgggtgaccccaccacccaccagcccctacctgaatggagacagccctgagagcgccaatggagacatggacatggagaatgtgaccagggtgcggctggtgcagttccagaagaacacagatgagcccatgggcatcaccctgaagatgaatgagctgaaccactgcatcgtggcccgcatcatgcacggcggcatgatccaccggcagggcaccctgcacgtgggagatgagatccgggagatcaatggcatctctgtggccaaccagacagtggagcagctgcagaagatgctgcgggagatgaggggcagcatcaccttcaagatcgtgcccagctaccgcacccagagcagcagctgtgagcgggacagccccagcaccagccggcagagccctgccaacggccacagcagcaccaacaacagcgtgtctgacctgcccagcaccacccagcccaagggccggcagatctacgtgcgggcccagtttgaatatgaccctgccaaggatgacctgatcccctgcaaggaggccggcatccgcttccgggtgggggacatcatccagatcatcagcaaggatgaccacaactggtggcagggcaagctggagaacagcaagaatggaacagctggcctcatccccagccctgagctgcaggagtggagggtggcctgcatcgccatggagaagaccaagcaggagcagcaggccagctgcacctggtttgggaagaagaagaagcagtacaaggacaagtacctggccaagcacaatgctgtgtttgaccagctggacctggtgacctatgaggaggtggtgaagctgcctgccttcaagaggaagaccctggtgctgctgggcgcccacggcgtgggccgccgccacatcaagaacaccctcatcaccaagcacccagacagatttgcctaccccatcccccacaccaccaggcctcccaagaaggatgaagaaaatggcaagaactactactttgtgtcccatgaccagatgatgcaggacatcagcaacaatgagtacctggagtatggcagccatgaagatgccatgtatggcaccaagctggagaccatcaggaagatccacgagcagggcctcatcgccatcctggatgtggagccccaggccctgaaggtgctgaggacagctgagtttgccccctttgtggtgttcatcgccgcccccaccatcaccccaggcctgaatgaagatgagagcctgcagaggctgcagaaggagagtgacatcctgcagaggacctacgcccactactttgacctgaccatcatcaacaatgaaattgatgagaccatccgccacctggaggaggccgtggagctggtgtgcacagccccccagtgggtgcctgtgtcctgggtgtactag

SEQ ID NO: 140147 - DNA, 2766 bp, Artificial Sequence
  derived and/or modified sequence
atggctgatgatgatgtgctgtttgaagatgtgtatgagctgtgtgaggtgattggcaagggccccttctctgtggtgcggcgctgcatcaaccgggagaccggccagcagtttgctgtgaagatcgtggatgtggccaagttcaccagcagccctggcctgagcacagaggacctgaagcgggaggccagcatctgccacatgctgaagcacccccacatcgtggagctgctggagacctacagcagtgatggcatgctgtacatggtgtttgagttcatggatggagctgacctgtgctttgaaattgtgaagagagcagatgctggctttgtgtacagcgaggccgtggccagccactacatgaggcagatcctggaggccctgcgctactgccacgacaacaacatcatccacagagatgtgaagccccactgtgtgctgctggccagcaaagaaaattctgcccctgtgaagctgggcggctttggagtggccatccagctgggggagagcggcctggtggccggcggccgggtgggcaccccccacttcatggcccctgaggtggtgaagcgggagccctacggcaagcctgtggatgtgtggggctgtggggtcatcctcttcatcctgctgagcggctgcctgcccttctacggcaccaaggagcggctgtttgagggcatcatcaagggcaagtacaagatgaacccccggcagtggagccacatcagcgagagcgccaaggacctggtgcggaggatgctgatgctggaccctgctgagcgcatcaccgtgtatgaggccctgaaccacccctggctgaaggagcgggacagatatgcctacaagatccacctgcctgagaccgtggagcagctgaggaagttcaatgcccggaggaagctgaagggagctgtgctggccgctgtgagcagccacaagttcaacagcttctatggagaccccccagaggagctgcctgacttcagcgaggaccccaccagcagcggcctgctggccgctgagagagctgtgtcccaggtgctggacagcctggaggagatccacgccctgacagactgcagcgagaaggacctggacttcctgcacagcgtcttccaggaccagcacctgcacaccctgctggacctgtatgacaagatcaacaccaagagcagcccccagatcagaaatcctccttctgatgctgtgcagagggccaaggaggtgctggaggagatcagctgctacccagaaaataatgatgccaaggagctgaagaggatcctgacccagccccacttcatggccctgctgcagacccatgatgtggtggcccacgaggtgtacagtgatgaggccctgcgggtgaccccaccacccaccagcccctacctgaatggagacagccctgagagcgccaatggagacatggacatggagaatgtgaccagggtgcggctggtgcagttccagaagaacacagatgagcccatgggcatcaccctgaagatgaatgagctgaaccactgcatcgtggcccgcatcatgcacggcggcatgatccaccggcagggcaccctgcacgtgggagatgagatccgggagatcaatggcatctctgtggccaaccagacagtggagcagctgcagaagatgctgcgggagatgaggggcagcatcaccttcaagatcgtgcccagctaccgcacccagagcagcagctgtgagcgggacagccccagcaccagccggcagagccctgccaacggccacagcagcaccaacaacagcgtgtctgacctgcccagcaccacccagcccaagggccggcagatctacgtgcgggcccagtttgaatatgaccctgccaaggatgacctgatcccctgcaaggaggccggcatccgcttccgggtgggggacatcatccagatcatcagcaaggatgaccacaactggtggcagggcaagctggagaacagcaagaatggaacagctggcctcatccccagccctgagctgcaggagtggagggtggcctgcatcgccatggagaagaccaagcaggagcagcaggccagctgcacctggtttgggaagaagaagaagcagtacaaggacaagtacctggccaagcacaatgctgacctggtgacctatgaggaggtggtgaagctgcctgccttcaagaggaagaccctggtgctgctgggcgcccatggagtgggcagaagacacatcaagaacaccctcatcaccaagcacccagacagatttgcctaccccatcccccacaccacccggccccccaagaaggatgaggagaatggcaagaactactactttgtgtcccatgaccagatgatgcaggacatcagcaacaatgagtacctggagtatggcagccatgaagatgccatgtatggcaccaagctggagaccatcaggaagatccacgagcagggcctgattgccatcctggatgtggagccccaggccctgaaggtgctgaggacagctgagtttgccccctttgtggtgttcatcgccgcccccaccatcaccccaggcctgaatgaagatgagagcctgcagaggctgcagaaggagagtgacatcctgcagaggacctacgcccactactttgacctgaccatcatcaacaatgaaattgatgagaccatccgccacctggaggaggccgtggagctggtgtgcacagccccccagtgggtgcctgtgtcctgggtgtactag

SEQ ID NO: 140148 - DNA, 2766 bp, Artificial Sequence
  derived and/or modified sequence
atggccgacgacgacgtgctgttcgaggacgtgtacgagctgtgcgaggttattgggaagggcccattttctgtggtgaggaggtgcatcaatcgcgagactggacagcagttcgccgtcaagatcgtcgatgtcgccaaatttacttcaagccccggactgagtacagaggacttgaagcgagaggccagcatatgccacatgctgaagcatccccacattgtggagcttctagagacttattccagtgatggaatgctgtatatggtctttgaatttatggacggagccgatttatgttttgaaatagtgaaacgggccgacgctggctttgtctactcagaagccgttgcatcccactacatgagacagattctggaagctctgcggtattgtcacgacaacaatatcattcatcgagacgtcaagccccactgcgtcctgctcgcaagcaaagagaacagtgctcccgttaagttgggaggttttggggtggccattcagttaggcgaatcaggcctcgttgcaggcggcagggttgggacaccccactttatggcaccagaagtcgttaaaagagaaccatatgggaagcccgttgatgtgtgggggtgcggtgttattttgtttatcctcctcagcggctgcttgcccttttatggtacaaaagagcgactcttcgagggaattattaaaggtaaatataaaatgaatccaaggcagtggtctcacatcagcgagtcagcaaaagacctcgtcagaaggatgctgatgcttgacccggcagaacggatcactgtctatgaggccctaaaccacccctggcttaaggagcgagatcgctacgcctataagatacacttgcctgaaacggtcgaacagctcagaaagtttaatgcccgcaggaagttaaaaggggctgtgctagcagctgtgtccagccataagtttaattctttctatggagatccccccgaggagctgcctgatttctctgaggatccaacttcaagcgtactgttgattgtctctcgggctgtgagtcaggtgctagacagcctcgaggaaatccacgctttaaccgactgcagcgagaaagacctggattttctgcacagcgtattccaagatcaacacctgcataccctgctggatctgtacgacaagatcaataccaaatcctcgcctcaaatccggaatccaccaagcgatgccgtgcagcgagcaaaagaggtcctggaggagatctcatgctaccccgaaaataacgacgctaaagagctgaaaagaatcctcacccaaccacacttcatggcactgctccagacccatgatgtggtggcccacgaggtgtactctgatgaggccctacgcgtgacgcctccccccacatccccatatctgaatggagatagtcctgagtcagcaaatggtgacatggatatggaaaatgtgacaagggtgcgacttgtacagttccaaaaaaacacggacgaaccaatggggattaccctaaagatgaatgagctgaatcactgcatagtggctaggatcatgcacggcggtatgatccacagacaggggactttacatgtgggagacgaaatacgcgagattaacggaatttccgtggccaaccagacagtggagcagcttcaaaagatgctgagagaaatgagaggttccattacttttaaaatcgtgccatcatacagaacccaatcttcttcatgtgaacgggactcaccaagtacaagccgtcagtccccagccaacgggcacagcagcacgaataatagcgtgagtgatctcccaagcactactcagcccaaaggtagacagatttacgtcagagcccagtttgagtacgacccagccaaggatgatctaataccatgcaaagaagcaggaatcagattcagggtgggtgatatcattcagatcattagtaaggatgatcataactggtggcaaggaaagttggagaatagcaaaaacggaacagcaggcctgattccttctcccgaactccaggaatggcgcgtggcctgtatagccatggagaaaacaaaacaggagcaacaggccagctgtacatggttcgggaaaaaaaagaaacagtacaaggacaagtacttagccaagcataatgccgatttggttacttacgaagaggtggtgaaactccccgccttcaaacgaaaaaccctggttttgcttggagctcatggcgttggccgtagacatatcaagaacactctcataaccaagcacccagacaggttcgcctacccgatcccccacactactcgccccccaaaaaaagacgaagagaacgggaaaaattactatttcgtgtcccacgatcagatgatgcaggatatttctaataatgagtatctagagtatggctctcacgaagatgccatgtacggtactaaactggagacaatcaggaagatacacgaacaggggcttatagcaatactggacgtggagcctcaagcacttaaagtcctaagaacggccgaatttgctcccttcgtggtgttcattgcggcccccacgataacacctggcctgaacgaagacgagtcactccagagactgcaaaaagaatccgatattctccagcgcacctacgcacactatttcgatttgacaattatcaataacgaaatagatgagaccattagacatctcgaagaagcagtagagttagtgtgtaccgccccacagtgggttcccgtgagttgggtttactag

SEQ ID NO: 140149 - DNA, 2730 bp, Artificial Sequence
  derived and/or modified sequence
atggccgacgacgacgtgctgttcgaggacgtgtacgagctgtgcgaggtgattggaaaaggcccattctccgttgtgagacggtgcatcaatagggagactggccagcaattcgctgtgaagatcgtggacgtggctaaatttacgtcttcacccggactgagcaccgaggacctcaaacgggaagcctctatctgtcatatgcttaagcaccctcacattgttgaactactggagacatactccagcgacggcatgctctatatggtctttgaatttatggacggcgccgacctgtgtttcgagattgtcaagagggcagatgccggtttcgtttactcagaagcagtggccagccattacatgcgccagatcctcgaagctctgagatactgtcatgataataatattatccacagggatgttaagccccattgcgtcctgctagcaagtaaggaaaatagcgcccccgtgaagttaggcgggttcggcgtcgcgattcagttgggggagagtggcctggtggccggaggtagggtgggtaccccccattttatggctcctgaggtggttaaacgcgagccctatggtaagccagtggatgtgtggggctgtggcgtaatcctttttatattgctttctgggtgtctgcccttctacggaaccaaggagcgattgttcgaggggattatcaaaggtaagtacaagatgaatcctcgccagtggagccacattagtgaatcagccaaagatctggtgagaaggatgctcatgcttgacccggcagagcgcattactgtttacgaagcacttaatcacccttggcttaaagaacgcgatcgctatgcctataaaattcatttgccggagacagttgaacagcttagaaaattcaacgcacgcaggaagttgaagggagcggtgcttgcagccgtaagttcacataagttcaattccttctacggtgaccccccagaggagcttcctgacttcagtgaggatcccaccagctccgtactcctgatcgtgtcgagggcggttagtcaagtactagacagcctagaggagatccacgctctgaccgactgcagcgagaaagacctcgattttttacactcagtgtttcaagatcagcacctccacaccctgctcgacctgtatgataagatcaatactaaaagttcaccccagatccgaaacccaccctcagacgcagttcaaagagcgaaggaggtccttgaggagatatcttgctaccccgaaaataatgacgcaaaggagctgaaacggattttgacccaacctcactttatggcactgttgcagacccacgacgtagtcgctcatgaggtgtatagcgacgaggcactccgagttacgcccccgccaactagcccatatctgaacggcgattccccggagtctgcaaacggcgacatggacatggagaatgttactcgcgtcaggttggtccagttccagaaaaacaccgacgagccaatgggcataacactgaagatgaatgagttgaaccactgtatagtcgctcgaataatgcacggaggcatgatccaccggcagggcacactgcatgtgggcgacgaaatcagagagatcaatggaatctccgtggcaaaccagactgtcgagcagcttcagaaaatgttacgagagatgcggggctccattacgtttaaaattgttccctcttaccgcacccaatctagctcctgcgaacgagattccccttccacgtcccgtcagagtcccgctaatggacactccagtaccaacaactctgtgtcgatatatgtccgggcgcagttcgagtacgatcctgccaaagacgaccttataccatgcaaagaagctggaattaggtttcgagtcggggatatcattcagataattagcaaagatgaccacaattggtggcagggcaagctagagaatagtaagaatggaaccgcaggattgatacccagtcccgaactccaagagtggcgggtcgcctgtatagccatggaaaagaccaaacaggagcagcaagcctcctgcacatggtttgggaaaaagaagaaacagtacaaggacaagtacctggcgaagcacaatgccgatctggttacctatgaggaggtggtaaaattgcccgccttcaaaaggaaaacattggtgctcctaggcgcccatggggtcgggcggaggcatatcaaaaacactcttatcacgaaacatcctgataggttcgcctaccccataccacacactacaaggcctcccaagaaagacgaagagaacggtaaaaactattattttgtgtcacacgatcagatgatgcaggacatatccaacaatgaataccttgagtacggatcccatgaggacgctatgtatggaactaagcttgaaacgatccggaaaatccatgagcagggactaattgctatcttagacgtggaaccacaggcactgaaagtcctgcggacagctgaattcgccccttttgtcgtgttcatcgcggcaccaacaattacacctggcttgaatgaagacgagagtctgcagcgtctgcagaaggagtcagatattttacagcgcacatacgcccactattttgatctgactattatcaataatgagattgatgaaactattcgccacctggaggaagccgtagagcttgtgtgcaccgccccccaatgggtgccagtctcgtgggtgtactag

SEQ ID NO: 140150 - DNA, 2730 bp, Artificial Sequence
  derived and/or modified sequence
atggccgacgacgacgtgctgttcgaggacgtgtacgagctgtgcgaggtcattggtaaaggcccttttagcgtggttcggagatgcattaatcgagagacggggcaacagtttgccgtgaaaattgtggacgttgccaagtttacatcctcaccaggactctcaacggaggacctgaaacgagaggccagcatctgccacatgctaaaacatccgcacatcgttgagctactggagacctattcatccgacggtatgttgtacatggttttcgagtttatggacggagccgatctgtgtttcgagatagtgaagcgcgctgatgcaggcttcgtctactccgaggcagtcgcctcacattacatgcgacagattctagaggccttgcgctattgccatgacaataatatcatccaccgggatgtgaaaccccactgcgtcctgctagcctctaaggaaaattctgcaccggtgaagctgggtgggttcggcgtagccattcaactgggtgaatccggcctggtggctggaggccgggtcggcacaccacattttatggcccctgaggtggtaaaacgagagccatacggtaaacctgtcgatgtgtgggggtgcggcgttatcctgttcatccttctgtcgggatgcttgcccttttacgggaccaaggagagactgtttgaaggtattatcaagggaaaatacaagatgaaccctcggcaatggagccatattagtgaaagtgctaaagatctcgtgcgcaggatgctgatgctagaccctgccgagagaataaccgtctacgaggcactgaatcacccttggctaaaggagagggatagatacgcctacaagattcatctgcccgaaacagtggagcagctgaggaaattcaacgcccggcgtaaactcaaaggcgcagttcttgctgcagtgagttcccataaattcaatagtttttacggcgacccgcccgaagagcttccagacttttctgaagatcctacatcctccggcctcctcgctgcagaacgtgcagtcagccaggtactggactcactggaggagatccacgctctaactgattgcagcgaaaaggaccttgactttttacattcagtatttcaggaccagcacctgcacactctcctggacctgtacgacaagattaatactaagagctcacctcagattagaaacccaccatccgatgccgtgcaacgtgcgaaagaagtcttagaggaaatatcctgttatccagagaacaacgatgctaaggaactgaagcgaatcctgacacaaccgcacttcatggccctgcttcagactcacgacgttgtagcccacgaagtgtactccgatgaggccctccgggtgacgcctcctccaacgtctccctatctgaatggagactcacctgaaagtgccaatggtgatatggacatggaaaatgtgactcgcgtacggctcgtgcagtttcaaaaaaacaccgatgagcccatgggaattacactgaagatgaatgaactcaatcactgtatagtggcccgaatcatgcatggagggatgatacaccgccagggcaccctgcacgtgggtgatgagattcgtgagatcaatgggatttccgtcgccaaccaaaccgtggaacagctgcagaaaatgctgcgggagatgagaggcagcattaccttcaaaatcgtaccatcctacaggacacagagcagttcctgcgaaagagacagcccgagcacttctcggcagtcgccagctaatggccacagctctaccaacaattcggtttcaatctatgtgcgggctcagttcgaatatgatccagctaaggacgacctgatcccctgcaaggaggctggaatccggtttcgggttggggacatcattcagattattagtaaggacgatcacaattggtggcagggcaaactggagaactctaagaatgggaccgctggactgattccgtccccggaactgcaggaatggcgggtcgcatgtatagcgatggagaagactaagcaggaacagcaagcatcttgcacttggttcgggaaaaaaaagaaacagtacaaggataaatacctcgccaaacataacgccgatcttgtgacctatgaagaagtcgtgaagctgcctgccttcaagcgaaaaaccctggtgttactcggagcccacggggttgggaggcgccacattaaaaacacgctaataactaagcacccggatcgcttcgcctacccaatacctcacacgactcggccccctaaaaaggacgaggagaacggcaaaaattattacttcgtgtcgcatgatcagatgatgcaggatatctctaacaatgagtatttagaatatggcagccacgaggacgcaatgtacggcacaaagctggagaccatcagaaaaatacacgaacaaggcctgatcgccatcctcgatgtcgaaccacaagccttaaaggttctgcgcacagcggaatttgcacccttcgtagtattcattgcagctcccaccatcaccccagggctgaacgaagatgaaagtctgcagagactccagaaggagtccgacattctacagcgtacatacgcccactatttcgacttgacaatcatcaacaacgaaattgacgagactattaggcacctggaggaggccgtggagttggtctgtaccgctccccagtgggttccagtgtcctgggtttactag

SEQ ID NO: 140151 - DNA, 2781 bp, Artificial Sequence
  derived and/or modified sequence
atggccgacgacgacgtgctgttcgaggacgtgtacgagctgtgcgaggtgatcggcaagggtccgttttcggtggtcaggagatgtatcaatcgcgaaacgggccagcaatttgccgtcaagattgtggatgtggccaagttcacatcgtcccctggtctgagcactgaggacctcaagagggaggcctcaatttgccacatgctgaaacaccctcatattgttgaattgcttgaaacctactcgtctgatgggatgttatacatggtgtttgaattcatggatggcgccgacctgtgcttcgaaatcgtgaaacgcgcagatgctgggtttgtctatagcgaagccgttgcctcccactatatgagacagatcctcgaagccctgcgctactgccacgacaacaacatcatccacagagatgtaaaaccacattgcgtgctcctagccagcaaagagaattccgcccccgtaaagctcggagggtttggcgttgctatccagttgggagagagtgggttggttgcgggcggcagagtcggcacgccacactttatggctcctgaggtggttaagcgcgagccctacggcaagccggtcgacgtctggggctgcggagtcatcttatttatccttctctccggttgccttcccttttacggcaccaaggagcgtttattcgagggaatcatcaaaggaaagtacaagatgaacccccggcagtggtcccacatctccgagtccgcaaaagatctagtcaggaggatgttaatgcttgatcccgccgaaaggataaccgtatacgaagcactcaatcacccatggctcaaagagcgagaccgatacgcttacaaaatccacctgcccgagaccgtagagcagctgagaaagtttaacgcaagacgcaaactgaagggcgctgtcttagccgcagtaagctctcataagttcaacagtttctacggggacccgccagaagaactccctgatttttcagaagaccctacttcgagcggtctcttggccgccgagagagctgtgagccaggtgctggatagcctcgaagagattcacgctctgacagattgttctgaaaaagacctggattttctccatagcgtgttccaggaccagcacttgcatacactgctggacctctacgataagatcaatactaagagttcaccccagatccggaaccctccctccgacgctgtacagagagctaaggaggtgctggaggaaatcagttgctaccctgagaataatgatgctaaagaactcaagagaatcctgactcaaccacacttcatggctctgttacagacccatgacgtggttgctcatgaggtgtattctgacgaggctctgagggtgacgcctccacctacatccccttatcttaacggggactctccggagtccgccaatggagacatggacatggaaaacgtgacccgagtgcgcctcgtccaatttcagaagaacaccgatgaacccatgggtataacactgaagatgaacgagctgaatcattgtatcgtagctagaataatgcatggtggtatgattcaccgccagggaacactccatgtaggtgacgaaatcagggagatcaatggcatctctgtggcaaatcagacagtggagcaactgcagaaaatgttacgcgaaatgcggggatctattacattcaaaatcgtgccctcgtacaggacacagagttcctcttgcgaaagagacagtccttccacttcacgccagtccccagccaacggccacagctcaaccaataatagtgtgagtgacctcccctccactacgcagcccaaaggcagacagatttacgttcgagcgcaattcgaatatgacccggcgaaagatgacttgatcccctgtaaagaagccggaatacgcttcagggttggcgatatcatccagatcatctccaaagatgaccacaactggtggcaggggaaactggaaaatagcaaaaatgggaccgcaggccttattccctccccggaactccaggaatggagggtagcctgtatagccatggaaaaaactaagcaggaacaacaggctagctgtacttggttcgggaagaagaaaaaacaatataaagacaagtacctggctaagcacaacgctgtgttcgatcaactcgatctggtgacatacgaagaggtggtgaaactcccagccttcaagcgcaagacattggtgttgcttggggcccatggtgtcggtcgacgacacattaaaaatactctcatcaccaagcacccagaccggttcgcttaccccatccctcacaccacccggccccccaaaaaagatgaagaaaacggcaagaattactattttgtatctcatgaccagatgatgcaagacattagcaataacgagtacctggaatacggcagccacgaagatgcaatgtacggaaccaagcttgaaacgattcgcaagattcacgagcaggggcttattgccatacttgacgttgagccccaagctcttaaggtgcttcgaacagctgagtttgccccgttcgtggtgttcatcgccgctcctacaatcactccgggcctgaacgaggacgagtccctgcagagactccagaaggagagcgatattttacagaggacatatgcacactactttgatctgacaattatcaacaacgagattgatgaaaccattcgacaccttgaggaggccgttgagctcgtctgtactgccccccagtgggtgcctgtttcttgggtttattag

SEQ ID NO: 140152 - DNA, 2766 bp, Artificial Sequence
  derived and/or modified sequence
atggccgacgacgacgtgctgttcgaggacgtgtacgagctgtgcgaggtaatcggtaaaggcccattctccgtggttcgccggtgcatcaatcgcgagaccgggcagcagttcgcggtcaagattgtggatgtcgccaaattcacaagctcccccggcttgtctacagaggacctgaaacgggaggcttctatttgccacatgctgaaacacccacacattgtggaactccttgagacctactcttcagacggaatgctgtatatggtttttgagtttatggatggcgccgatctgtgttttgagattgtgaagcgggcagacgccggattcgtgtactccgaagccgtggcctctcactacatgcgtcaaatccttgaggctctgagatactgtcacgacaataacatcatccatcgggacgtcaagcctcactgtgtgttgttagctagcaaagaaaatagcgcccctgtgaaactggggggatttggggtggctatccaactaggcgaatccgggctggtagccggagggagagttggtacacctcatttcatggcgcccgaagtggtaaaacgcgagccttacggaaaacccgtcgatgtgtggggctgtggagttattctgttcatcttgctgtccggttgcctgccattctatggtaccaaagaacgcctctttgaggggatcatcaagggcaaatacaagatgaacccgcgacagtggtctcatataagcgaaagtgccaaagatcttgtgaggagaatgctcatgctagatcctgcagagagaatcacggtctacgaggcattaaatcacccatggcttaaagaaagggataggtatgcttacaagatccatctaccagagaccgttgaacagctaaggaagtttaacgcacggcgaaaactaaaaggcgccgtgctggccgctgtaagttctcacaagttcaattctttctacggggatcctcctgaagagctgccagatttctctgaggatcctacaagctccggtctgttagccgcagagcgggccgtgtcacaagtgctcgattctctcgaggagatccacgcactcacagattgttccgagaaggacctggacttcctgcactccgtcttccaagatcagcacttacatactctgttagatctctacgataagatcaacactaagtcttctccccaaattaggaacccgcccagtgatgccgtgcagcgggccaaggaagtcctggaagagatctcctgctatcccgaaaacaacgatgccaaagaactgaaaaggattctcactcaaccccatttcatggccctgctgcaaactcatgacgtggtcgctcatgaggtatactccgatgaagctctgagggttactccgcccccaacatctccgtaccttaatggagatagccccgagtctgcaaacggggatatggatatggaaaacgtgacccgggtcaggctagtacaattccagaagaacacggatgagcctatgggtattacccttaaaatgaatgagctaaatcattgtatagttgcacgaatcatgcacggcgggatgattcaccgccagggaacactacatgttggggatgagatccgagaaattaatggcatttcagtggccaatcagactgtcgaacagttgcagaagatgctgagggaaatgcgcggctcaattaccttcaagattgtcccttcgtatcgcactcagtctagctcctgtgaaagagattcgccctctacctctaggcaatctccggccaatggccattcttctaccaacaattcagtctcggatctcccgagcaccactcagcctaagggacgacagatatacgttcgagcccagtttgagtacgacccagcaaaggatgatctgattccgtgcaaggaggctgggatccggtttagagtgggggacatcattcagattatttcaaaagacgatcataactggtggcaaggcaagctcgagaattctaaaaatggaacggcaggcctcatccctagccccgagcttcaggagtggcgtgtggcatgtatcgcgatggagaagaccaaacaggaacaacaggcatcttgcacgtggtttggaaaaaagaagaagcagtacaaagacaagtacctggccaagcacaacgccgacctggtgacttatgaagaggtcgtcaaactccccgcatttaaacggaaaaccctcgtactcctgggggcccatggcgtgggcagacggcatattaagaataccctgataaccaaacatcctgataggtttgcctaccctattccccataccacccgcccacctaaaaaggacgaagaaaacggcaagaattactattttgtgagccatgatcagatgatgcaggatattagcaataacgaatatctggaatatgggagccatgaagatgctatgtatggaaccaagctggagacgataaggaagatccatgagcagggtctcatagccatcctggatgtcgaacctcaggccctcaaggttctgcggacggctgaatttgctccttttgtggttttcatagctgccccaactattacacctggcctcaacgaggacgaatccctgcagcgactgcagaaagaatccgacattttacagaggacctacgcacactacttcgatctgacaatcatcaacaacgaaattgacgagaccattagacacctggaagaagccgtggagcttgtttgtactgcaccacagtgggtgccagtttcctgggtgtactag

SEQ ID NO: 140153 - DNA, 2766 bp, Artificial Sequence
  derived and/or modified sequence
atggccgacgacgacgtgctattcgaggatgtctacgagctgtgtgaagttatagggaagggaccattttcggtggtacgtcgctgcataaaccgcgaaactggccagcaattcgcagtgaagattgtggatgtcgccaagtttacatcctccccaggcctgtcaacagaagatttaaagcgggaagcctcaatttgccacatgctgaaacacccacacattgttgagttactggagacctactcatctgacggtatgctttatatggtgtttgaattcatggacggcgcagatctgtgtttcgagatcgtgaaaagggccgacgccggatttgtgtatagtgaggccgtagcctctcactacatgcgtcaaatcctcgaagcccttcgatactgccacgacaacaatatcattcaccgcgatgtaaagccgcattgcgtcctgctagcctcaaaggagaattcagcacccgtcaagctcggaggatttggggtggccatacagcttggggagagcggtctcgtcgctggcggaagagtcggcaccccacacttcatggcacccgaggtggtcaaacgggagccctatggcaaacccgtggacgtatggggctgcggagtcatcctattcatcctcctgagtgggtgtctgcctttttacggtactaaagagcggctttttgaaggaattattaaggggaaatacaaaatgaacccccgacagtggtcccatatcagtgagtctgcgaaagacctcgtgaggagaatgctgatgctggatcccgcagaacgcattaccgtttacgaagctctcaaccacccatggcttaaggagcgtgaccggtatgcctacaagatccatctgccagagactgtagaacagcttaggaaatttaatgcaagaaggaagctcaaaggcgcagtactggctgctgtcagctctcataaattcaattcattctatggcgatcctcccgaggaattgcccgattttagcgaggatcccacaagcagtgtgctactgattgtgtcacgtgcggtgagccaggttttagattccctggaggagatccatgcactcactgactgctccgaaaaggacctggattttctccatagtgtttttcaagaccagcatcttcacaccctgctggatctttatgacaagatcaacacaaagtcatccccgcagatccggaatcccccttccgacgcagtgcagcgcgcaaaggaggttctcgaggaaatctcctgttatcctgaaaataacgacgcaaaggagctcaaacgcatcttgacccagccccatttcatggctctgttgcagactcacgatgtggtggctcatgaagtctacagcgacgaggcactgcgggtgactcctccacccacttcaccttatctcaacggcgattctccagagtccgctaatggcgatatggacatggaaaatgtgacaagagtcaggctcgtccagtttcaaaagaacacagatgaaccaatgggaattaccctaaaaatgaacgagctgaatcactgtattgtcgcccgtattatgcacgggggaatgatccataggcagggcaccctgcacgtaggagacgagatccgggaaattaatggcatatctgttgctaatcaaactgtcgagcagctccaaaaaatgcttcgcgaaatgcgcggaagcatcaccttcaagattgtgccatcctacaggacacagtcatcatcttgtgagcgcgatagcccaagcactagtcgacagagcccagccaacgggcactcctccactaataattcggtaagcgatctcccatctaccacccagcccaaagggcgacaaatttacgttcgggcacagttcgagtacgaccctgcgaaagatgatctaatcccatgtaaagaagccggaattcgcttccgggtgggtgacattatccagatcattagcaaggacgaccacaattggtggcaaggcaaactcgaaaactctaagaatggaaccgccggactgatcccaagtcccgagctccaggagtggcgggtcgcttgtattgccatggagaagaccaagcaggaacagcaggcaagttgcacctggtttggtaaaaagaagaagcagtataaggataagtatttggccaagcacaatgctgacctggttacatacgaagaggttgtgaaacttcccgcatttaagaggaaaacactcgtgctgctgggtgcacacggtgttggcaggagacacatcaagaacactcttattacaaaacaccctgatcggttcgcctacccgatcccgcataccacaaggccacccaagaaggacgaagaaaatggcaaaaactactacttcgtcagccacgaccagatgatgcaggatatctctaacaatgaatatctcgagtacggttcccatgaggatgcgatgtacggaaccaagctggagaccattcgcaaaatccacgaacaggggttgattgctatcttggatgttgaacctcaggcattgaaagtgttgagaaccgcagagttcgcaccattcgtggtgttcattgccgcaccaacaatcacccccggtctgaatgaggatgagtccttacagcgtcttcagaaagagagtgatattcttcagagaacttatgcacattatttcgatctgactattattaacaacgagatcgacgagactatcagacatttagaggaagctgttgagctcgtgtgtactgcaccgcagtgggtccccgtgtcatgggtctactag

SEQ ID NO: 140154 - DNA, 2730 bp, Artificial Sequence
  derived and/or modified sequence
atggctgacgacgacgtgctgttcgaagacgtttacgagctgtgtgaggtaattggaaaggggcctttttcggtggtgagacgctgtatcaatagagagacaggtcagcaattcgccgttaaaattgtggatgtggcaaagtttacctctagcccaggcttatcaacagaggatctgaagagggaggcctctatttgccacatgctcaagcacccccatatcgtggagttactggagacttattccagcgatggtatgctttacatggtgttcgaattcatggacggggctgacctctgcttcgaaatcgtcaagcgcgctgacgccggatttgtatattctgaggctgttgccagccattacatgcgccaaatcttagaagcattgagatattgccacgataataatataatccaccgcgacgtaaaacctcactgtgttctcttagcgtcgaaggagaactcggcccctgttaagttggggggattcggtgttgctatccagctgggagaatcaggcctggtggccggagggagggtaggcactccacacttcatggctcctgaggttgtcaaacgcgaaccttatgggaaaccggtggacgtatggggctgcggggtgatccttttcatcctcctgagcggctgtttgccgttctatggaaccaaggagcgcctctttgaaggtatcattaaaggtaagtataaaatgaacccaaggcagtggagccacataagtgaatctgctaaggatctcgtgcgccgtatgttaatgctagatcctgccgagcggattacagtgtacgaagcgctcaatcacccctggctcaaggaacgtgacagatatgcctataaaatacacctgccagaaacagtcgaacagctgcgcaagttcaatgccagaaggaaactgaaaggagccgtcctggccgctgtgagtagccacaaatttaactcgttctacggcgaccccccagaggaattgcctgatttctctgaggatcctacaagtagtgtccttctgattgtgtcacgcgcagtttcccaggtactggatagcttggaggaaatccatgctctgactgactgcagcgaaaaggatctcgatttcctgcacagtgtcttccaagaccagcatctgcatacactgttggatctctatgataaaatcaacacgaagtcctccccccaaatccgtaatcccccttctgatgctgtccagagagcaaaggaggttctcgaggagatctcatgctacccagaaaataacgatgctaaggaactgaagaggattctgacacagcctcacttcatggctctgctgcagactcacgacgtagttgctcacgaagtgtactccgacgaggccttgagagtcacaccccctcccacctcaccgtacttgaatggagactctcccgaaagcgccaatggcgatatggacatggagaacgtgactagagtccgactggtgcaattccagaaaaatacagacgagcccatgggcatcacgttgaaaatgaacgaactgaaccactgcatcgtcgcccgtataatgcacggcggaatgatccatcggcagggtacactgcacgtcggtgacgagatcagagaaataaacgggatctcagtcgctaaccagactgtggaacagctgcagaaaatgctgcgagagatgcggggatccattacatttaaaatcgttccaagctaccgtacccagtcctcctcctgcgaaagggatagtccctcgacgagtagacagagccctgccaatggtcatagctctacaaacaactcagtctcaatctacgttcgtgctcagtttgagtatgatccagctaaggacgatctcattccttgtaaggaggctggaatccggtttcgggtaggcgacatcatacagatcatctctaaggacgatcataactggtggcagggaaaactggaaaactccaaaaacgggacagcaggcctgattccctctccggaactgcaagaatggcgcgtagcctgcattgcaatggagaagacaaaacaagagcagcaggcctcctgcacatggtttgggaaaaagaagaagcagtacaaagacaaatacctggcaaagcataacgccgatctggttacatatgaagaggtggtgaagctgcctgcatttaagcggaagacccttgtgctgttaggggcacatggcgtgggacgacgccatattaaaaacacacttattacaaaacaccccgacaggttcgcataccctatcccgcataccactcgacccccaaaaaaggacgaggagaatgggaagaattattacttcgtgagccacgaccagatgatgcaagatatttcgaataatgagtacctggagtacggaagccatgaggacgccatgtacggaacaaaacttgagacaattcgtaaaattcatgaacaaggcctgatcgccatcctagatgtagagcctcaggccctgaaggtgctcagaacggccgaatttgcccctttcgtagtatttatcgcagcaccgacgatcacgcctggacttaatgaagacgagtcgctccagaggctccagaaagaatctgatatcttgcagaggacatacgcccactacttcgacctgaccatcattaataatgagatcgacgaaacgatccgccatctggaggaagctgtcgagctggtgtgtacagcaccccagtgggttccggtgagctgggtgtattag

SEQ ID NO: 140155 - DNA, 2730 bp, Artificial Sequence
  derived and/or modified sequence
atggcggacgacgatgtgctattcgaagatgtgtatgagctgtgtgaggtgattggcaaggggccattctcagtagtcagacgatgtattaaccgggagactggccagcaattcgccgtgaagatagtagatgtggcaaagttcacttcaagtccaggactgtccaccgaggatttgaaacgggaagcctctatttgccatatgcttaagcatccccacatcgttgagttgctggagacttatagtagtgacgggatgctgtacatggtcttcgagttcatggacggagccgacctatgcttcgaaattgtcaagcgggctgatgcaggctttgtgtattccgaagccgtcgcaagccattatatgagacaaatactggaagccctgcggtactgccacgacaacaacatcattcatcgggatgttaagccacactgcgtgctgctcgcatcaaaagaaaatagtgccccagtaaagctgggcggatttggagttgctatacaactgggcgagagcggcttagtcgctggcggacgcgtggggacacctcattttatggcccctgaggttgtgaagcgggaaccttatggtaagcccgttgacgtgtggggatgtggagtgattctgtttattctcctaagcggctgcttacccttctatgggacgaaggaaaggctgtttgaaggcataataaaaggaaaatataagatgaacccacgccagtggtctcacatctccgaatccgccaaagacttagtgaggaggatgctgatgcttgatcccgctgagaggatcaccgtctatgaggctctgaatcatccttggctcaaagagcgagaccgctacgcatataaaattcatcttcccgaaaccgtggaacagctgagaaagttcaatgcccgtcgtaaacttaaaggagctgtactcgcagctgtctcatcacacaaattcaatagcttctacggcgatcccccagaggaattaccagattttagcgaggaccctacctcctccggcctgttggctgcggagagggcagtatcccaggtgctggattcacttgaagaaatccacgccctcaccgattgtagtgagaaggacctcgatttcctccattcagtgtttcaggatcagcatctgcataccctgctggacttatatgacaaaataaacaccaagtcaagccctcagatcaggaacccgccttccgacgccgtgcaaagggccaaggaggttttggaagaaatctcctgttaccccgaaaataatgacgcgaaagagctgaaacgcatcctgacccagccacatttcatggccctgctgcaaactcatgacgtggtggctcacgaggtgtactccgatgaagcattacgcgtaacgccccctccaacctctccctatctgaatggcgacagcccggaaagtgccaacggcgatatggacatggaaaatgttactcgggttcggttagtccagttccaaaagaacacggacgaacctatgggaataacactaaaaatgaacgagctcaaccactgcatagtcgcccgtatcatgcacggcggtatgattcacaggcaggggacgctgcacgtgggagatgagatccgggagataaacggaatcagtgtggctaatcaaactgttgaacagctgcagaagatgctgcgggagatgcgtgggtcaataacatttaagattgtaccatcttacagaacacagagtagcagctgcgaaagggattctcccagtacaagccggcaaagcccagcaaacggacactcttcaacgaataatagcgtgtccatttatgtgagagcccagttcgaatacgatcccgctaaggacgatctcataccctgtaaagaagctggtatccggttccgagtaggagacataattcaaatcatctccaaagatgaccacaactggtggcaaggaaagctggagaattcaaagaatggaaccgcaggactgattccctccccagagctgcaggaatggcgggtggcttgcatagccatggagaaaaccaagcaggagcagcaagcttcctgcacctggttcggaaaaaaaaaaaagcagtataaggataaatacttggctaagcacaatgcagacttagtgacctacgaagaggtggtcaaactaccggctttcaagagaaagaccctggttctgttgggcgcacacggagtcggacggagacatattaagaacacactgataaccaaacacccggatcgctttgcatatcccatcccacacacaacgagaccacctaaaaaggatgaagagaacggcaaaaattattatttcgtgtcccatgatcagatgatgcaggatatttccaacaacgagtatctggagtacggctctcatgaagacgctatgtacgggaccaagcttgaaaccataaggaagatacacgagcagggcttaatcgcgatactcgacgttgagccacaggccctgaaggtcttgagaacagctgagtttgctccattcgtcgtctttatcgctgcacctacaataacaccgggtctgaacgaggatgaatccctgcagcggctgcaaaaggagagcgacatacttcagcggacgtatgcccattatttcgacctcaccatcattaataatgagatagatgaaacaatccggcacttggaggaagccgtcgaacttgtgtgtacagcaccgcagtgggtaccagtgagttgggtgtactag

SEQ ID NO: 140156 - DNA, 2781 bp, Artificial Sequence
  derived and/or modified sequence
atggcagatgacgatgtcttgttcgaggatgtgtatgagctctgtgaagtgatcggaaagggcccattctccgtcgtgcggcgttgcataaaccgggagacaggccagcaattcgccgtgaaaatagtggacgttgctaaattcacctcatcacctggcctctcaacagaggatctgaagcgggaggcctctatctgccacatgctgaaacatccccatattgtggagcttctggaaacctattcgtccgacggcatgctgtacatggttttcgaattcatggatggcgcagacctgtgtttcgaaattgttaaaagggcggatgccggattcgtgtactcggaggctgtggccagccactatatgcggcagatactggaagcacttcgctactgccacgataataacatcattcatcgggacgtcaaaccccactgcgtgctcctcgcctctaaggaaaattccgcgccagtgaaactgggtggctttggagtcgccatccagttgggggagtccggcctggtggctgggggacgtgttgggactcctcactttatggcacccgaggttgtaaagcgagaaccatatgggaaacccgttgatgtctgggggtgtggcgtcatcctgtttatcctcttgtcgggttgcctccccttttacgggacaaaggaaagactatttgagggtattatcaaggggaagtataagatgaaccccaggcagtggtctcacatttccgagagtgccaaagatctggttaggagaatgttgatgctggacccagctgagcgcataacggtttacgaggccttgaaccatccctggctcaaagaacgcgaccggtacgcctacaagatccatctcccagagactgtggagcaacttcgcaagttcaatgcgcgaaggaaactcaagggagctgtgcttgcagcggtttcaagccacaagtttaacagcttctacggagaccccccagaagaactgcccgacttcagcgaggacccaacgtccagcggtctgctcgctgccgaacgcgcagtgtcacaagttctggactcactcgaggagatccacgccttaaccgattgttcagaaaaagatctggattttctacacagtgtgttccaggaccagcacctccataccctcctggatctgtacgataagattaacaccaagagcagcccacagataagaaatcccccatccgacgctgtgcagcgggcaaaggaagtccttgaagagattagctgctatcccgaaaacaatgatgccaaagaactgaaacgaattcttactcagcctcatttcatggccctgctacagacccacgacgtagtagcacatgaggtgtactcagacgaagcacttcgggtcacacctcctcctacatccccttatctcaacggcgacagccctgaaagcgctaatggcgacatggacatggagaatgtgactcgtgttcgcctggtgcaatttcagaagaatacagatgaacccatgggcatcacactgaaaatgaacgagctcaatcactgcatcgttgcccgaatcatgcatggaggcatgatccatcgccaaggaacgctgcacgtgggcgatgaaatccgggagattaatggcataagcgtagccaatcagaccgtggaacagctgcagaagatgctgcgcgagatgcgcggaagcataacattcaaaattgtgccaagctaccgtacacagtcatcttcgtgcgagagggattctccctccacatccaggcaatcaccagcaaatggacattcttccacgaataatagtgtgtctgacttgccaagcacaacacagccaaagggacggcagatctatgtccgggctcaatttgagtatgatcccgcaaaagatgatctgattccttgtaaggaagctggcatcaggttccgggtgggggatatcatccagattatcagcaaggatgaccacaactggtggcagggcaagttagagaatagtaaaaacggtacagctggcctgattccgtcccccgagttgcaggaatggagggtagcttgcattgccatggaaaagactaagcaggaacagcaagctagttgcacgtggtttgggaagaagaaaaaacagtataaggataaatacttggctaagcacaacgcggtattcgatcagctcgacctcgtgacatatgaggaagtggtaaagcttcccgcattcaagcggaaaaccctagtgctgttgggagctcatggggtggggcgtcgccacatcaagaataccttgataaccaaacaccctgacagatttgcatacccaatcccccataccacccgccctccgaaaaaagacgaggagaacggaaaaaattactacttcgtaagtcacgaccaaatgatgcaggacatatccaataacgaataccttgagtatgggagtcatgaggatgcaatgtacggtaccaagctggaaacgatcagaaaaattcacgaacaggggctgatcgctattctcgatgttgaaccacaggctctcaaggttctccggactgctgaatttgctcccttcgtggtctttattgctgcacccacaataacacccggactcaatgaggacgagtctctgcaaaggctgcagaaagagagcgacatcctgcaacgtacttatgcccactacttcgacctcacgatcatcaataacgaaattgatgagaccattcgccacctagaggaggctgtagagctggtttgcacagccccacagtgggtgcctgtgtcgtgggtttactag

SEQ ID NO: 140157 - DNA, 2766 bp, Artificial Sequence
  derived and/or modified sequence
atggccgacgatgacgtcctgttcgaggatgtttacgagctgtgcgaggtgatcggaaagggtcccttttctgttgttcggagatgcatcaaccgtgagaccggccagcaattcgccgtgaagattgtggacgtagccaaattcacctccagtcctggactgagcaccgaggacctgaagcgtgaagcctctatatgtcatatgctgaagcatccacacattgtcgaactgctggagacttattcctctgacgggatgctctatatggtgtttgagttcatggacggggcagatctatgcttcgaaattgtaaagagagccgatgcagggttcgtgtacagcgaagccgtggcttcccattatatgagacaaatcctggaagccctcagatactgccacgacaataatatcatccatcgagacgtgaagccgcactgtgtgctactggcaagcaaagaaaatagcgcccctgttaagctagggggtttcggtgtcgctattcagctgggcgaaagcgggctggttgctgggggacgggttgggactccacactttatggctcccgaagttgttaagcgggagccttacgggaaacctgtcgacgtttggggctgcggagtgatcctgttcattctccttagcggctgcttgccgttctacgggacaaaggaacggctctttgagggcattataaagggaaaatataaaatgaacccgcgtcagtggagccacatatcagagtctgccaaggacctcgtgcgtaggatgctgatgttagaccctgccgaaaggatcacggtctacgaggccctaaaccacccttggctcaaggaaagagatcgttatgcctacaaaatccatttacccgagaccgtcgaacagctgagaaagtttaacgctcggagaaaactgaagggcgcagttctcgctgccgtcagctcacacaagttcaacagtttttatggggaccctcccgaggaattgcccgacttctcggaagatcctacctcctccgggcttctagctgctgagcgcgctgtatcgcaggtactggactcactcgaagaaatacatgccttgacagattgctctgaaaaggaccttgacttcctgcactccgtctttcaagaccaacacctccacaccctgttggatctgtacgataaaatcaataccaaatcctctccacagattcgcaaccctccatcagatgcggtacaacgcgcaaaagaagtcctggaagaaatatcatgctatccagaaaataatgacgcaaaggagctgaaaagaatactcacccaaccccacttcatggccctgcttcagacccatgatgttgtggctcacgaggtgtactccgacgaagccctgagagtgacacccccacccaccagcccctatttgaatggcgacagtccagagtctgcaaacggggacatggacatggaaaacgttaccagggtcaggttggtgcagtttcagaagaacacagatgagccaatgggcattactctgaagatgaatgagctgaaccattgcatagtggctcgcatcatgcatgggggtatgattcataggcagggaactctccatgttggcgacgagatccgcgaaatcaatggaatatcagttgccaatcagaccgtggaacagcttcagaagatgctgagggagatgcgtggatctattaccttcaagattgttccatcctaccggacgcagtcctcatcgtgcgaacgagatagtccttctaccagccgacagagccctgctaacggtcactctagcaccaataacagtgtctccgatttgccgagcaccactcagcccaaaggaaggcagatttacgtcagagcccagtttgagtacgatcccgcaaaggacgaccttattccatgtaaagaagccggtatccgctttagggtgggcgacatcatccagatcattagcaaggatgatcataattggtggcaagggaaactggaaaactcgaagaatggtaccgcaggattgataccatcccccgagctccaagagtggcgggtcgcttgcatcgcaatggagaaaaccaaacaggaacagcaggcttcctgcacttggtttggcaaaaaaaaaaaacagtacaaagataagtatttggcgaaacacaacgccgacctagtgacctatgaggaagtggtaaagctgccggcttttaaacgtaaaacactggtcttgctgggcgcacacggggtgggaagaagacatataaagaatactcttatcaccaagcaccctgataggtttgcatatcccattccccacaccaccaggcctcctaagaaagacgaagaaaatgggaagaactattatttcgtgtctcatgaccagatgatgcaggatatctctaacaacgagtatctcgaatacgggtctcatgaagacgccatgtatggtacaaagctggaaacgattcgcaagatccatgaacagggcctgatagccatcttagacgtggagcctcaggcgctcaaggtcctgaggactgccgaattcgccccttttgtggtgttcatcgctgccccaaccatcacaccgggattaaacgaggacgagtcgctgcagcgcctccagaaggagtccgatatactccagcggacctatgcccactactttgacctgacaattatcaataacgaaattgatgaaacaatacgacacttggaggaggccgtggaacttgtgtgtacagcccctcagtgggttccggtgagctgggtgtattag

SEQ ID NO: 140158 - DNA, 8298 bp, Artificial Sequence
  derived and/or modified sequence
ccgttttcgaagccctccacgctgcggccgctatcccctccggaccatggccgacgacgacgtgctgttcgaggatgtgtacgagctgtgcgaggtgatcggaaagggtcccttcagtgttgtacgacgatgtatcaacagagaaactgggcaacaatttgctgtaaaaattgttgatgtagccaagttcacatcaagtccagggttaagtacagaagatctaaagcgggaagccagtatctgtcatatgctgaaacatccacacattgtagagttattggagacatatagctcagatggaatgctttacatggttttcgaatttatggatggagcagatctgtgttttgaaatcgtaaagcgagctgacgctggttttgtgtacagtgaagctgtagccagccattatatgagacagatactggaagctctacgctactgccatgataataacataattcacagggatgtgaagccccactgtgttctccttgcctcaaaagaaaactcggcacctgttaaacttggaggctttggggtagctattcaattaggggagtctggacttgtagctggaggacgtgttggaacacctcattttatggcaccagaagtggtcaaaagagagccttacggaaagcctgtagacgtctgggggtgcggtgtgatcctttttatcctgctcagtggttgtttgcctttttacggaaccaaggaaagattgtttgaaggcattattaaaggaaaatataagatgaatccaaggcagtggagccatatctctgaaagtgccaaagacctagtacgtcgcatgctgatgctggatccagctgaaaggatcactgtttatgaagcactgaatcacccatggcttaaggagcgggatcgttacgcctacaagattcatcttccagaaacagtagagcagctgaggaaattcaatgcaaggaggaaactaaagggtgcagtactagccgctgtgtcaagtcacaaattcaactcattctatggggatccccctgaagagttaccagatttctccgaagaccctacctcctcagtgcttcttattgtttcacgagcagtctcacaggtgctggacagcctggaagagattcatgcgcttacagactgcagtgaaaaggacctagattttctacacagtgttttccaggatcagcatcttcacacactactagatctgtatgacaaaattaacacaaagtcttcaccacaaatcaggaatcctccaagcgatgcagtacagagagccaaagaggtattggaagaaatttcatgttaccctgagaataacgacgcaaaggaactaaagcgtattttaacacaacctcatttcatggccttacttcagactcacgacgtagtggcacatgaagtttacagtgatgaagcattgagggtcacacctcctcccacctctccctatttaaacggcgattctccagaaagtgctaacggagacatggatatggagaatgtgaccagagttcggctggtacagtttcaaaagaacacagatgaaccaatgggaatcactttaaaaatgaatgaactaaatcattgtattgttgcaagaattatgcatgggggcatgattcacaggcaaggtacacttcatgttggtgatgaaattcgagaaatcaatggcatcagtgtggctaaccaaacagtggaacaactgcaaaaaatgcttagggaaatgcgggggagtattaccttcaagattgtgccaagttaccgcactcagtcttcgtcctgtgagagagattccccttccacttccagacagtccccagctaatggtcatagcagcactaacaattctgtttcggacttgccatcaactacccaaccaaaaggacgacagatctatgtaagagcacaatttgaatatgatccagccaaggatgacctcatcccctgtaaagaagctggcattcgattcagagttggtgacatcatccagattattagtaaggatgatcataattggtggcagggtaaactggaaaactccaaaaatggaactgcaggtctcattccttctcctgaacttcaggaatggcgagtagcttgcattgccatggagaagaccaaacaggagcagcaggccagctgtacttggtttggcaagaaaaagaagcagtacaaagataaatatttggcaaagcacaatgcagatcttgtcacatatgaagaagtagtaaaactgccagcattcaagaggaaaacactagtcttattaggcgcacatggtgttgggagaagacacataaaaaacactctcatcacaaagcacccagaccggtttgcgtaccctattccacatacaaccagacctccaaagaaagacgaagaaaatggaaagaattattactttgtatctcatgaccaaatgatgcaagacatctctaataacgagtacttggagtacggcagccacgaggatgcgatgtatgggacaaaactggagaccatccggaagatccacgagcaggggctgattgcaatactggacgtggagcctcaggcactgaaggtcctgagaactgcagagtttgctccttttgttgttttcattgctgcaccaactattactccaggtttaaatgaggatgaatctcttcagcgtctgcagaaggagtctgacatcttacagagaacatatgcacactacttcgatctcacaattatcaacaatgaaattgatgagacaatcagacatctggaggaagctgttgagctcgtgtgcacagccccacagtgggtccctgtctcctgggtctattaggcctctccccagatatctgagcataactgggagcacctcatttgtggaaaagcctctttgttatcggccttgtgtcagcaggtcatggtccctagagactacctagttgtagtgtgacctacatttataattattgtcatgtccgaatagataggaggagaaaaacaattacacactaatttaaagagacagtatcttttttaatcagttctcctaaactttaataaaatgtatctttaaatgtatgtattattcaatcctttggaatgttatatttttggaaatcatagctttttatttccaaggcccctaaaaactgcacaaaatagatgctgctttctataatctattttaataataataaacaatgattctgttaccttgactgggggtggaacactacattctttttagagtctgattttatggattggaatattgggatatctttctttcctttatttatttgaaataattagtgtagtgattacaaaacagtcataaatttttaaaggccttttttctctctttttttttttttagaatagtatttttttttaagtcctttatgtaacatccagataatgtgatactgtctctttgaagcaccctgtaaaccttttagagatttgaagttgggtcttgactcttaatgcatgtggacagtcgcgagcgtttatgctgtcggtgtgtctgtgttggacaaaacaatctgtaatctacagcaaagtacattctacattccgttcatggggcacacccaggggaataagaataaaatgctattatgactaagttgtaaacctatgcacatcccttgcattttgggcaactttataaaaaaaaagaaactgatttttattaataataatcatgtagtgaaatgtgtttgtaattttgtctcaatttaatttgttgtaaggtggggtggggggaattgctggtttcaccatttcagatctgtgttgtctaagagtattaacgttttaattaagcaaagaaatgatttttaatctgtatgtaattgttttaaagcacccattttaagagaaaatactgtgcaatgaagaaaccagtttaggcatttgctataaactgaaatattccaaaagaatcatctataacagccctgtaaattcctttaaaatgataactaacaggacagtttgaccaattttttttaaatatacttccttttatgtgttcaataattaaatgcctttgggtccttcatttcattatagatttgttcaggcttccaagctgataatctttacaattgtataatttgttagatgctcattgaacctttgaaggcccaggagtgagtatcagttggcagggtgacaaagtagcctgccagagcacagctggaccacgtctgactcgcacagagccatgcgcccaagggccacgggtgtactggaggccacctgtggtctctccttcctcttgctgtatcccttggcacaggggaatcatctgtccttgttgctttagagacattaaccatctcataactcttccatgaagtcacattcttccaatacaggagattcgggctggggttctcagactctttgccagaggtcagtagaatgtttttcattagcatgtgagggtgtgaagtgcttatattaacctgtgatccttgaaaacataccatcattttttgcttcttgtaggttagatggccttgtcactttgtgccttggcaggatgtgcagggtgtgttctgagctgaacagctcctcttaaaggaccaaacagagaaggcattagtatacttcttttacattgtcaacaccatacccgcctccgccccccaccgcctattattaaatggtggcgatttttttttttctgatgttgttctttgccagtgaccagatgagtctgcaacttactaacaaggtattgagtgaactacttctgtatgggccccacagtggggtgaccaagccaccaaaccagagataagctcaacagtggtctcacactagatagagagagaaaccttcaaagagttgggtagggctgtgttagaactgattcgaatctgatagatgccaaggccagacagtcgttcctggtatggtactgaccacaatttcgggctcttagtgtgaaggtgcgcactctacctcttttctggtgaagcacaaagacaactacaactaacacatgggaaacagaaacttccctccctctagtggaaacccccacgcccccacttgccctttgagcccacatctccagagatgctgatgatgcctgtcttaagccatctgccatatttataaaggtggattaagcagaggaggagaaaagcaatgccaacttaaatgtctgtggccccacaattcacaagcactgtagcactcatcctcagtggctttatacgtcctctgagaagcacacaggcaggcatcattcttgccatcattccgatggtgaaatccctgcatgcagaactcattgacttctcaaagatgttacctgttccattccactaatacatgtcttctctaaagcagtgtctttatgacctagctgcatatacttacatttctgaattcagagtaatttcagtacattgctgctgctgctgctgctgctgctgctgctgctgctgctgctgctgctgctactgctacattacaattgtccactaagcaatcagagaaaattgctaaaagcttctttactgcttccattccatcagcagaacctttttttttctttctttcttttaaagaccagaatgaatgtttagagtactaaatcttattagtggtcaattgaagtattggagagccacattttgaaggttctctcccccacccaactccattccccacagcaagaaagggagtgtttttatatgttgaattctttgttaaaaagatgaaatgtcctgattttccagtcacaagacagtaattactttgcacatacagcatatcccattttaatgctaaaaagggaaatgtcactcaatttaattcatctggaagtttcccagtgtcaagataacattgtagcctttttaaatgcaattaaatgtatctcttgtcaggtgagatgatttaaaatctttgctcagagaggaaaacaaatggttgacctacttcttgctatttgcattcagaaggcatcgtcccagcccatcctattggtggcagaatatctaaagatgtcgcaaagtcccccactgcagtagaaatgcaggaggtgttcctgttccccgtccaattccttcttaggctgctagagacagccagtgggccaagccttcccctgtgctccaggcaggcctgggctgcagctactgttacctttttacagcctttgatctgatcgctgcagagttcttttgtttttaaatcacttgtatttgtctcttcattaaggcttcaagtttatttcttgaaaaagtttagtcaattgaaccaccctccaggaagattcccagcgtggaaactgcccctgaaaaacaaggcagcccaaagccagctctcttttgtcccccactgatgtcatgtcctttttttttttcatttcaggccagtttcttaacttggggcaaagagaatgtgttgctaaagctaccaagaaaactgcttgattaacaaattcttaatagaaatgcctcccacactgtctctttgaaaagagaaggcaccttggaatcggcattccaaaaccaagctccttgtcatcctcatccctcctccttcttgcttcctattatcaaactcgtgtgtgtttcttgttttctcagaactgaacacagcctcctaattccatcctcttgactagggcttacaatactgagagcgattacaggctgtaataagttaaaggtccctgagcgtggctttcttgttctgcgcctctaattaattcttctattaaaagatgctttccttctcactgcagcttacagaaaggctacaagctttaatcacagatcatttcatttgccagagcctttccttttctaactcctttagaaataagatttccctctctgtttggaatctctggatacaggactctcctccaagctcatggcttgattggctttgcctgtgcacacacacatcagtttgccttaaacttggagctatggggagtcccagattttccagcttagtgggtgaagtttagctgtcacctacatccaggaagtgggggaaaagggaaaaaaagaggatattcaccaccatgttcccatccggtctttcccctgccttgctttgtgcagcaggtgggcagacagagcccacagaaacagaagtagaaagagggccgcaccatctctggggccagcactcctaagtcttagctctttgtgggaatagaaaatcctgagctcccaccacctctcgtctgaccctccatcaactccctcgaacctgtgcaaatggactgagcaaaagaaaatggaaagagatgtttgtcaccacacaggagacctcctttctggccccaagcacaactccatctctgcgtatgctcagaaactcagaatttagctgctacttatgtgttagctccattctctctggtgtgtgactgagagaacacgccagtgttcttactgacagaggcttaggggtgaccctctctggacccagaggaagtacaacctctgtagcgagaattgtccttgggaacagaaacaggcattcctccacagtgagtggctccccctattttttttttatttggaagagaccaagaattgggggaattgatttccagtcttagctgtttcccggaatgtcatctgtgcaggcaggtaggcggctgccgggtgcagcaggcagcgtgactgatgtgaaggccgcccaatcctcacgtgctaagacccgagtatcgtgtttaattgcagtgtaggcacgtcgccattcaaactcagttctggggtggttttgcataaagttttgccaacgtgttcttttttctgtatgtattattgcctttttataaaaggtgttgaagtattgtctcagtgataaaaagagagagatgttaatggttgttgtatatttcaccgtatccaattgtaagtatttgcagggtacagcagagccttagcttgcaagagcgtttgtgcaggaggtgtccctcaacacccaggagctgaagggattggaaaggtttggattctttgtaaatgtcctgcttttctttctctctgtgtgtatctatttacatgccttagcacacgccctcccatcctgatccctttgccctgtcgccggaacaaccagaatgctggtgcgctgccggcacagtacaagttgatgaaaccctaatcagttatcttgtgtgacaggggaagaagagaaactccatagtattccttgtagaatatacatacctgtaggatgctgtgtaatgggaaaccatagaattgggcttttgtcatttcaaagttggagaaatgtatgaataaaatgtataaaacatgaaaa

SEQ ID NO: 140159 - DNA, 8262 bp, Artificial Sequence
  derived and/or modified sequence
ccgttttcgaagccctccacgctgcggccgctatcccctccggaccatggccgacgacgacgtgctgttcgaggatgtgtacgagctgtgcgaggtgatcggaaagggtcccttcagtgttgtacgacgatgtatcaacagagaaactgggcaacaatttgctgtaaaaattgttgatgtagccaagttcacatcaagtccagggttaagtacagaagatctaaagcgggaagccagtatctgtcatatgctgaaacatccacacattgtagagttattggagacatatagctcagatggaatgctttacatggttttcgaatttatggatggagcagatctgtgttttgaaatcgtaaagcgagctgacgctggttttgtgtacagtgaagctgtagccagccattatatgagacagatactggaagctctacgctactgccatgataataacataattcacagggatgtgaagccccactgtgttctccttgcctcaaaagaaaactcggcacctgttaaacttggaggctttggggtagctattcaattaggggagtctggacttgtagctggaggacgtgttggaacacctcattttatggcaccagaagtggtcaaaagagagccttacggaaagcctgtagacgtctgggggtgcggtgtgatcctttttatcctgctcagtggttgtttgcctttttacggaaccaaggaaagattgtttgaaggcattattaaaggaaaatataagatgaatccaaggcagtggagccatatctctgaaagtgccaaagacctagtacgtcgcatgctgatgctggatccagctgaaaggatcactgtttatgaagcactgaatcacccatggcttaaggagcgggatcgttacgcctacaagattcatcttccagaaacagtagagcagctgaggaaattcaatgcaaggaggaaactaaagggtgcagtactagccgctgtgtcaagtcacaaattcaactcattctatggggatccccctgaagagttaccagatttctccgaagaccctacctcctcagtgcttcttattgtttcacgagcagtctcacaggtgctggacagcctggaagagattcatgcgcttacagactgcagtgaaaaggacctagattttctacacagtgttttccaggatcagcatcttcacacactactagatctgtatgacaaaattaacacaaagtcttcaccacaaatcaggaatcctccaagcgatgcagtacagagagccaaagaggtattggaagaaatttcatgttaccctgagaataacgacgcaaaggaactaaagcgtattttaacacaacctcatttcatggccttacttcagactcacgacgtagtggcacatgaagtttacagtgatgaagcattgagggtcacacctcctcccacctctccctatttaaacggcgattctccagaaagtgctaacggagacatggatatggagaatgtgaccagagttcggctggtacagtttcaaaagaacacagatgaaccaatgggaatcactttaaaaatgaatgaactaaatcattgtattgttgcaagaattatgcatgggggcatgattcacaggcaaggtacacttcatgttggtgatgaaattcgagaaatcaatggcatcagtgtggctaaccaaacagtggaacaactgcaaaaaatgcttagggaaatgcgggggagtattaccttcaagattgtgccaagttaccgcactcagtcttcgtcctgtgagagagattccccttccacttccagacagtccccagctaatggtcatagcagcactaacaattctgtttcgatctatgtaagagcacaatttgaatatgatccagccaaggatgacctcatcccctgtaaagaagctggcattcgattcagagttggtgacatcatccagattattagtaaggatgatcataattggtggcagggtaaactggaaaactccaaaaatggaactgcaggtctcattccttctcctgaacttcaggaatggcgagtagcttgcattgccatggagaagaccaaacaggagcagcaggccagctgtacttggtttggcaagaaaaagaagcagtacaaagataaatatttggcaaagcacaatgcagatcttgtcacatatgaagaagtagtaaaactgccagcattcaagaggaaaacactagtcttattaggcgcacatggtgttgggagaagacacataaaaaacactctcatcacaaagcacccagaccggtttgcgtaccctattccacatacaaccagacctccaaagaaagacgaagaaaatggaaagaattattactttgtatctcatgaccaaatgatgcaagacatctctaataacgagtacttggagtacggcagccacgaggatgcgatgtatgggacaaaactggagaccatccggaagatccacgagcaggggctgattgcaatactggacgtggagcctcaggcactgaaggtcctgagaactgcagagtttgctccttttgttgttttcattgctgcaccaactattactccaggtttaaatgaggatgaatctcttcagcgtctgcagaaggagtctgacatcttacagagaacatatgcacactacttcgatctcacaattatcaacaatgaaattgatgagacaatcagacatctggaggaagctgttgagctcgtgtgcacagccccacagtgggtccctgtctcctgggtctattaggcctctccccagatatctgagcataactgggagcacctcatttgtggaaaagcctctttgttatcggccttgtgtcagcaggtcatggtccctagagactacctagttgtagtgtgacctacatttataattattgtcatgtccgaatagataggaggagaaaaacaattacacactaatttaaagagacagtatcttttttaatcagttctcctaaactttaataaaatgtatctttaaatgtatgtattattcaatcctttggaatgttatatttttggaaatcatagctttttatttccaaggcccctaaaaactgcacaaaatagatgctgctttctataatctattttaataataataaacaatgattctgttaccttgactgggggtggaacactacattctttttagagtctgattttatggattggaatattgggatatctttctttcctttatttatttgaaataattagtgtagtgattacaaaacagtcataaatttttaaaggccttttttctctctttttttttttttagaatagtatttttttttaagtcctttatgtaacatccagataatgtgatactgtctctttgaagcaccctgtaaaccttttagagatttgaagttgggtcttgactcttaatgcatgtggacagtcgcgagcgtttatgctgtcggtgtgtctgtgttggacaaaacaatctgtaatctacagcaaagtacattctacattccgttcatggggcacacccaggggaataagaataaaatgctattatgactaagttgtaaacctatgcacatcccttgcattttgggcaactttataaaaaaaaagaaactgatttttattaataataatcatgtagtgaaatgtgtttgtaattttgtctcaatttaatttgttgtaaggtggggtggggggaattgctggtttcaccatttcagatctgtgttgtctaagagtattaacgttttaattaagcaaagaaatgatttttaatctgtatgtaattgttttaaagcacccattttaagagaaaatactgtgcaatgaagaaaccagtttaggcatttgctataaactgaaatattccaaaagaatcatctataacagccctgtaaattcctttaaaatgataactaacaggacagtttgaccaattttttttaaatatacttccttttatgtgttcaataattaaatgcctttgggtccttcatttcattatagatttgttcaggcttccaagctgataatctttacaattgtataatttgttagatgctcattgaacctttgaaggcccaggagtgagtatcagttggcagggtgacaaagtagcctgccagagcacagctggaccacgtctgactcgcacagagccatgcgcccaagggccacgggtgtactggaggccacctgtggtctctccttcctcttgctgtatcccttggcacaggggaatcatctgtccttgttgctttagagacattaaccatctcataactcttccatgaagtcacattcttccaatacaggagattcgggctggggttctcagactctttgccagaggtcagtagaatgtttttcattagcatgtgagggtgtgaagtgcttatattaacctgtgatccttgaaaacataccatcattttttgcttcttgtaggttagatggccttgtcactttgtgccttggcaggatgtgcagggtgtgttctgagctgaacagctcctcttaaaggaccaaacagagaaggcattagtatacttcttttacattgtcaacaccatacccgcctccgccccccaccgcctattattaaatggtggcgatttttttttttctgatgttgttctttgccagtgaccagatgagtctgcaacttactaacaaggtattgagtgaactacttctgtatgggccccacagtggggtgaccaagccaccaaaccagagataagctcaacagtggtctcacactagatagagagagaaaccttcaaagagttgggtagggctgtgttagaactgattcgaatctgatagatgccaaggccagacagtcgttcctggtatggtactgaccacaatttcgggctcttagtgtgaaggtgcgcactctacctcttttctggtgaagcacaaagacaactacaactaacacatgggaaacagaaacttccctccctctagtggaaacccccacgcccccacttgccctttgagcccacatctccagagatgctgatgatgcctgtcttaagccatctgccatatttataaaggtggattaagcagaggaggagaaaagcaatgccaacttaaatgtctgtggccccacaattcacaagcactgtagcactcatcctcagtggctttatacgtcctctgagaagcacacaggcaggcatcattcttgccatcattccgatggtgaaatccctgcatgcagaactcattgacttctcaaagatgttacctgttccattccactaatacatgtcttctctaaagcagtgtctttatgacctagctgcatatacttacatttctgaattcagagtaatttcagtacattgctgctgctgctgctgctgctgctgctgctgctgctgctgctgctgctgctactgctacattacaattgtccactaagcaatcagagaaaattgctaaaagcttctttactgcttccattccatcagcagaacctttttttttctttctttcttttaaagaccagaatgaatgtttagagtactaaatcttattagtggtcaattgaagtattggagagccacattttgaaggttctctcccccacccaactccattccccacagcaagaaagggagtgtttttatatgttgaattctttgttaaaaagatgaaatgtcctgattttccagtcacaagacagtaattactttgcacatacagcatatcccattttaatgctaaaaagggaaatgtcactcaatttaattcatctggaagtttcccagtgtcaagataacattgtagcctttttaaatgcaattaaatgtatctcttgtcaggtgagatgatttaaaatctttgctcagagaggaaaacaaatggttgacctacttcttgctatttgcattcagaaggcatcgtcccagcccatcctattggtggcagaatatctaaagatgtcgcaaagtcccccactgcagtagaaatgcaggaggtgttcctgttccccgtccaattccttcttaggctgctagagacagccagtgggccaagccttcccctgtgctccaggcaggcctgggctgcagctactgttacctttttacagcctttgatctgatcgctgcagagttcttttgtttttaaatcacttgtatttgtctcttcattaaggcttcaagtttatttcttgaaaaagtttagtcaattgaaccaccctccaggaagattcccagcgtggaaactgcccctgaaaaacaaggcagcccaaagccagctctcttttgtcccccactgatgtcatgtcctttttttttttcatttcaggccagtttcttaacttggggcaaagagaatgtgttgctaaagctaccaagaaaactgcttgattaacaaattcttaatagaaatgcctcccacactgtctctttgaaaagagaaggcaccttggaatcggcattccaaaaccaagctccttgtcatcctcatccctcctccttcttgcttcctattatcaaactcgtgtgtgtttcttgttttctcagaactgaacacagcctcctaattccatcctcttgactagggcttacaatactgagagcgattacaggctgtaataagttaaaggtccctgagcgtggctttcttgttctgcgcctctaattaattcttctattaaaagatgctttccttctcactgcagcttacagaaaggctacaagctttaatcacagatcatttcatttgccagagcctttccttttctaactcctttagaaataagatttccctctctgtttggaatctctggatacaggactctcctccaagctcatggcttgattggctttgcctgtgcacacacacatcagtttgccttaaacttggagctatggggagtcccagattttccagcttagtgggtgaagtttagctgtcacctacatccaggaagtgggggaaaagggaaaaaaagaggatattcaccaccatgttcccatccggtctttcccctgccttgctttgtgcagcaggtgggcagacagagcccacagaaacagaagtagaaagagggccgcaccatctctggggccagcactcctaagtcttagctctttgtgggaatagaaaatcctgagctcccaccacctctcgtctgaccctccatcaactccctcgaacctgtgcaaatggactgagcaaaagaaaatggaaagagatgtttgtcaccacacaggagacctcctttctggccccaagcacaactccatctctgcgtatgctcagaaactcagaatttagctgctacttatgtgttagctccattctctctggtgtgtgactgagagaacacgccagtgttcttactgacagaggcttaggggtgaccctctctggacccagaggaagtacaacctctgtagcgagaattgtccttgggaacagaaacaggcattcctccacagtgagtggctccccctattttttttttatttggaagagaccaagaattgggggaattgatttccagtcttagctgtttcccggaatgtcatctgtgcaggcaggtaggcggctgccgggtgcagcaggcagcgtgactgatgtgaaggccgcccaatcctcacgtgctaagacccgagtatcgtgtttaattgcagtgtaggcacgtcgccattcaaactcagttctggggtggttttgcataaagttttgccaacgtgttcttttttctgtatgtattattgcctttttataaaaggtgttgaagtattgtctcagtgataaaaagagagagatgttaatggttgttgtatatttcaccgtatccaattgtaagtatttgcagggtacagcagagccttagcttgcaagagcgtttgtgcaggaggtgtccctcaacacccaggagctgaagggattggaaaggtttggattctttgtaaatgtcctgcttttctttctctctgtgtgtatctatttacatgccttagcacacgccctcccatcctgatccctttgccctgtcgccggaacaaccagaatgctggtgcgctgccggcacagtacaagttgatgaaaccctaatcagttatcttgtgtgacaggggaagaagagaaactccatagtattccttgtagaatatacatacctgtaggatgctgtgtaatgggaaaccatagaattgggcttttgtcatttcaaagttggagaaatgtatgaataaaatgtataaaacatgaaaa

SEQ ID NO: 140160 - DNA, 3848 bp, Artificial Sequence
  derived and/or modified sequence
cggcccgcgcgggctgacgagcggagagcgcgacgccgcgcggtccccgaggatccgcacgccgggcagcgcggcccgagcagcgcgagaagcagcgggcgggcgggcggcgccgggcccgggccgccctcgctcccgcgccccggccccgccgcccgcgccggggcggtcgcctgcagaggaaggcgccgcagtctctgggcctcgcggccccactcgagcgtcctcggcaccgagggctcgcgggtcctgaggggaggaggcgatcccggggctgggcactgagctcttgggcgcccccacccccgttttcgaagccctccacgctgcggccgctatcccctccggaccatggccgacgacgacgtgctgttcgaggatgtgtacgagctgtgcgaggtgatcggaaagggtcccttcagtgttgtacgacgatgtatcaacagagaaactgggcaacaatttgctgtaaaaattgttgatgtagccaagttcacatcaagtccagggttaagtacagaagatctaaagcgggaagccagtatctgtcatatgctgaaacatccacacattgtagagttattggagacatatagctcagatggaatgctttacatggttttcgaatttatggatggagcagatctgtgttttgaaatcgtaaagcgagctgacgctggttttgtgtacagtgaagctgtagccagccattatatgagacagatactggaagctctacgctactgccatgataataacataattcacagggatgtgaagccccactgtgttctccttgcctcaaaagaaaactcggcacctgttaaacttggaggctttggggtagctattcaattaggggagtctggacttgtagctggaggacgtgttggaacacctcattttatggcaccagaagtggtcaaaagagagccttacggaaagcctgtagacgtctgggggtgcggtgtgatcctttttatcctgctcagtggttgtttgcctttttacggaaccaaggaaagattgtttgaaggcattattaaaggaaaatataagatgaatccaaggcagtggagccatatctctgaaagtgccaaagacctagtacgtcgcatgctgatgctggatccagctgaaaggatcactgtttatgaagcactgaatcacccatggcttaaggagcgggatcgttacgcctacaagattcatcttccagaaacagtagagcagctgaggaaattcaatgcaaggaggaaactaaagggtgcagtactagccgctgtgtcaagtcacaaattcaactcattctatggggatccccctgaagagttaccagatttctccgaagaccctacctcctcaggacttctagcagcagaaagagcagtctcacaggtgctggacagcctggaagagattcatgcgcttacagactgcagtgaaaaggacctagattttctacacagtgttttccaggatcagcatcttcacacactactagatctgtatgacaaaattaacacaaagtcttcaccacaaatcaggaatcctccaagcgatgcagtacagagagccaaagaggtattggaagaaatttcatgttaccctgagaataacgacgcaaaggaactaaagcgtattttaacacaacctcatttcatggccttacttcagactcacgacgtagtggcacatgaagtttacagtgatgaagcattgagggtcacacctcctcccacctctccctatttaaacggcgattctccagaaagtgctaacggagacatggatatggagaatgtgaccagagttcggctggtacagtttcaaaagaacacagatgaaccaatgggaatcactttaaaaatgaatgaactaaatcattgtattgttgcaagaattatgcatgggggcatgattcacaggcaaggtacacttcatgttggtgatgaaattcgagaaatcaatggcatcagtgtggctaaccaaacagtggaacaactgcaaaaaatgcttagggaaatgcgggggagtattaccttcaagattgtgccaagttaccgcactcagtcttcgtcctgtgagagagattccccttccacttccagacagtccccagctaatggtcatagcagcactaacaattctgtttcgatctatgtaagagcacaatttgaatatgatccagccaaggatgacctcatcccctgtaaagaagctggcattcgattcagagttggtgacatcatccagattattagtaaggatgatcataattggtggcagggtaaactggaaaactccaaaaatggaactgcaggtctcattccttctcctgaacttcaggaatggcgagtagcttgcattgccatggagaagaccaaacaggagcagcaggccagctgtacttggtttggcaagaaaaagaagcagtacaaagataaatatttggcaaagcacaatgcagatcttgtcacatatgaagaagtagtaaaactgccagcattcaagaggaaaacactagtcttattaggcgcacatggtgttgggagaagacacataaaaaacactctcatcacaaagcacccagaccggtttgcgtaccctattccacatacaaccagacctccaaagaaagacgaagaaaatggaaagaattattactttgtatctcatgaccaaatgatgcaagacatctctaataacgagtacttggagtacggcagccacgaggatgcgatgtatgggacaaaactggagaccatccggaagatccacgagcaggggctgattgcaatactggacgtggagcctcaggcactgaaggtcctgagaactgcagagtttgctccttttgttgttttcattgctgcaccaactattactccaggtttaaatgaggatgaatctcttcagcgtctgcagaaggagtctgacatcttacagagaacatatgcacactacttcgatctcacaattatcaacaatgaaattgatgagacaatcagacatctggaggaagctgttgagctcgtgtgcacagccccacagtgggtccctgtctcctgggtctattaggcctctccccagatatctgagcataactgggagcacctcatttgtggaaaagcctctttgttatcggccttgtgtcagcaggtcatggtccctagagactacctagttgtagtgtgacctacatttataattattgtcatgtccgaatagataggaggagaaaaacaattacacactaatttaaagagacagtatcttttttaatcagttctcctaaactttaataaaatgtatctttaaatgtatgtattattcaatcctttggaatgttatatttttggaaatcatagctttttatttccaaggcccctaaaaactgcacaaaatagatgctgctttctataatctattttaataataataaacaatgattctgttaccttgactgggggtggaacactacattctttttagagtctgattttatggattggaatattgggatatctttctttcctttatttatttgaaataattagtgtagtgattacaaaacagtcataaatttttaaaggccttttttctctctttttttttttttagaatagtatttttttttaagtcctttatgtaacatccagataatgtgatactgtctctttgaagcaccctgtaaaccttttagagatttgaagttgggtcttgactcttaatgcatgtggacagtcgcgagcgtttatgctgtcggtgtgtctgtgttggacaaaacaatctgtaatctacagcaaagtacattctacattccgttcatggggcacacccagggg

SEQ ID NO: 140161 - DNA, 4411 bp, Artificial Sequence
  derived and/or modified sequence
gccgccgccacctccctccgcggcgatcctcgctccatggtcctgccgcggccccctctgtagcccgagctgctccgcgacgcgacggagccggcctcggacagagggagcggtcgcggcctcgcggcccgcgcgggctgacgagcggagagcgcgacgccgcgcggtccccgaggatccgcacgccgggcagcgcggcccgagcagcgcgagaagcagcgggcgggcgggcggcgccgggcccgggccgccctcgctcccgcgccccggccccgccgcccgcgccggggcggtcgcctgcagaggaaggcgccgcagtctctgggcctcgcggccccactcgagcgtcctcggcaccgagggctcgcgggtcctgaggggaggaggcgatcccggggctgggcactgagctcttgggcgcccccacccccgttttcgaagccctccacgctgcggccgctatcccctccggaccatggccgacgacgacgtgctgttcgaggatgtgtacgagctgtgcgaggtgatcggaaagggtcccttcagtgttgtacgacgatgtatcaacagagaaactgggcaacaatttgctgtaaaaattgttgatgtagccaagttcacatcaagtccagggttaagtacagaagatctaaagcgggaagccagtatctgtcatatgctgaaacatccacacattgtagagttattggagacatatagctcagatggaatgctttacatggttttcgaatttatggatggagcagatctgtgttttgaaatcgtaaagcgagctgacgctggttttgtgtacagtgaagctgtagccagccattatatgagacagatactggaagctctacgctactgccatgataataacataattcacagggatgtgaagccccactgtgttctccttgcctcaaaagaaaactcggcacctgttaaacttggaggctttggggtagctattcaattaggggagtctggacttgtagctggaggacgtgttggaacacctcattttatggcaccagaagtggtcaaaagagagccttacggaaagcctgtagacgtctgggggtgcggtgtgatcctttttatcctgctcagtggttgtttgcctttttacggaaccaaggaaagattgtttgaaggcattattaaaggaaaatataagatgaatccaaggcagtggagccatatctctgaaagtgccaaagacctagtacgtcgcatgctgatgctggatccagctgaaaggatcactgtttatgaagcactgaatcacccatggcttaaggagcgggatcgttacgcctacaagattcatcttccagaaacagtagagcagctgaggaaattcaatgcaaggaggaaactaaagggtgcagtactagccgctgtgtcaagtcacaaattcaactcattctatggggatccccctgaagagttaccagatttctccgaagaccctacctcctcaggacttctagcagcagaaagagcagtctcacaggtgctggacagcctggaagagattcatgcgcttacagactgcagtgaaaaggacctagattttctacacagtgttttccaggatcagcatcttcacacactactagatctgtatgacaaaattaacacaaagtcttcaccacaaatcaggaatcctccaagcgatgcagtacagagagccaaagaggtattggaagaaatttcatgttaccctgagaataacgacgcaaaggaactaaagcgtattttaacacaacctcatttcatggccttacttcagactcacgacgtagtggcacatgaagtttacagtgatgaagcattgagggtcacacctcctcccacctctccctatttaaacggcgattctccagaaagtgctaacggagacatggatatggagaatgtgaccagagttcggctggtacagtttcaaaagaacacagatgaaccaatgggaatcactttaaaaatgaatgaactaaatcattgtattgttgcaagaattatgcatgggggcatgattcacaggcaaggtacacttcatgttggtgatgaaattcgagaaatcaatggcatcagtgtggctaaccaaacagtggaacaactgcaaaaaatgcttagggaaatgcgggggagtattaccttcaagattgtgccaagttaccgcactcagtcttcgtcctgtgagagagattccccttccacttccagacagtccccagctaatggtcatagcagcactaacaattctgtttcggacttgccatcaactacccaaccaaaaggacgacagatctatgtaagagcacaatttgaatatgatccagccaaggatgacctcatcccctgtaaagaagctggcattcgattcagagttggtgacatcatccagattattagtaaggatgatcataattggtggcagggtaaactggaaaactccaaaaatggaactgcaggtctcattccttctcctgaacttcaggaatggcgagtagcttgcattgccatggagaagaccaaacaggagcagcaggccagctgtacttggtttggcaagaaaaagaagcagtacaaagataaatatttggcaaagcacaatgcagtgtttgatcaattagatcttgtcacatatgaagaagtagtaaaactgccagcattcaagaggaaaacactagtcttattaggcgcacatggtgttgggagaagacacataaaaaacactctcatcacaaagcacccagaccggtttgcgtaccctattccacatacaaccagacctccaaagaaagacgaagaaaatggaaagaattattactttgtatctcatgaccaaatgatgcaagacatctctaataacgagtacttggagtacggcagccacgaggatgcgatgtatgggacaaaactggagaccatccggaagatccacgagcaggggctgattgcaatactggacgtggagcctcaggcactgaaggtcctgagaactgcagagtttgctccttttgttgttttcattgctgcaccaactattactccaggtttaaatgaggatgaatctcttcagcgtctgcagaaggagtctgacatcttacagagaacatatgcacactacttcgatctcacaattatcaacaatgaaattgatgagacaatcagacatctggaggaagctgttgagctcgtgtgcacagccccacagtgggtccctgtctcctgggtctattaggcctctccccagatatctgagcataactgggagcacctcatttgtggaaaagcctctttgttatcggccttgtgtcagcaggtcatggtccctagagactacctagttgtagtgtgacctacatttataattattgtcatgtccgaatagataggaggagaaaaacaattacacactaatttaaagagacagtatcttttttaatcagttctcctaaactttaataaaatgtatctttaaatgtatgtattattcaatcctttggaatgttatatttttggaaatcatagctttttatttccaaggcccctaaaaactgcacaaaatagatgctgctttctataatctattttaataataataaacaatgattctgttaccttgactgggggtggaacactacattctttttagagtctgattttatggattggaatattgggatatctttctttcctttatttatttgaaataattagtgtagtgattacaaaacagtcataaatttttaaaggccttttttctctctttttttttttttagaatagtatttttttttaagtcctttatgtaacatccagataatgtgatactgtctctttgaagcaccctgtaaaccttttagagatttgaagttgggtcttgactcttaatgcatgtggacagtcgcgagcgtttatgctgtcggtgtgtctgtgttggacaaaacaatctgtaatctacagcaaagtacattctacattccgttcatggggcacacccaggggaataagaataaaatgctattatgactaagttgtaaacctatgcacatcccttgcattttgggcaactttataaaaaaaaagaaactgatttttattaataataatcatgtagtgaaatgtgtttgtaattttgtctcaatttaatttgttgtaaggtggggtggggggaattgctggtttcaccatttcagatctgtgttgtctaagagtattaacgttttaattaagcaaagaaatgatttttaatctgtatgtaattgttttaaagcacccattttaagagaaaatactgtgcaatgaagaaaccagtttaggcatttgctataaactgaaatattccaaaagaatcatctataacagccctgtaaattcctttaaaatgataact

SEQ ID NO: 140162 - DNA, 3123 bp, Artificial Sequence
  derived and/or modified sequence
cgctgcggccgctatcccctccggaccatggccgacgacgacgtgctgttcgaggatgtgtacgagctgtgcgaggtgatcggaaagggtcccttcagtgttgtacgacgatgtatcaacagagaaactgggcaacaatttgctgtaaaaattgttgatgtagccaagttcacatcaagtccagggttaagtacagaagatctaaagcgggaagccagtatctgtcatatgctgaaacatccacacattgtagagttattggagacatatagctcagatggaatgctttacatggttttcgaatttatggatggagcagatctgtgttttgaaatcgtaaagcgagctgacgctggttttgtgtacagtgaagctgtagccagccattatatgagacagatactggaagctctacgctactgccatgataataacataattcacagggatgtgaagccccactgtgttctccttgcctcaaaagaaaactcggcacctgttaaacttggaggctttggggtagctattcaattaggggagtctggacttgtagctggaggacgtgttggaacacctcattttatggcaccagaagtggtcaaaagagagccttacggaaagcctgtagacgtctgggggtgcggtgtgatcctttttatcctgctcagtggttgtttgcctttttacggaaccaaggaaagattgtttgaaggcattattaaaggaaaatataagatgaatccaaggcagtggagccatatctctgaaagtgccaaagacctagtacgtcgcatgctgatgctggatccagctgaaaggatcactgtttatgaagcactgaatcacccatggcttaaggagcgggatcgttacgcctacaagattcatcttccagaaacagtagagcagctgaggaaattcaatgcaaggaggaaactaaagggtgcagtactagccgctgtgtcaagtcacaaattcaactcattctatggggatccccctgaagagttaccagatttctccgaagaccctacctcctcaggacttctagcagcagaaagagcagtctcacaggtgctggacagcctggaagagattcatgcgcttacagactgcagtgaaaaggacctagattttctacacagtgttttccaggatcagcatcttcacacactactagatctgtatgacaaaattaacacaaagtcttcaccacaaatcaggaatcctccaagcgatgcagtacagagagccaaagaggtattggaagaaatttcatgttaccctgagaataacgacgcaaaggaactaaagcgtattttaacacaacctcatttcatggccttacttcagactcacgacgtagtggcacatgaagtttacagtgatgaagcattgagggtcacacctcctcccacctctccctatttaaacggcgattctccagaaagtgctaacggagacatggatatggagaatgtgaccagagttcggctggtacagtttcaaaagaacacagatgaaccaatgggaatcactttaaaaatgaatgaactaaatcattgtattgttgcaagaattatgcatgggggcatgattcacaggcaaggtacacttcatgttggtgatgaaattcgagaaatcaatggcatcagtgtggctaaccaaacagtggaacaactgcaaaaaatgcttagggaaatgcgggggagtattaccttcaagattgtgccaagttaccgcactcagtcttcgtcctgtgagagagattccccttccacttccagacagtccccagctaatggtcatagcagcactaacaattctgtttcggacttgccatcaactacccaaccaaaaggacgacagatctatgtaagagcacaatttgaatatgatccagccaaggatgacctcatcccctgtaaagaagctggcattcgattcagagttggtgacatcatccagattattagtaaggatgatcataattggtggcagggtaaactggaaaactccaaaaatggaactgcaggtctcattccttctcctgaacttcaggaatggcgagtagcttgcattgccatggagaagaccaaacaggagcagcaggccagctgtacttggtttggcaagaaaaagaagcagtacaaagataaatatttggcaaagcacaatgcagatcttgtcacatatgaagaagtagtaaaactgccagcattcaagaggaaaacactagtcttattaggcgcacatggtgttgggagaagacacataaaaaacactctcatcacaaagcacccagaccggtttgcgtaccctattccacatacaaccagacctccaaagaaagacgaagaaaatggaaagaattattactttgtatctcatgaccaaatgatgcaagacatctctaataacgagtacttggagtacggcagccacgaggatgcgatgtatgggacaaaactggagaccatccggaagatccacgagcaggggctgattgcaatactggacgtggagcctcaggcactgaaggtcctgagaactgcagagtttgctccttttgttgttttcattgctgcaccaactattactccaggtttaaatgaggatgaatctcttcagcgtctgcagaaggagtctgacatcttacagagaacatatgcacactacttcgatctcacaattatcaacaatgaaattgatgagacaatcagacatctggaggaagctgttgagctcgtgtgcacagccccacagtgggtccctgtctcctgggtctattaggcctctccccagatatctgagcataactgggagcacctcatttgtggaaaagcctctttgttatcggccttgtgtcagcaggtcatggtccctagagactacctagttgtagtgtgacctacatttataattattgtcatgtccgaatagataggaggagaaaaacaattacacactaatttaaagagacagtatcttttttaatcagttctcctaaactttaataaaatgtatctttaaatgtatgtattattcaatcctttggaatgttatatttttggaaatcatagctttttatttccaaggcccctaaaaactgcacaaaataga

SEQ ID NO: 140163 - DNA, 2766 bp, Artificial Sequence
  derived and/or modified sequence
atggccgacgacgacgtgctgttcgaggacgtgtacgagctgtgcgaggtgatcggcaagggccccttcagcgtggtgagaagatgcatcaacagagagaccggccagcagttcgccgtgaagatcgtggacgtggccaagttcaccagcagccccggcctgagcaccgaggacctgaagagagaggccagcatctgccacatgctgaagcacccccacatcgtggagctgctggagacctacagcagcgacggcatgctgtacatggtgttcgagttcatggacggcgccgacctgtgcttcgagatcgtgaagagagccgacgccggcttcgtgtacagcgaggccgtggccagccactacatgagacagatcctggaggccctgagatactgccacgacaacaacatcatccacagagacgtgaagccccactgcgtgctgctggccagcaaggagaacagcgcccccgtgaagctgggcggcttcggcgtggccatccagctgggcgagagcggcctggtggccggcggcagagtgggcaccccccacttcatggcccccgaggtggtgaagagagagccctacggcaagcccgtggacgtgtggggctgcggcgtgatcctgttcatcctgctgagcggctgcctgcccttctacggcaccaaggagagactgttcgagggcatcatcaagggcaagtacaagatgaaccccagacagtggagccacatcagcgagagcgccaaggacctggtgagaagaatgctgatgctggaccccgccgagagaatcaccgtgtacgaggccctgaaccacccctggctgaaggagagagacagatacgcctacaagatccacctgcccgagaccgtggagcagctgagaaagttcaacgccagaagaaagctgaagggcgccgtgctggccgccgtgagcagccacaagttcaacagcttctacggcgacccccccgaggagctgcccgacttcagcgaggaccccaccagcagcgtgctgctgatcgtgagcagagccgtgagccaggtgctggacagcctggaggagatccacgccctgaccgactgcagcgagaaggacctggacttcctgcacagcgtgttccaggaccagcacctgcacaccctgctggacctgtacgacaagatcaacaccaagagcagcccccagatcagaaacccccccagcgacgccgtgcagagagccaaggaggtgctggaggagatcagctgctaccccgagaacaacgacgccaaggagctgaagagaatcctgacccagccccacttcatggccctgctgcagacccacgacgtggtggcccacgaggtgtacagcgacgaggccctgagagtgacccccccccccaccagcccctacctgaacggcgacagccccgagagcgccaacggcgacatggacatggagaacgtgaccagagtgagactggtgcagttccagaagaacaccgacgagcccatgggcatcaccctgaagatgaacgagctgaaccactgcatcgtggccagaatcatgcacggcggcatgatccacagacagggcaccctgcacgtgggcgacgagatcagagagatcaacggcatcagcgtggccaaccagaccgtggagcagctgcagaagatgctgagagagatgagaggcagcatcaccttcaagatcgtgcccagctacagaacccagagcagcagctgcgagagagacagccccagcaccagcagacagagccccgccaacggccacagcagcaccaacaacagcgtgagcgacctgcccagcaccacccagcccaagggcagacagatctacgtgagagcccagttcgagtacgaccccgccaaggacgacctgatcccctgcaaggaggccggcatcagattcagagtgggcgacatcatccagatcatcagcaaggacgaccacaactggtggcagggcaagctggagaacagcaagaacggcaccgccggcctgatccccagccccgagctgcaggagtggagagtggcctgcatcgccatggagaagaccaagcaggagcagcaggccagctgcacctggttcggcaagaagaagaagcagtacaaggacaagtacctggccaagcacaacgccgacctggtgacctacgaggaggtggtgaagctgcccgccttcaagagaaagaccctggtgctgctgggcgcccacggcgtgggcagaagacacatcaagaacaccctgatcaccaagcaccccgacagattcgcctaccccatcccccacaccaccagaccccccaagaaggacgaggagaacggcaagaactactacttcgtgagccacgaccagatgatgcaggacatcagcaacaacgagtacctggagtacggcagccacgaggacgccatgtacggcaccaagctggagaccatcagaaagatccacgagcagggcctgatcgccatcctggacgtggagccccaggccctgaaggtgctgagaaccgccgagttcgcccccttcgtggtgttcatcgccgcccccaccatcacccccggcctgaacgaggacgagagcctgcagagactgcagaaggagagcgacatcctgcagagaacctacgcccactacttcgacctgaccatcatcaacaacgagatcgacgagaccatcagacacctggaggaggccgtggagctggtgtgcaccgccccccagtgggtgcccgtgagctgggtgtactag

SEQ ID NO: 140164 - DNA, 2730 bp, Artificial Sequence
  derived and/or modified sequence
atggccgacgacgacgtgctgttcgaggacgtgtacgagctgtgcgaggtgatcggcaagggccccttcagcgtggtgagaagatgcatcaacagagagaccggccagcagttcgccgtgaagatcgtggacgtggccaagttcaccagcagccccggcctgagcaccgaggacctgaagagagaggccagcatctgccacatgctgaagcacccccacatcgtggagctgctggagacctacagcagcgacggcatgctgtacatggtgttcgagttcatggacggcgccgacctgtgcttcgagatcgtgaagagagccgacgccggcttcgtgtacagcgaggccgtggccagccactacatgagacagatcctggaggccctgagatactgccacgacaacaacatcatccacagagacgtgaagccccactgcgtgctgctggccagcaaggagaacagcgcccccgtgaagctgggcggcttcggcgtggccatccagctgggcgagagcggcctggtggccggcggcagagtgggcaccccccacttcatggcccccgaggtggtgaagagagagccctacggcaagcccgtggacgtgtggggctgcggcgtgatcctgttcatcctgctgagcggctgcctgcccttctacggcaccaaggagagactgttcgagggcatcatcaagggcaagtacaagatgaaccccagacagtggagccacatcagcgagagcgccaaggacctggtgagaagaatgctgatgctggaccccgccgagagaatcaccgtgtacgaggccctgaaccacccctggctgaaggagagagacagatacgcctacaagatccacctgcccgagaccgtggagcagctgagaaagttcaacgccagaagaaagctgaagggcgccgtgctggccgccgtgagcagccacaagttcaacagcttctacggcgacccccccgaggagctgcccgacttcagcgaggaccccaccagcagcgtgctgctgatcgtgagcagagccgtgagccaggtgctggacagcctggaggagatccacgccctgaccgactgcagcgagaaggacctggacttcctgcacagcgtgttccaggaccagcacctgcacaccctgctggacctgtacgacaagatcaacaccaagagcagcccccagatcagaaacccccccagcgacgccgtgcagagagccaaggaggtgctggaggagatcagctgctaccccgagaacaacgacgccaaggagctgaagagaatcctgacccagccccacttcatggccctgctgcagacccacgacgtggtggcccacgaggtgtacagcgacgaggccctgagagtgacccccccccccaccagcccctacctgaacggcgacagccccgagagcgccaacggcgacatggacatggagaacgtgaccagagtgagactggtgcagttccagaagaacaccgacgagcccatgggcatcaccctgaagatgaacgagctgaaccactgcatcgtggccagaatcatgcacggcggcatgatccacagacagggcaccctgcacgtgggcgacgagatcagagagatcaacggcatcagcgtggccaaccagaccgtggagcagctgcagaagatgctgagagagatgagaggcagcatcaccttcaagatcgtgcccagctacagaacccagagcagcagctgcgagagagacagccccagcaccagcagacagagccccgccaacggccacagcagcaccaacaacagcgtgagcatctacgtgagagcccagttcgagtacgaccccgccaaggacgacctgatcccctgcaaggaggccggcatcagattcagagtgggcgacatcatccagatcatcagcaaggacgaccacaactggtggcagggcaagctggagaacagcaagaacggcaccgccggcctgatccccagccccgagctgcaggagtggagagtggcctgcatcgccatggagaagaccaagcaggagcagcaggccagctgcacctggttcggcaagaagaagaagcagtacaaggacaagtacctggccaagcacaacgccgacctggtgacctacgaggaggtggtgaagctgcccgccttcaagagaaagaccctggtgctgctgggcgcccacggcgtgggcagaagacacatcaagaacaccctgatcaccaagcaccccgacagattcgcctaccccatcccccacaccaccagaccccccaagaaggacgaggagaacggcaagaactactacttcgtgagccacgaccagatgatgcaggacatcagcaacaacgagtacctggagtacggcagccacgaggacgccatgtacggcaccaagctggagaccatcagaaagatccacgagcagggcctgatcgccatcctggacgtggagccccaggccctgaaggtgctgagaaccgccgagttcgcccccttcgtggtgttcatcgccgcccccaccatcacccccggcctgaacgaggacgagagcctgcagagactgcagaaggagagcgacatcctgcagagaacctacgcccactacttcgacctgaccatcatcaacaacgagatcgacgagaccatcagacacctggaggaggccgtggagctggtgtgcaccgccccccagtgggtgcccgtgagctgggtgtactag

SEQ ID NO: 140165 - DNA, 2730 bp, Artificial Sequence
  derived and/or modified sequence
atggccgacgacgacgtgctgttcgaggacgtgtacgagctgtgcgaggtgatcggcaagggccccttcagcgtggtgagaagatgcatcaacagagagaccggccagcagttcgccgtgaagatcgtggacgtggccaagttcaccagcagccccggcctgagcaccgaggacctgaagagagaggccagcatctgccacatgctgaagcacccccacatcgtggagctgctggagacctacagcagcgacggcatgctgtacatggtgttcgagttcatggacggcgccgacctgtgcttcgagatcgtgaagagagccgacgccggcttcgtgtacagcgaggccgtggccagccactacatgagacagatcctggaggccctgagatactgccacgacaacaacatcatccacagagacgtgaagccccactgcgtgctgctggccagcaaggagaacagcgcccccgtgaagctgggcggcttcggcgtggccatccagctgggcgagagcggcctggtggccggcggcagagtgggcaccccccacttcatggcccccgaggtggtgaagagagagccctacggcaagcccgtggacgtgtggggctgcggcgtgatcctgttcatcctgctgagcggctgcctgcccttctacggcaccaaggagagactgttcgagggcatcatcaagggcaagtacaagatgaaccccagacagtggagccacatcagcgagagcgccaaggacctggtgagaagaatgctgatgctggaccccgccgagagaatcaccgtgtacgaggccctgaaccacccctggctgaaggagagagacagatacgcctacaagatccacctgcccgagaccgtggagcagctgagaaagttcaacgccagaagaaagctgaagggcgccgtgctggccgccgtgagcagccacaagttcaacagcttctacggcgacccccccgaggagctgcccgacttcagcgaggaccccaccagcagcggcctgctggccgccgagagagccgtgagccaggtgctggacagcctggaggagatccacgccctgaccgactgcagcgagaaggacctggacttcctgcacagcgtgttccaggaccagcacctgcacaccctgctggacctgtacgacaagatcaacaccaagagcagcccccagatcagaaacccccccagcgacgccgtgcagagagccaaggaggtgctggaggagatcagctgctaccccgagaacaacgacgccaaggagctgaagagaatcctgacccagccccacttcatggccctgctgcagacccacgacgtggtggcccacgaggtgtacagcgacgaggccctgagagtgacccccccccccaccagcccctacctgaacggcgacagccccgagagcgccaacggcgacatggacatggagaacgtgaccagagtgagactggtgcagttccagaagaacaccgacgagcccatgggcatcaccctgaagatgaacgagctgaaccactgcatcgtggccagaatcatgcacggcggcatgatccacagacagggcaccctgcacgtgggcgacgagatcagagagatcaacggcatcagcgtggccaaccagaccgtggagcagctgcagaagatgctgagagagatgagaggcagcatcaccttcaagatcgtgcccagctacagaacccagagcagcagctgcgagagagacagccccagcaccagcagacagagccccgccaacggccacagcagcaccaacaacagcgtgagcatctacgtgagagcccagttcgagtacgaccccgccaaggacgacctgatcccctgcaaggaggccggcatcagattcagagtgggcgacatcatccagatcatcagcaaggacgaccacaactggtggcagggcaagctggagaacagcaagaacggcaccgccggcctgatccccagccccgagctgcaggagtggagagtggcctgcatcgccatggagaagaccaagcaggagcagcaggccagctgcacctggttcggcaagaagaagaagcagtacaaggacaagtacctggccaagcacaacgccgacctggtgacctacgaggaggtggtgaagctgcccgccttcaagagaaagaccctggtgctgctgggcgcccacggcgtgggcagaagacacatcaagaacaccctgatcaccaagcaccccgacagattcgcctaccccatcccccacaccaccagaccccccaagaaggacgaggagaacggcaagaactactacttcgtgagccacgaccagatgatgcaggacatcagcaacaacgagtacctggagtacggcagccacgaggacgccatgtacggcaccaagctggagaccatcagaaagatccacgagcagggcctgatcgccatcctggacgtggagccccaggccctgaaggtgctgagaaccgccgagttcgcccccttcgtggtgttcatcgccgcccccaccatcacccccggcctgaacgaggacgagagcctgcagagactgcagaaggagagcgacatcctgcagagaacctacgcccactacttcgacctgaccatcatcaacaacgagatcgacgagaccatcagacacctggaggaggccgtggagctggtgtgcaccgccccccagtgggtgcccgtgagctgggtgtactag

SEQ ID NO: 140166 - DNA, 2781 bp, Artificial Sequence
  derived and/or modified sequence
atggccgacgacgacgtgctgttcgaggacgtgtacgagctgtgcgaggtgatcggcaagggccccttcagcgtggtgagaagatgcatcaacagagagaccggccagcagttcgccgtgaagatcgtggacgtggccaagttcaccagcagccccggcctgagcaccgaggacctgaagagagaggccagcatctgccacatgctgaagcacccccacatcgtggagctgctggagacctacagcagcgacggcatgctgtacatggtgttcgagttcatggacggcgccgacctgtgcttcgagatcgtgaagagagccgacgccggcttcgtgtacagcgaggccgtggccagccactacatgagacagatcctggaggccctgagatactgccacgacaacaacatcatccacagagacgtgaagccccactgcgtgctgctggccagcaaggagaacagcgcccccgtgaagctgggcggcttcggcgtggccatccagctgggcgagagcggcctggtggccggcggcagagtgggcaccccccacttcatggcccccgaggtggtgaagagagagccctacggcaagcccgtggacgtgtggggctgcggcgtgatcctgttcatcctgctgagcggctgcctgcccttctacggcaccaaggagagactgttcgagggcatcatcaagggcaagtacaagatgaaccccagacagtggagccacatcagcgagagcgccaaggacctggtgagaagaatgctgatgctggaccccgccgagagaatcaccgtgtacgaggccctgaaccacccctggctgaaggagagagacagatacgcctacaagatccacctgcccgagaccgtggagcagctgagaaagttcaacgccagaagaaagctgaagggcgccgtgctggccgccgtgagcagccacaagttcaacagcttctacggcgacccccccgaggagctgcccgacttcagcgaggaccccaccagcagcggcctgctggccgccgagagagccgtgagccaggtgctggacagcctggaggagatccacgccctgaccgactgcagcgagaaggacctggacttcctgcacagcgtgttccaggaccagcacctgcacaccctgctggacctgtacgacaagatcaacaccaagagcagcccccagatcagaaacccccccagcgacgccgtgcagagagccaaggaggtgctggaggagatcagctgctaccccgagaacaacgacgccaaggagctgaagagaatcctgacccagccccacttcatggccctgctgcagacccacgacgtggtggcccacgaggtgtacagcgacgaggccctgagagtgacccccccccccaccagcccctacctgaacggcgacagccccgagagcgccaacggcgacatggacatggagaacgtgaccagagtgagactggtgcagttccagaagaacaccgacgagcccatgggcatcaccctgaagatgaacgagctgaaccactgcatcgtggccagaatcatgcacggcggcatgatccacagacagggcaccctgcacgtgggcgacgagatcagagagatcaacggcatcagcgtggccaaccagaccgtggagcagctgcagaagatgctgagagagatgagaggcagcatcaccttcaagatcgtgcccagctacagaacccagagcagcagctgcgagagagacagccccagcaccagcagacagagccccgccaacggccacagcagcaccaacaacagcgtgagcgacctgcccagcaccacccagcccaagggcagacagatctacgtgagagcccagttcgagtacgaccccgccaaggacgacctgatcccctgcaaggaggccggcatcagattcagagtgggcgacatcatccagatcatcagcaaggacgaccacaactggtggcagggcaagctggagaacagcaagaacggcaccgccggcctgatccccagccccgagctgcaggagtggagagtggcctgcatcgccatggagaagaccaagcaggagcagcaggccagctgcacctggttcggcaagaagaagaagcagtacaaggacaagtacctggccaagcacaacgccgtgttcgaccagctggacctggtgacctacgaggaggtggtgaagctgcccgccttcaagagaaagaccctggtgctgctgggcgcccacggcgtgggcagaagacacatcaagaacaccctgatcaccaagcaccccgacagattcgcctaccccatcccccacaccaccagaccccccaagaaggacgaggagaacggcaagaactactacttcgtgagccacgaccagatgatgcaggacatcagcaacaacgagtacctggagtacggcagccacgaggacgccatgtacggcaccaagctggagaccatcagaaagatccacgagcagggcctgatcgccatcctggacgtggagccccaggccctgaaggtgctgagaaccgccgagttcgcccccttcgtggtgttcatcgccgcccccaccatcacccccggcctgaacgaggacgagagcctgcagagactgcagaaggagagcgacatcctgcagagaacctacgcccactacttcgacctgaccatcatcaacaacgagatcgacgagaccatcagacacctggaggaggccgtggagctggtgtgcaccgccccccagtgggtgcccgtgagctgggtgtactag

SEQ ID NO: 140167 - DNA, 2766 bp, Artificial Sequence
  derived and/or modified sequence
atggccgacgacgacgtgctgttcgaggacgtgtacgagctgtgcgaggtgatcggcaagggccccttcagcgtggtgagaagatgcatcaacagagagaccggccagcagttcgccgtgaagatcgtggacgtggccaagttcaccagcagccccggcctgagcaccgaggacctgaagagagaggccagcatctgccacatgctgaagcacccccacatcgtggagctgctggagacctacagcagcgacggcatgctgtacatggtgttcgagttcatggacggcgccgacctgtgcttcgagatcgtgaagagagccgacgccggcttcgtgtacagcgaggccgtggccagccactacatgagacagatcctggaggccctgagatactgccacgacaacaacatcatccacagagacgtgaagccccactgcgtgctgctggccagcaaggagaacagcgcccccgtgaagctgggcggcttcggcgtggccatccagctgggcgagagcggcctggtggccggcggcagagtgggcaccccccacttcatggcccccgaggtggtgaagagagagccctacggcaagcccgtggacgtgtggggctgcggcgtgatcctgttcatcctgctgagcggctgcctgcccttctacggcaccaaggagagactgttcgagggcatcatcaagggcaagtacaagatgaaccccagacagtggagccacatcagcgagagcgccaaggacctggtgagaagaatgctgatgctggaccccgccgagagaatcaccgtgtacgaggccctgaaccacccctggctgaaggagagagacagatacgcctacaagatccacctgcccgagaccgtggagcagctgagaaagttcaacgccagaagaaagctgaagggcgccgtgctggccgccgtgagcagccacaagttcaacagcttctacggcgacccccccgaggagctgcccgacttcagcgaggaccccaccagcagcggcctgctggccgccgagagagccgtgagccaggtgctggacagcctggaggagatccacgccctgaccgactgcagcgagaaggacctggacttcctgcacagcgtgttccaggaccagcacctgcacaccctgctggacctgtacgacaagatcaacaccaagagcagcccccagatcagaaacccccccagcgacgccgtgcagagagccaaggaggtgctggaggagatcagctgctaccccgagaacaacgacgccaaggagctgaagagaatcctgacccagccccacttcatggccctgctgcagacccacgacgtggtggcccacgaggtgtacagcgacgaggccctgagagtgacccccccccccaccagcccctacctgaacggcgacagccccgagagcgccaacggcgacatggacatggagaacgtgaccagagtgagactggtgcagttccagaagaacaccgacgagcccatgggcatcaccctgaagatgaacgagctgaaccactgcatcgtggccagaatcatgcacggcggcatgatccacagacagggcaccctgcacgtgggcgacgagatcagagagatcaacggcatcagcgtggccaaccagaccgtggagcagctgcagaagatgctgagagagatgagaggcagcatcaccttcaagatcgtgcccagctacagaacccagagcagcagctgcgagagagacagccccagcaccagcagacagagccccgccaacggccacagcagcaccaacaacagcgtgagcgacctgcccagcaccacccagcccaagggcagacagatctacgtgagagcccagttcgagtacgaccccgccaaggacgacctgatcccctgcaaggaggccggcatcagattcagagtgggcgacatcatccagatcatcagcaaggacgaccacaactggtggcagggcaagctggagaacagcaagaacggcaccgccggcctgatccccagccccgagctgcaggagtggagagtggcctgcatcgccatggagaagaccaagcaggagcagcaggccagctgcacctggttcggcaagaagaagaagcagtacaaggacaagtacctggccaagcacaacgccgacctggtgacctacgaggaggtggtgaagctgcccgccttcaagagaaagaccctggtgctgctgggcgcccacggcgtgggcagaagacacatcaagaacaccctgatcaccaagcaccccgacagattcgcctaccccatcccccacaccaccagaccccccaagaaggacgaggagaacggcaagaactactacttcgtgagccacgaccagatgatgcaggacatcagcaacaacgagtacctggagtacggcagccacgaggacgccatgtacggcaccaagctggagaccatcagaaagatccacgagcagggcctgatcgccatcctggacgtggagccccaggccctgaaggtgctgagaaccgccgagttcgcccccttcgtggtgttcatcgccgcccccaccatcacccccggcctgaacgaggacgagagcctgcagagactgcagaaggagagcgacatcctgcagagaacctacgcccactacttcgacctgaccatcatcaacaacgagatcgacgagaccatcagacacctggaggaggccgtggagctggtgtgcaccgccccccagtgggtgcccgtgagctgggtgtactag

SEQ ID NO: 140168 - protein, 313 aa, Artificial Sequence
  derived and/or modified sequence
MSQSRHRAEAPPLEREDSGTFSLGKMITAKPGKTPIQVLHEYGMKTKNIPVYECERSDVQIHVPTFTFRVTVGDITCTGEGTSKKLAKHRAAEAAINILKANASICFAVPDPLMPDPSKQPKNQLNPIGSLQELAIHHGWRLPEYTLSQEGGPAHKREYTTICRLESFMETGKGASKKQAKRNAAEKFLAKFSNISPENHISLTNVVGHSLGCTWHSLRNSPGEKINLLKRSLLSIPNTDYIQLLSEIAKEQGFNITYLDIDELSANGQYQCLAELSTSPITVCHGSGISCGNAQSDAAHNALQYLKIIAERK

SEQ ID NO: 140169 - protein, 200 aa, Artificial Sequence
  derived and/or modified sequence
MPDPSKQPKNQLNPIGSLQELAIHHGWRLPEYTLSQEGGPAHKREYTTICRLESFMETGKGASKKQAKRNAAEKFLAKFSNISPENHISLTNVVGHSLGCTWHSLRNSPGEKINLLKRSLLSIPNTDYIQLLSEIAKEQGFNITYLDIDELSANGQYQCLAELSTSPITVCHGSGISCGNAQSDAAHNALQYLKIIAERK

SEQ ID NO: 140170 - protein, 288 aa, Artificial Sequence
  derived and/or modified sequence
MITAKPGKTPIQVLHEYGMKTKNIPVYECERSDVQIHVPTFTFRVTVGDITCTGEGTSKKLAKHRAAEAAINILKANASICFAVPDPLMPDPSKQPKNQLNPIGSLQELAIHHGWRLPEYTLSQEGGPAHKREYTTICRLESFMETGKGASKKQAKRNAAEKFLAKFSNISPENHISLTNVVGHSLGCTWHSLRNSPGEKINLLKRSLLSIPNTDYIQLLSEIAKEQGFNITYLDIDELSANGQYQCLAELSTSPITVCHGSGISCGNAQSDAAHNALQYLKIIAERK

SEQ ID NO: 140171 - DNA, 942 bp, Artificial Sequence
  derived and/or modified sequence
atgagtcagtcgcgccaccgcgccgaggcacccccactagaacgcgaggactccggtacatttagcttgggtaaaatgatcactgccaagccaggtaagacaccgattcaggtcttgcatgaatatggaatgaagactaaaaacatccccgtgtacgagtgtgaacgatctgatgtccagatacacgtgcccacattcacttttagagtaacagtaggtgacattacttgcacaggggagggtacctctaagaagttggctaagcatagagcagccgaggccgccataaacattctcaaggcaaatgcctccatttgctttgcagtgcccgaccctctgatgcctgatccctccaaacagccgaagaatcaacttaacccgataggcagcctgcaagagctcgccatacaccatggctggaggttaccagagtatactctttcacaagagggaggccccgctcataaaagggaatacaccacaatttgtcgacttgagagttttatggagactggaaaaggggcttcaaaaaaacaggctaaaaggaatgccgcagagaaattcctggctaagttttcgaacatttcccccgagaaccacatctccctgaccaatgtcgttgggcatagcctgggctgcacatggcactccctcaggaattcaccaggcgagaaaatcaacctgcttaaacgtagtttgctgtcaatcccaaacacagactatattcaattgttgtcagagatagcaaaagaacagggttttaacattacataccttgacatcgatgagctcagcgcgaacggacagtaccagtgcctcgctgagctgagtacgagtcccattactgtctgtcacgggtccggcattagttgcggcaatgcacagagtgatgctgcacataacgccctgcaatacctgaaaattatcgcagaaaggaagtag

SEQ ID NO: 140172 - DNA, 942 bp, Artificial Sequence
  derived and/or modified sequence
atgagccagagccgccacagagctgaggccccacccctggagcgggaggacagcggcaccttcagcctgggcaagatgatcacagccaagccaggcaagacccccatccaggtgctgcacgagtatggcatgaagaccaagaacatccctgtgtatgaatgtgagaggagtgatgtgcagatccacgtgcccaccttcaccttccgggtgacagtgggggacatcacctgcaccggggagggcaccagcaagaagctggccaagcacagagctgctgaggccgccatcaacatcctgaaggccaatgccagcatctgctttgctgtgcctgaccccctgatgccagaccccagcaagcagcccaagaaccagctgaaccccatcggcagcctgcaggagctggccatccaccacggctggaggctgcctgagtacaccctgagccaggagggcggccctgcccacaagcgggagtacaccaccatctgccgcctggagagcttcatggagactggaaaaggagccagcaagaagcaggccaagagaaatgctgctgagaagttcctggccaagttcagcaacatcagccctgagaaccacatcagcctgaccaacgtggtgggccacagcctgggctgcacctggcacagcctgaggaacagccctggagagaagatcaacctgctgaagaggagcctgctgagcatccccaacacagactacatccagctgctgtctgagatcgccaaggagcagggcttcaacatcacctacctggacattgatgagctgagcgccaacggccagtaccagtgcctggccgagctgagcaccagccccatcaccgtgtgccacggcagcggcatcagctgtggaaatgcccagagtgatgctgcccacaatgccctgcagtacctgaagatcatcgccgagaggaagtag

SEQ ID NO: 140173 - DNA, 942 bp, Artificial Sequence
  derived and/or modified sequence
atgagccagagccggcaccgggccgaggccccccccctggagcgggaggactccggcacattttctttgggaaagatgataaccgctaagcctgggaagactccgattcaagtgctccacgagtatggcatgaagactaagaatattccagtgtacgagtgtgagaggtctgatgtgcagattcacgttcctacttttacatttcgagtgacggtgggggacatcacttgtaccggagagggcacctcaaagaagcttgcaaaacaccgagccgcagaagcagctatcaatattctcaaagcaaatgctagcatttgttttgccgtccctgaccctctaatgcctgatccttctaagcagccaaagaatcagctgaacccaattgggagtctgcaggaattggcgatacaccatggctggcggcttcctgaatatactctgtcccaggaagggggaccggcacataagagggagtacaccactatttgcagactagaatcctttatggaaacaggaaagggtgcatctaaaaagcaggcaaaaagaaatgcagccgaaaaattcttggccaagttttccaatatcagcccggagaaccacatctctctcactaatgtcgttggccattcactgggctgtacatggcacagcctgagaaattcgcccggggagaagattaacctgcttaagcggagtctgctgtcgatccccaatacggactacattcagctcctatccgagattgccaaggaacagggcttcaatatcacatatctcgacatcgacgagttaagcgctaatggacagtatcaatgccttgccgaattatctaccagtccaatcacagtctgccacggcagtgggatttcatgcggaaatgcacagtctgatgccgcccacaatgctctccagtatttgaagataattgccgagagaaagtag

SEQ ID NO: 140174 - DNA, 942 bp, Artificial Sequence
  derived and/or modified sequence
atgtcacagtccaggcaccgcgcagaggcacctccgctggagcgtgaggatagtggcacgttttcactggggaagatgatcaccgccaaacctggcaaaacccccatacaagtactccacgagtacggcatgaagaccaaaaacatacctgtatacgagtgcgagagatccgatgtccagattcacgtgccaacctttacgttccgcgtaacagtgggagacattacatgtactggcgaaggaacaagcaagaagctggccaagcacagagccgcagaggccgcaattaacattcttaaggcgaacgcgtctatctgtttcgctgtgcctgatccactaatgcctgaccccagtaagcaacctaagaatcagctgaatcctattgggtccctgcaggagctggcgatccaccacggctggcgcttacctgagtacaccctctcacaggagggtgggccagcccacaagcgagagtataccactatatgccgcttagagagtttcatggaaaccggcaaaggggcaagtaaaaaacaggcgaagagaaacgctgctgaaaagttcctagctaagtttagcaatatatctccagaaaaccacatctcactgacaaatgtggtaggccactctctggggtgtacctggcatagcctgcgtaattctcctggggagaagatcaatctcctgaagcgttcactcctgtcaatacctaatacagactatatacagctgttgtccgaaattgccaaggaacaaggcttcaatatcacatacttagatatcgacgagctgtccgcaaatgggcagtaccagtgtttggccgagctatccacctccccgattaccgtctgccatgggtctggaatatcttgcggtaatgcacagtcagacgctgcacataatgctctgcagtaccttaagattatcgcagagcgcaagtag

SEQ ID NO: 140175 - DNA, 1826 bp, Artificial Sequence
  derived and/or modified sequence
gcgagggggcgtagccggagctacggcaccaaggctccgcccccaccctgcctgccccctcgctggagcaacgcaagcaggaggcgggggagtcggaggaggtggcggcgctggagctcctcccggggaccagcgacccggggagcgagcacgtcgctccgcaccgctcttcctccagccgctgagccgtcccttctcgccatgtcccagagcaggcaccgcgccgaggccccgccgctggagcgcgaggacagtgggaccttcagtttggggaagatgataacagctaagccagggaaaacaccgattcaggtattacacgaatacggcatgaagaccaagaacatcccagtttatgaatgtgaaagatctgatgtgcaaatacacgtgcccactttcaccttcagagtaaccgttggtgacataacctgcacaggtgaaggtacaagtaagaagctggcgaaacatagagctgcagaggctgccataaacattttgaaagccaatgcaagtatttgctttgcagttcctgaccccttaatgcctgacccttccaagcaaccaaagaaccagcttaatcctattggttcattacaggaattggctattcatcatggctggagacttcctgaatataccctttcccaggagggaggacctgctcataagagagaatatactacaatttgcaggctagagtcatttatggaaactggaaagggggcatcaaaaaagcaagccaaaaggaatgctgctgagaaatttcttgccaaatttagtaatatttctccagagaaccacatttctttaacaaatgtagtaggacattctttaggatgtacttggcattccttgaggaattctcctggtgaaaagatcaacttactgaaaagaagcctccttagtattccaaatacagattacatccagctgcttagtgaaattgccaaggaacaaggttttaatataacatatttggatatagatgaactgagcgccaatggacaatatcaatgtcttgctgaactgtccaccagccccatcacagtctgtcatggctccggtatctcctgtggcaatgcacaaagtgatgcagctcacaatgctttgcagtatttaaagataatagcagaaagaaagtaaatctggagcaacttaaaaaatctttcagtagcacataaaaagttcccctctggccccttcccaagtaaaacttttaccgtagtgtttatgtcttgtttctaaatctcttcatagattccatcaacactccagatttaattatctcctcatagttgttattaagctctttttaatggcttcaactttgtatcagtatactgtatttataaactttgtaccacaagagagagtgtagcacccattttacagtgccatgcacatcagagaaagaaactgcatgtttgttgttgatgatgaaataaaaatgctagcgacagtctttcttactggtgcttaagctcttctttgcacaaagctttataaagggaattcaaaggaagccctttagaattagagtcttgagggacagcactaacaggcctttattaagtatgattgattgttaaatttcagggaacatgattggtctgctgtgtatttgaattcatgtaacaaagaactgttacgatgggattctgctcattttattaaaaagctactgacttgactgtcatcctgttcttgttagccattgtgaataagattttaatgttgataattctgttatttacatatctctaatttactttgaaattcaaaggtgaaaataaaaaatgatggcctaagtaaaatttacaaacata

SEQ ID NO: 140176 - DNA, 1616 bp, Artificial Sequence
  derived and/or modified sequence
gaggcgggggagtcggaggaggtggcggcgctggagctcctcccggggaccagcgacccggggagcgagcacgtcgctccgcaccgctcttcctccagccgctgagccgtcccttctcgccatgtcccagagcaggcaccgcgccgaggccccgccgctggagcgcgaggacagtgggaccttcagtttggggaagatgataacagctaagccagggaaaacaccgattcaggtattacacgaatacggcatgaagaccaagaacatcccagtttatgaatgtgaaagatctgatgtgcaaatacacgtgcccactttcaccttcagagtaaccgttggtgacataacctgcacaggtgaaggtacaagtaagaagctggcgaaacatagagctgcagaggctgccataaacattttgaaagccaatgcaagtatttgataaaatgggaattactaagctgtaatcaggcctaaagtggcctgacttaatacagagactttctcacttctccatcacaattatttgggtagcttcggcatgcagcattctttgcagttcctgaccccttaatgcctgacccttccaagcaaccaaagaaccagcttaatcctattggttcattacaggaattggctattcatcatggctggagacttcctgaatataccctttcccaggagggaggacctgctcataagagagaatatactacaatttgcaggctagagtcatttatggaaactggaaagggggcatcaaaaaagcaagccaaaaggaatgctgctgagaaatttcttgccaaatttagtaatatttctccagagaaccacatttctttaacaaatgtagtaggacattctttaggatgtacttggcattccttgaggaattctcctggtgaaaagatcaacttactgaaaagaagcctccttagtattccaaatacagattacatccagctgcttagtgaaattgccaaggaacaaggttttaatataacatatttggatatagatgaactgagcgccaatggacaatatcaatgtcttgctgaactgtccaccagccccatcacagtctgtcatggctccggtatctcctgtggcaatgcacaaagtgatgcagctcacaatgctttgcagtatttaaagataatagcagaaagaaagtaaatctggagcaacttaaaaaatctttcagtagcacataaaaagttcccctctggccccttcccaagtaaaacttttaccgtagtgtttatgtcttgtttctaaatctcttcatagattccatcaacactccagatttaattatctcctcatagttgttattaagctctttttaatggcttcaactttgtatcagtatactgtatttataaactttgtaccacaagagagagtgtagcacccattttacagtgccatgcacatcagagaaagaaactgcatgtttgttgttgatgatgaaataaaaatgctagcgacagtctttcttactggtgcttaagctcttctttgcacaaagctttataaagggaattcaaaggaagccctttagaattagagtcttgagggacagcactaacaggcctttattaagtatgattgattgt

SEQ ID NO: 140177 - DNA, 942 bp, Artificial Sequence
  derived and/or modified sequence
atgagccagagcagacacagagccgaggccccccccctggagagagaggacagcggcaccttcagcctgggcaagatgatcaccgccaagcccggcaagacccccatccaggtgctgcacgagtacggcatgaagaccaagaacatccccgtgtacgagtgcgagagaagcgacgtgcagatccacgtgcccaccttcaccttcagagtgaccgtgggcgacatcacctgcaccggcgagggcaccagcaagaagctggccaagcacagagccgccgaggccgccatcaacatcctgaaggccaacgccagcatctgcttcgccgtgcccgaccccctgatgcccgaccccagcaagcagcccaagaaccagctgaaccccatcggcagcctgcaggagctggccatccaccacggctggagactgcccgagtacaccctgagccaggagggcggccccgcccacaagagagagtacaccaccatctgcagactggagagcttcatggagaccggcaagggcgccagcaagaagcaggccaagagaaacgccgccgagaagttcctggccaagttcagcaacatcagccccgagaaccacatcagcctgaccaacgtggtgggccacagcctgggctgcacctggcacagcctgagaaacagccccggcgagaagatcaacctgctgaagagaagcctgctgagcatccccaacaccgactacatccagctgctgagcgagatcgccaaggagcagggcttcaacatcacctacctggacatcgacgagctgagcgccaacggccagtaccagtgcctggccgagctgagcaccagccccatcaccgtgtgccacggcagcggcatcagctgcggcaacgcccagagcgacgccgcccacaacgccctgcagtacctgaagatcatcgccgagagaaagtag

SEQ ID NO: 140178 - protein, 380 aa, Artificial Sequence
  derived and/or modified sequence
MGAAAAEAPLRLPAAPPLAFCCYTSVLLLFAFSLPGSRASNQPPGGGGGSGGDCPGGKGKSINCSELNVRESDVRVCDESSCKYGGVCKEDGDGLKCACQFQCHTNYIPVCGSNGDTYQNECFLRRAACKHQKEITVIARGPCYSDNGSGSGEGEEEGSGAEVHRKHSKCGPCKYKAECDEDAENVGCVCNIDCSGYSFNPVCASDGSSYNNPCFVREASCIKQEQIDIRHLGHCTDTDDTSLLGKKDDGLQYRPDVKDASDQREDVYIGNHMPCPENLNGYCIHGKCEFIYSTQKASCRCESGYTGQHCEKTDFSILYVVPSRQKLTHVLIAAIIGAVQIAIIVAIVMCITRKCPKNNRGRRQKQNLGHFTSDTSSRMV

SEQ ID NO: 140179 - DNA, 1143 bp, Artificial Sequence
  derived and/or modified sequence
atgggcgccgccgccgccgaggcccccctgagactgcccgccgccccccccctggccttctgctgctacaccagcgtgctgctgctgttcgccttcagcctgcccggcagcagagccagcaaccagccccccggcggcggcggcggcagcggcggcgactgccccggcggcaagggcaagagcatcaactgcagcgagctgaacgtgagagagagcgacgtgagagtgtgcgacgagagcagctgcaagtacggcggcgtgtgcaaggaggacggcgacggcctgaagtgcgcctgccagttccagtgccacaccaactacatccccgtgtgcggcagcaacggcgacacctaccagaacgagtgcttcctgagaagagccgcctgcaagcaccagaaggagatcaccgtgatcgccagaggcccctgctacagcgacaacggcagcggcagcggcgagggcgaggaggagggcagcggcgccgaggtgcacagaaagcacagcaagtgcggcccctgcaagtacaaggccgagtgcgacgaggacgccgagaacgtgggctgcgtgtgcaacatcgactgcagcggctacagcttcaaccccgtgtgcgccagcgacggcagcagctacaacaacccctgcttcgtgagagaggccagctgcatcaagcaggagcagatcgacatcagacacctgggccactgcaccgacaccgacgacaccagcctgctgggcaagaaggacgacggcctgcagtacagacccgacgtgaaggacgccagcgaccagagagaggacgtgtacatcggcaaccacatgccctgccccgagaacctgaacggctactgcatccacggcaagtgcgagttcatctacagcacccagaaggccagctgcagatgcgagagcggctacaccggccagcactgcgagaagaccgacttcagcatcctgtacgtggtgcccagcagacagaagctgacccacgtgctgatcgccgccatcatcggcgccgtgcagatcgccatcatcgtggccatcgtgatgtgcatcaccagaaagtgccccaagaacaacagaggcagaagacagaagcagaacctgggccacttcaccagcgacaccagcagcagaatggtgtag

SEQ ID NO: 140180 - DNA, 1143 bp, Artificial Sequence
  derived and/or modified sequence
atgggggctgccgcggctgaggcacccctgcgccttcctgccgctccgcccctggcattttgctgctacaccagcgtccttcttttgttcgcattctcattaccgggatctagagcctctaatcaaccccctggagggggaggagggtccggtggcgattgcccaggcggtaaaggaaagagtatcaactgttcagaactgaatgtaagagagtctgacgtgcgtgtgtgtgacgaatcaagttgtaagtatggcggcgtgtgcaaggaggacggcgacggcctgaaatgcgcgtgtcagtttcagtgtcataccaattatattcctgtgtgcggatctaacggagacacttatcagaacgagtgcttcttgagaagggctgcttgcaaacatcagaaagagattacagttatcgcgcggggcccttgctactcagataacgggagtggcagtggcgagggggaagaggagggaagcggcgctgaggtgcaccgcaaacacagcaagtgtggaccatgcaaatacaaagctgaatgcgatgaggatgcagaaaatgttggatgcgtctgcaacattgactgtagcgggtattcattcaatcccgtctgcgcaagcgacggctcatcatacaataatccatgttttgtgagagaagcatcctgtataaaacaggaacagatagacattaggcacttgggccattgtacagatactgatgatacttccctgctggggaagaaggacgacgggctgcaataccgtcccgacgtgaaggacgctagcgatcaacgggaggatgtgtatatcggcaatcacatgccttgccccgagaacttaaatggatactgtatccacggaaaatgcgaatttatatactcaacccagaaggctagctgccggtgcgagagtgggtacaccggccaacattgtgaaaaaacagactttagcatcctgtacgtcgtgccatcacggcaaaagctgacgcatgtgctaatagccgccattatcggcgctgtgcagatagcaattattgtagccatagtcatgtgtatcactagaaagtgccccaagaacaacaggggccgacgacagaagcagaacctggggcactttacctcagatacttcttctagaatggtgtag

SEQ ID NO: 140181 - DNA, 1143 bp, Artificial Sequence
  derived and/or modified sequence
atgggcgctgctgctgctgaggcccccctgcggctgcctgctgccccacccctggccttctgctgctacacctctgtgctgctgctgtttgccttcagcctgcccggcagccgggccagcaaccagcccccaggcggcggcggcggcagcggcggggactgccctgggggcaagggcaagagcatcaactgcagcgagctgaatgtgcgggagagtgatgtgcgggtgtgtgatgagagcagctgcaagtatggaggagtgtgcaaggaggatggagatggcctgaagtgtgcctgccagttccagtgccacaccaactacatccctgtgtgtggcagcaatggagacacctaccagaatgaatgcttcctgcggcgggccgcctgcaagcaccagaaggagatcaccgtcatcgcccggggcccctgctacagcgacaatggaagtggcagcggggagggggaggaggagggcagcggggctgaggtgcacaggaagcacagcaaatgtggcccctgcaagtacaaggccgagtgtgatgaagatgctgaaaatgtgggctgtgtgtgcaacatcgactgcagcggctacagcttcaaccctgtgtgtgccagtgatggcagcagctacaacaacccctgctttgtgcgggaggccagctgcatcaagcaggagcagattgacatccgccacctgggccactgcacagacacagatgacaccagcctgctgggcaagaaggatgatggcctgcagtacagaccagatgtgaaggatgccagtgaccagagagaagatgtgtacatcggcaaccacatgccctgcccagagaacctgaatggctactgcatccatggaaaatgtgagttcatctacagcacccagaaggccagctgccgctgtgagagcggctacacaggccagcactgtgagaagacagacttcagcatcctgtatgtggtgcccagccggcagaagctgacccacgtgctgattgctgccatcatcggggctgtgcagatcgccatcatcgtggccatcgtgatgtgcatcaccaggaagtgccccaagaacaacagaggccggcggcagaagcagaacctgggccacttcaccagtgacaccagcagcaggatggtgtag

SEQ ID NO: 140182 - DNA, 1143 bp, Artificial Sequence
  derived and/or modified sequence
atgggcgccgccgccgccgaggcccccctgcggctgcccgccgccccgcccctcgctttttgctgttatacaagtgtgctattgcttttcgccttcagccttccaggcagccgcgccagcaatcagcctcccggaggagggggtggcagcgggggagattgtcctgggggaaagggaaagtccatcaattgcagtgagctgaatgtgcgggagtctgacgtgcgagtgtgcgacgaatcctcctgcaaatatggcggcgtgtgcaaagaggatggggacggcctaaagtgcgcatgtcagttccagtgccatacaaattatatacctgtgtgtggttctaacggcgatacatatcagaacgaatgttttcttagaagggcggcgtgtaaacaccagaaggagatcactgtgatcgcaaggggtccttgctactctgacaacggctcaggctcgggcgaaggtgaggaggagggttcgggcgctgaggtccaccgtaagcatagcaagtgtggaccctgtaagtacaaagccgaatgcgatgaagatgcagagaacgtgggttgcgtgtgtaacatagactgttcggggtacagctttaaccctgtctgcgcctctgatggctcttcgtataacaacccctgtttcgtgcgggaggcatcctgcattaagcaggaacagatcgacatcagacatttaggccattgtactgatacagatgacacatctctgttggggaagaaagacgatggcctgcagtaccggccggacgtgaaggacgccagtgaccagagggaggacgtttatattggaaaccacatgccctgtcctgaaaatcttaatggctactgcatccacgggaagtgcgaattcatctattcgactcaaaaggcgagttgccgttgcgagtccggctatacaggtcagcattgtgagaagactgactttagtattctgtatgtggtgccatctaggcaaaaactgacccacgtgctgatcgctgccatcattggcgcggtgcaaattgccatcatagtggccatcgttatgtgcattacccgaaagtgtcctaagaataacagggggcggaggcaaaagcagaacttgggacatttcacttccgataccagctccagaatggtctag

SEQ ID NO: 140183 - DNA, 1143 bp, Artificial Sequence
  derived and/or modified sequence
atgggggctgcagctgcagaggcgccactccgactgcccgctgctccccctcttgcattctgttgctacacttctgtgttacttttgttcgcctttagccttcccggtagcagggcgtcaaaccaaccacctgggggagggggtggtagcgggggagattgcccagggggtaaaggcaagtctattaactgttccgagcttaacgttagggaaagcgacgtcagagtttgcgacgaatcatcatgtaagtatggcggagtctgcaaagaggacggtgacggtttgaaatgtgcctgccagtttcaatgccacacaaattacattcccgtctgcggcagcaatggagacacctaccagaatgaatgcttcctccgcagggcagcatgcaagcatcagaaagaaatcaccgtcatcgcgagagggccatgctactctgataacgggtctgggtctggcgaaggggaggaagagggatctggggctgaagtccataggaagcatagtaagtgcgggccatgtaagtataaagctgaatgtgatgaggacgcggagaatgttggttgcgtgtgtaacattgactgctccggctattcctttaatcctgtatgtgctagtgacggctctagctacaataacccatgttttgttcgtgaagcttcgtgcatcaaacaggaacagattgacatcagacacctcgggcactgtactgatacagacgataccagcctgctcggcaagaaggacgatggtcttcagtaccgcccagacgtgaaagacgcgtcagatcagcgtgaagacgtgtacattggcaatcacatgccttgccccgaaaaccttaatgggtactgtattcatggtaagtgtgaattcatctacagcacacagaaagcctcatgtagatgcgagagtggctacacaggccagcactgtgaaaagaccgatttctcaatcctgtacgtggtgccatcccggcaaaagctcacccacgtcctaattgctgctatcattggtgcagtgcaaatagccattattgtggcaatcgtcatgtgtattactagaaagtgtcccaagaataacagaggacgtcggcagaaacagaacctcggccattttacgagcgacacatctagtagaatggtctag

SEQ ID NO: 140184 - DNA, 2611 bp, Artificial Sequence
  derived and/or modified sequence
cggctccgtcacgcgcccctcaccgggcgggccggggtctttgtgacgcggtggcaacggccacggacacaaagggaaggcgaggaggcgagcaagaggctgggcctgcctccggcccgcgacccccgcccgccgcgcgcgcgcccgcccgctcccctcgccgcggtgtcccccacgccggctcgcaccctcgcgcgcacccttgcgcgcccgcgaccctcgcacgcgcccggacccgccgactccgtcccgagcgccgcgggcccgggcctggcggacgctgcgggtggggcggggatgctgacgggctgctccccggctcagcggcgcggctgctaggaggcaccgaggcagcggcggggctctgggcgcgcggctggatgcccccggcctgcggctccctgcgcttcccgccgtccaggggcaccagtcatgggcgccgcagccgctgaggcgccgctccggctgcctgccgcgcctccgctcgccttctgctgctacacgtcggtgcttctgctcttcgccttctctctgcccgggagccgcgcgtccaaccagcccccgggtggtggcggcggcagcggcggggactgtcccggcggcaaaggcaagagcatcaactgctcagaattaaatgtgagggagtctgacgtaagagtttgtgatgagtcatcatgtaaatatggaggagtctgtaaagaagatggagatggtttgaaatgtgcatgccaatttcagtgccatacaaattatattcctgtctgtggatcaaatggggacacttatcaaaatgaatgctttctcagaagggctgcttgtaagcaccagaaagagataacagtaatagcaagaggaccatgctactctgataatggatctggatctggagaaggagaagaggaagggtcaggggcagaagttcacagaaaacactccaagtgtggaccctgcaaatataaagctgagtgtgatgaagatgcagaaaatgttgggtgtgtatgtaatatagattgcagtggatacagttttaatcctgtgtgtgcttctgatgggagttcctataacaatccctgttttgttcgagaagcatcttgtataaagcaagaacaaattgatataaggcatcttggtcattgcacagatacagatgacactagtttgttgggaaagaaagatgatggactacaatatcgaccagatgtgaaagatgctagtgatcaaagagaagatgtttatattggaaaccacatgccttgccctgaaaacctcaatggttactgcatccatggaaaatgtgaattcatctattctactcagaaggcttcttgtagatgtgaatctggctacactggacagcactgtgaaaagacagactttagtattctctatgtagtgccaagtaggcaaaagctcactcatgttcttattgcagcaattattggagctgtacagattgccatcatagtagcaattgtaatgtgcataacaagaaaatgccccaaaaacaatagaggacgtcgacagaagcaaaacctaggtcattttacttcagatacgtcatccagaatggtttaaactgatgacttttatatgtacactgaccatgtgatgtacatttattatgtctttttttaaagaatggaaatatttatttcagaggccttatttttggacatttttagtgtagtactgttggctcgtatttagaatattcagctacgacagttttggactgtttagtagtctttgttttatgtttttaaatacagaaattgctttcacaaatttgtaccacatggtaattctaagacttgttctttacccatggaatgtaatatttttgcaaagatggactacttcacaaatggttataaagtcatatccacttcttccacaatgaccacagcaaatgaccaagcatgaactaaaggtaaagatgtttacagattacttttcttacaaaaaaaatctagaagacactgtgtttaaatagatatttaaatgtttttgagatttagtaactgattttttagacactgcctatcgcatgaactgtaaagctgtgtgtattaggtgtaaaatatttataagatatatggactggggaatttgattattcctccctttgaaaaaatagtcctaataatttgaacaaatatgttagtaatgatggaacagatcaatgaaaagtagatatagatattgtgaaaataggctgtttaacaaacagattggaataaagcctattctaccagttaaactactttaatacacattcatttttaaagaaaatgtttgttttaacataaataaacaaatcgtatcagtgtttgtgaataaaatacaaaaatgattgttaatgattggtgctcttaaagtgagcttaaaatttatccaagacgtatatccaaatttgtcctgtagtaatagattaatattcatagattgttggtgtttaaagatctgaagtgtgagtagaatgtattcagctgtttaacatgtagtttagatattcaaaagtatgcatgtagaatttaaagaatatgttaaaaattattaattttaatattttgtttggaaaagcatgttataatataatgttttcactata

SEQ ID NO: 140185 - protein, 128 aa, Artificial Sequence
  derived and/or modified sequence
MRTALLLLAALAVATGPALTLRCHVCTSSSNCKHSVVCPASSRFCKTTNTVEPLRGNLVKKDCAESCTPSYTLQGQVSSGTSSTQCCQEDLCNEKLHNAAPTRTALAHSALSLGLALSLLAVILAPSL

SEQ ID NO: 140186 - DNA, 387 bp, Artificial Sequence
  derived and/or modified sequence
atgagaacagcactcctgctgctcgctgcactggccgtggccaccggcccagcactaacactacgatgtcatgtctgcacttcttcctccaattgcaagcattccgtcgtgtgtcctgcaagttcccgcttctgcaaaactactaataccgtggaacctctgcgcggcaatctggtcaagaaggactgcgcagaatcctgtactccatcatacaccctgcaagggcaagtctccagcggaacctcatcgacccagtgctgtcaggaagatctctgtaacgaaaaactgcataacgccgctcccacacgaactgccttggcccacagtgccctcagtttgggtctggctttatctctcctggccgtgatcctcgctccatccctttag

SEQ ID NO: 140187 - DNA, 387 bp, Artificial Sequence
  derived and/or modified sequence
atgaggacagccctgctgctgctggccgccctggccgtggccactggacctgccctgaccctgcgctgccacgtgtgcaccagcagcagcaactgcaagcacagcgtggtgtgcccagccagcagccgcttctgcaagaccaccaacacagtggagcccctgcggggcaacctggtgaagaaggactgtgccgagagctgcacccccagctacaccctgcagggccaggtgagcagcggcaccagcagcacccagtgctgccaggaggacctgtgcaatgagaagctgcacaatgctgcccccaccaggacagccctggcccacagcgccctgagcctgggcctggccctgagcctgctggccgtcatcctggcccccagcctgtag

SEQ ID NO: 140188 - DNA, 804 bp, Artificial Sequence
  derived and/or modified sequence
gcccacccccgcccagcccgtgcctataaggccttggcaatgcaggggcccgcactgctcccagacgacatcagagatgaggacagcattgctgctccttgcagccctggctgtggctacagggccagcccttaccctgcgctgccacgtgtgcaccagctccagcaactgcaagcattctgtggtctgcccggccagctctcgcttctgcaagaccacgaacacagtggagcctctgagggggaatctggtgaagaaggactgtgcggagtcgtgcacacccagctacaccctgcaaggccaggtcagcagcggcaccagctccacccagtgctgccaggaggacctgtgcaatgagaagctgcacaacgctgcacccacccgcaccgccctcgcccacagtgccctcagcctggggctggccctgagcctcctggccgtcatcttagcccccagcctgtgaccttccccccagggaaggcccctcatgcctttccttccctttctctggggattccacacctctcttccccagccgcaacgggggtgccaggagccccaggctgagggcttccccgaaagtctgggaccaggtccaggtgggcatggaatgctgatgacttggagcaggccccacagaccccacagaggatgaagccaccccacagaggatgcagcccccagctgcatggaaggtggaggacagaagccctgtggatccccggatttcacactccttctgttttgttgccgtttatttttgtactcaaatctctacatggagataaatgatttaaaccagtg

SEQ ID NO: 140189 - DNA, 387 bp, Artificial Sequence
  derived and/or modified sequence
atgcggaccgccctgctgctgctggccgccctggccgtggccaccgggcccgcattaaccctcagatgccacgtatgtacgagctcctctaattgcaaacacagcgtggtgtgcccagcatcgtctcgcttctgtaagacaacgaatacagtagagccactccgagggaatctggtgaaaaaagactgcgctgagagctgcacaccatcatatacgctccaggggcaggtctcaagcggaacatctagcacacagtgttgccaggaggatctatgtaacgagaaactacacaacgcagcgccaactaggactgccctggcccatagcgccctgtccttggggctcgccctgagtcttttagccgtcattttagccccctcactctag

SEQ ID NO: 140190 - DNA, 387 bp, Artificial Sequence
  derived and/or modified sequence
atgcgaaccgctctgttgctgctggctgctcttgcagtggccaccgggccagcccttacactaagatgtcacgtttgcacgtcatcatcaaactgcaagcactctgttgtgtgccccgcatcctcgaggttctgtaagacaacgaataccgtggaacccctcaggggaaaccttgtgaaaaaagattgcgcggagagctgtacacccagctacactttacaagggcaggtgtcgtcaggaacctctagcacgcagtgttgtcaggaggatctgtgcaatgaaaaacttcacaatgccgcacctactagaaccgcactggctcacagcgccctatctctgggccttgccctaagtctcttggctgtgattcttgcaccttccctgtag

SEQ ID NO: 140191 - DNA, 387 bp, Artificial Sequence
  derived and/or modified sequence
atgagaaccgccctgctgctgctggccgccctggccgtggccaccggccccgccctgaccctgagatgccacgtgtgcaccagcagcagcaactgcaagcacagcgtggtgtgccccgccagcagcagattctgcaagaccaccaacaccgtggagcccctgagaggcaacctggtgaagaaggactgcgccgagagctgcacccccagctacaccctgcagggccaggtgagcagcggcaccagcagcacccagtgctgccaggaggacctgtgcaacgagaagctgcacaacgccgcccccaccagaaccgccctggcccacagcgccctgagcctgggcctggccctgagcctgctggccgtgatcctggcccccagcctgtag

SEQ ID NO: 140192 - protein, 317 aa, Artificial Sequence
  derived and/or modified sequence
MRRASRDYTKYLRGSEEMGGGPGAPHEGPLHAPPPPAPHQPPAASRSMFVALLGLGLGQVVCSVALFFYFRAQMDPNRISEDGTHCIYRILRLHENADFQDTTLESQDTKLIPDSCRRIKQAFQGAVQKELQHIVGSQHIRAEKAMVDGSWLDLAKRSKLEAQPFAHLTINATDIPSGSHKVSLSSWYHDRGWAKISNMTFSNGKLIVNQDGFYYLYANICFRHHETSGDLATEYLQLMVYVTKTSIKIPSSHTLMKGGSTKYWSGNSEFHFYSINVGGFFKLRSGEEISIEVSNPSLLDPDQDATYFGAFKVRDID

SEQ ID NO: 140193 - DNA, 954 bp, Artificial Sequence
  derived and/or modified sequence
atgagaagagccagcagagactacaccaagtacctgagaggcagcgaggagatgggcggcggccccggcgccccccacgagggccccctgcacgccccccccccccccgccccccaccagccccccgccgccagcagaagcatgttcgtggccctgctgggcctgggcctgggccaggtggtgtgcagcgtggccctgttcttctacttcagagcccagatggaccccaacagaatcagcgaggacggcacccactgcatctacagaatcctgagactgcacgagaacgccgacttccaggacaccaccctggagagccaggacaccaagctgatccccgacagctgcagaagaatcaagcaggccttccagggcgccgtgcagaaggagctgcagcacatcgtgggcagccagcacatcagagccgagaaggccatggtggacggcagctggctggacctggccaagagaagcaagctggaggcccagcccttcgcccacctgaccatcaacgccaccgacatccccagcggcagccacaaggtgagcctgagcagctggtaccacgacagaggctgggccaagatcagcaacatgaccttcagcaacggcaagctgatcgtgaaccaggacggcttctactacctgtacgccaacatctgcttcagacaccacgagaccagcggcgacctggccaccgagtacctgcagctgatggtgtacgtgaccaagaccagcatcaagatccccagcagccacaccctgatgaagggcggcagcaccaagtactggagcggcaacagcgagttccacttctacagcatcaacgtgggcggcttcttcaagctgagaagcggcgaggagatcagcatcgaggtgagcaaccccagcctgctggaccccgaccaggacgccacctacttcggcgccttcaaggtgagagacatcgactag

SEQ ID NO: 140194 - DNA, 954 bp, Artificial Sequence
  derived and/or modified sequence
atgaggagagcgagccgcgactacaccaagtacctccgaggcagtgaagagatgggaggcgggcctggcgctcctcacgaaggtccgttacacgcgccccctcccccagcgccacaccaaccccctgccgcctcacgctccatgttcgtagccctcttgggcttgggactcgggcaggtcgtctgctcagtggccctgtttttttatttcagagcccaaatggacccgaatcggatttctgaggacggcacacattgcatttatcggatcttacggctccacgagaatgccgactttcaggataccaccctagagagtcaagacaccaaacttattcccgactcctgtcggcggattaagcaggcttttcagggcgctgtgcagaaagagttgcagcacatagtgggctcacagcacatccgtgctgagaaggccatggtggatgggtcatggctcgatttggccaagcgcagcaaactcgaggcccagccgtttgctcacctcaccattaatgcaacagacatcccaagtgggtcccacaaggtttctctatcgtcatggtatcatgaccgcggctgggctaaaattagcaacatgaccttttcgaatggaaagctcatagtcaaccaggatgggttctattacttatacgccaatatttgtttccggcaccacgaaaccagtggagatcttgcgaccgagtatctccaactcatggtctacgtcaccaagacctccatcaagattccttcatcccacacgttaatgaaaggcggttccacgaaatattggtctggcaatagtgagtttcacttctattcaattaacgttggaggtttctttaaactcagaagcggagaagaaatctctattgaggtgagcaatccatcgctgctggaccctgatcaggacgcgacttatttcggggccttcaaagtgagagatatcgactag

SEQ ID NO: 140195 - DNA, 954 bp, Artificial Sequence
  derived and/or modified sequence
atgaggcgggccagccgggactacaccaagtacctgcggggcagcgaggagatgggcggcggccctggggcccctcatgagggccccctgcacgcccctcctcctccagccccccaccagcccccagctgccagccgctccatgtttgtggccctgctgggcctgggcctgggccaggtggtgtgcagcgtggccctcttcttctacttccgggcccagatggaccccaaccgcatcagtgaagatggcacccactgcatctaccgcatcctgcggctgcatgaaaatgctgacttccaggacaccaccctggagagccaggacaccaagctgatcccagacagctgccgccgcatcaagcaggccttccagggcgctgtgcagaaggagctgcagcacatcgtgggcagccagcacatccgggcagagaaggccatggtggatggctcctggctggacctggccaagaggagcaagctggaggcccagccctttgcccacctgaccatcaatgccacagacatccccagcggcagccacaaggtgtccctgagctcctggtaccatgaccggggctgggccaagatcagcaacatgaccttcagcaatggcaagctgattgtgaaccaggacggcttctactacctgtatgccaacatctgcttccgccaccacgagaccagcggggacctggccacagagtacctgcagctgatggtgtatgtgaccaagaccagcatcaagatccccagcagccacaccctgatgaagggcggcagcaccaagtactggagcggcaacagcgagttccacttctacagcatcaacgtgggcggcttcttcaagctgcggtctggagaggagatcagcattgaggtgagcaaccccagcctgctggaccctgaccaggatgccacctactttggagccttcaaggtgcgggacatcgactag

SEQ ID NO: 140196 - DNA, 954 bp, Artificial Sequence
  derived and/or modified sequence
atgcggcgggccagccgggactacaccaagtacctgcggggcagcgaggagatgggtggagggccaggtgctccccacgagggccctttgcacgcgcctccacctcctgctccacaccagcccccagctgctagccgctcaatgtttgttgctctcttgggcttgggtcttggacaggttgtgtgttccgtggctctcttcttctacttcagagctcagatggacccaaataggataagcgaggatggtacacactgtatttaccgaattctgcgcctgcacgaaaacgccgattttcaggatacaacactcgagagtcaggataccaaattgatccctgattcatgccgccgcattaaacaggccttccagggcgctgtgcaaaaggagcttcagcacattgtcggaagccaacatattcgggcagaaaaagcaatggtcgacggatcatggctggatctggcgaaaagatctaaattagaagcccagccatttgcccacctcaccatcaacgccaccgacatcccctccggctcccacaaggtcagcctgagcagctggtaccacgatcgaggatgggccaagatttcaaatatgacattcagtaacgggaaattgatcgtaaatcaggatggcttctactatctgtacgccaacatatgctttagacaccacgagaccagcggcgacctcgccaccgagtatctgcagttgatggtgtatgtgaccaaaacatccattaaaatccccagctcccatactttgatgaaggggggctcaacaaagtactggtctggcaactcagagtttcatttctatagtattaatgtcggtggttttttcaagttacgctccggtgaggagatctccattgaggtgtcgaatcccagtctgctggaccctgaccaagatgcaacatacttcggcgctttcaaagtgagggacatagactag

SEQ ID NO: 140197 - DNA, 954 bp, Artificial Sequence
  derived and/or modified sequence
atgagaagggcatcgcgggattacaccaagtacctcagaggctcagaggaaatgggaggagggccaggtgcccctcatgaaggccctttgcacgctccaccacctcccgctccccaccaacctcccgctgcaagtcgcagcatgtttgtggctctcctgggacttgggctgggtcaggtcgtgtgtagcgtggctctgttcttttacttccgcgcacagatggaccccaacaggattagcgaagatggaactcattgcatttatcggatactgcggctccatgagaacgccgatttccaggatactaccctggagagccaggacacgaagctgatccctgatagctgcagaaggataaaacaggcttttcagggcgctgtgcagaaggagttgcagcacatcgtcggctcgcaacacatacgagctgagaaggcgatggtagatggatcctggctggatctagcaaagaggagtaagctagaggcacagccgttcgcccacctgacaattaatgcaacagatataccctctgggtcccacaaggtcagtttaagtagctggtaccacgatcgcggatgggccaaaatttctaacatgacattctctaacggcaaacttatcgtcaaccaggatgggttctattatctctacgccaatatttgctttcgccaccacgaaaccagtggggatctcgccaccgaatacttacagctgatggtgtatgttacaaaaacttcaatcaagatccctagctcccacactctgatgaagggagggtccaccaagtactggtctgggaactcagagttccacttttactctattaacgtgggaggattttttaaacttaggtccggggaagaaatatccatagaagtgtcgaaccccagcttactggaccctgaccaagacgcaacatactttggagcgttcaaagtccgggatatcgattag

SEQ ID NO: 140198 - DNA, 2195 bp, Artificial Sequence
  derived and/or modified sequence
cccgctcgcccgcgcgccccaggacccaaagccgggctccaagtcggcgccccacgtcgaggctccgccgcagcctccggagttggccgcagacaagaaggggagggagcgggagagggaggagagctccgaagcgagagggccgagcgccatgcgccgcgccagcagagactacaccaagtacctgcgtggctcggaggagatgggcggcggccccggagccccgcacgagggccccctgcacgccccgccgccgcctgcgccgcaccagccccctgccgcctcccgctccatgttcgtggccctcctggggctggggctgggccaggttgtctgcagcgtcgccctgttcttctatttcagagcgcagatggatcctaatagaatatcagaagatggcactcactgcatttatagaattttgagactccatgaaaatgcagattttcaagacacaactctggagagtcaagatacaaaattaatacctgattcatgtaggagaattaaacaggcctttcaaggagctgtgcaaaaggaattacaacatatcgttggatcacagcacatcagagcagagaaagcgatggtggatggctcatggttagatctggccaagaggagcaagcttgaagctcagccttttgctcatctcactattaatgccaccgacatcccatctggttcccataaagtgagtctgtcctcttggtaccatgatcggggttgggccaagatctccaacatgacttttagcaatggaaaactaatagttaatcaggatggcttttattacctgtatgccaacatttgctttcgacatcatgaaacttcaggagacctagctacagagtatcttcaactaatggtgtacgtcactaaaaccagcatcaaaatcccaagttctcataccctgatgaaaggaggaagcaccaagtattggtcagggaattctgaattccatttttattccataaacgttggtggattttttaagttacggtctggagaggaaatcagcatcgaggtctccaacccctccttactggatccggatcaggatgcaacatactttggggcttttaaagttcgagatatagattgagccccagtttttggagtgttatgtatttcctggatgtttggaaacattttttaaaacaagccaagaaagatgtatataggtgtgtgagactactaagaggcatggccccaacggtacacgactcagtatccatgctcttgaccttgtagagaacacgcgtatttacagccagtgggagatgttagactcatggtgtgttacacaatggtttttaaattttgtaatgaattcctagaattaaaccagattggagcaattacggggtgaccttatgagaaactgcatgtgggctatgggaggggttggtccctggtcatgtgccccttcgcagctgaagtggagagggtgtcatctagcgcaattgaaggatcatctgaaggggcaaattcttttgaattgttacatcatgctggaacctgcaaaaaatactttttctaatgaggagagaaaatatatgtatttttatataatatctaaagttatatttcagatgtaatgttttctttgcaaagtattgtaaattatatttgtgctatagtatttgattcaaaatatttaaaaatgtcttgctgttgacatatttaatgttttaaatgtacagacatatttaactggtgcactttgtaaattccctggggaaaacttgcagctaaggaggggaaaaaaatgttgtttcctaatatcaaatgcagtatatttcttcgttctttttaagttaatagattttttcagacttgtcaagcctgtgcaaaaaaattaaaatggatgccttgaataataagcaggatgttggccaccaggtgcctttcaaatttagaaactaattgactttagaaagctgacattgccaaaaaggatacataatgggccactgaaatctgtcaagagtagttatataattgttgaacaggtgtttttccacaagtgccgcaaattgtaccttttttgttttttcaaaatagaaaagttattagtggtttatcagcaaaaaagtccaattttaatttagtaaatgttatcttatactgtacaataaaaacattgcctttgaatgttaattttttggtacaaaaataaatttatatgaaaa

SEQ ID NO: 140199 - DNA, 2198 bp, Artificial Sequence
  derived and/or modified sequence
cgctcgcccgcgcgccccaggacccaaagccgggctccaagtcggcgccccacgtcgaggctccgccgcagcctccggagttggccgcagacaagaaggggagggagcgggagagggaggagagctccgaagcgagagggccgagcgccatgcgccgcgccagcagagactacaccaagtacctgcgtggctcggaggagatgggcggcggccccggagccccgcacgagggccccctgcacgccccgccgccgcctgcgccgcaccagccccctgccgcctcccgctccatgttcgtggccctcctggggctggggctgggccaggttgtctgcagcgtcgccctgttcttctatttcagagcgcagatggatcctaatagaatatcagaagatggcactcactgcatttatagaattttgagactccatgaaaatgcagattttcaagacacaactctggagagtcaagatacaaaattaatacctgattcatgtaggagaattaaacaggcctttcaaggagctgtgcaaaaggaattacaacatatcgttggatcacagcacatcagagcagagaaagcgatggtggatggctcatggttagatctggccaagaggagcaagcttgaagctcagccttttgctcatctcactattaatgccaccgacatcccatctggttcccataaagtgagtctgtcctcttggtaccatgatcggggttgggccaagatctccaacatgacttttagcaatggaaaactaatagttaatcaggatggcttttattacctgtatgccaacatttgctttcgacatcatgaaacttcaggagacctagctacagagtatcttcaactaatggtgtacgtcactaaaaccagcatcaaaatcccaagttctcataccctgatgaaaggaggaagcaccaagtattggtcagggaattctgaattccatttttattccataaacgttggtggattttttaagttacggtctggagaggaaatcagcatcgaggtctccaacccctccttactggatccggatcaggatgcaacatactttggggcttttaaagttcgagatatagattgagccccagtttttggagtgttatgtatttcctggatgtttggaaacattttttaaaacaagccaagaaagatgtatataggtgtgtgagactactaagaggcatggccccaacggtacacgactcagtatccatgctcttgaccttgtagagaacacgcgtatttacagccagtgggagatgttagactcatggtgtgttacacaatggtttttaaattttgtaatgaattcctagaattaaaccagattggagcaattacggggtgaccttatgagaaactgcatgtgggctatgggaggggttggtccctggtcatgtgccccttcgcagctgaagtggagagggtgtcatctagcgcaattgaaggatcatctgaaggggcaaattcttttgaattgttacatcatgctggaacctgcaaaaaatactttttctaatgaggagagaaaatatatgtatttttatataatatctaaagttatatttcagatgtaatgttttctttgcaaagtattgtaaattatatttgtgctatagtatttgattcaaaatatttaaaaatgtcttgctgttgacatatttaatgttttaaatgtacagacatatttaactggtgcactttgtaaattccctggggaaaacttgcagctaaggaggggaaaaaaatgttgtttcctaatatcaaatgcagtatatttcttcgttctttttaagttaatagattttttcagacttgtcaagcctgtgcaaaaaaattaaaatggatgccttgaataataagcaggatgttggccaccaggtgcctttcaaatttagaaactaattgactttagaaagctgacattgccaaaaaggatacataatgggccactgaaatctgtcaagagtagttatataattgttgaacaggtgtttttccacaagtgccgcaaattgtaccttttttgttttttcaaaatagaaaagttattagtggtttatcagcaaaaaagtccaattttaatttagtaaatgttatcttatactgtacaataaaaacattgcctttgaatgttaattttttggtacaaaaataaatttatatgaaaacctgc

SEQ ID NO: 140200 - DNA, 818 bp, Artificial Sequence
  derived and/or modified sequence
agcctccggagttggccgcagacaagaaggggctgggccaggttgtctgcagcgtcgccctgttcttctatttcagagcgcagatggatcctaatagaatatcagaagatggcactcactgcatttatagaattttgagactccatgaaaatgcagattttcaagacacaactctggagagtcaagatacaaaattaatacctgattcatgtaggagaattaaacaggcctttcaaggagctgtgcaaaaggaattacaacatatcgttggatcacagcacatcagagcagagaaagcgatggtggatggctcatggttagatctggccaagaggagcaagcttgaagctcagccttttgctcatctcactattaatgccaccgacatcccatctggttcccataaagtgagtctgtcctcttggtaccatgatcggggttgggccaagatctccaacatgacttttagcaatggaaaactaatagttaatcaggatggcttttattacctgtatgccaacatttgctttcgacatcatgaaacttcaggagacctagctacagagtatcttcaactaatggtgtacgtcactaaaaccagcatcaaaatcccaagttctcataccctgatgaaaggaggaagcaccaagtattggtcagggaattctgaattccatttttattccataaacgttggtggattttttaagttacggtctggagaggaaatcagcatcgaggtctccaacccctccttactggatccggatcaggatgcaacatactttggggcttttaaagttcgagatatagattga

SEQ ID NO: 140201 - protein, 241 aa, Artificial Sequence
  derived and/or modified sequence
MRTADGGEPAGASSPAGRVDGGLQMGSERMEMRKRQMPAAQDTPGAAPGQPGAGSRGSNACCFCWCCCCSCSCLTVRNQEDQRPTIASHELRADLPTWEESPAPTLEEVNAWAQSFDKLMVTPAGRNAFREFLRTEFSEENMLFWMACEELKKEANKNIIEEKARIIYEDYISILSPKEVSLDSRVREVINRNMVEPSQHIFDDAQLQIYTLMHRDSYPRFMNSAVYKDLLQSLSEKSIEA

SEQ ID NO: 140202 - DNA, 726 bp, Artificial Sequence
  derived and/or modified sequence
atgagaaccgccgacggcggcgagcccgccggcgccagcagccccgccggcagagtggacggcggcctgcagatgggcagcgagagaatggagatgagaaagagacagatgcccgccgcccaggacacccccggcgccgcccccggccagcccggcgccggcagcagaggcagcaacgcctgctgcttctgctggtgctgctgctgcagctgcagctgcctgaccgtgagaaaccaggaggaccagagacccaccatcgccagccacgagctgagagccgacctgcccacctgggaggagagccccgcccccaccctggaggaggtgaacgcctgggcccagagcttcgacaagctgatggtgacccccgccggcagaaacgccttcagagagttcctgagaaccgagttcagcgaggagaacatgctgttctggatggcctgcgaggagctgaagaaggaggccaacaagaacatcatcgaggagaaggccagaatcatctacgaggactacatcagcatcctgagccccaaggaggtgagcctggacagcagagtgagagaggtgatcaacagaaacatggtggagcccagccagcacatcttcgacgacgcccagctgcagatctacaccctgatgcacagagacagctaccccagattcatgaacagcgccgtgtacaaggacctgctgcagagcctgagcgagaagagcatcgaggcctag

SEQ ID NO: 140203 - DNA, 726 bp, Artificial Sequence
  derived and/or modified sequence
atgaggacagcagacggcggcgagccagccggcgccagttcgccggccggcagggtggatggtggactccagatggggtcagagcgcatggaaatgcggaaacggcagatgcctgccgcccaggacacacccggggccgcccccggtcaaccaggggcaggtagtagaggctcaaatgcgtgttgtttttgttggtgctgctgttgcagttgttcttgcctcaccgtgagaaaccaggaggaccagcgtccaaccatagcgtctcacgagttgagggcagacctcccaacttgggaagagtcacccgcgcctaccctcgaggaggtgaatgcctgggcccaaagcttcgacaagcttatggtgacccccgccggtaggaatgcatttcgtgagttcctgagaaccgaattcagcgaggagaatatgttgttttggatggcctgtgaggagcttaagaaggaggccaacaagaacatcattgaagagaaggccagaattatatatgaggactatatttcaattctgagtcccaaagaagtgtcacttgattcacgcgtcagggaggtcataaatcggaacatggtcgaaccgtcccagcatatctttgacgatgcacagttgcagatttatacattgatgcatagggattcctacccgaggttcatgaactccgcagtgtataaggacctactgcaaagcctgtctgagaaatccatcgaagcttag

SEQ ID NO: 140204 - DNA, 726 bp, Artificial Sequence
  derived and/or modified sequence
atgaggacagcagatggaggagagcctgctggggccagcagccctgctggccgggtggatggcggcctgcagatgggcagcgagaggatggagatgaggaagaggcagatgcctgctgcccaggacacccctggggccgcccctggccagcctggagctggcagccggggcagcaatgcctgctgcttctgctggtgctgctgctgcagctgcagctgcctgactgtgaggaaccaggaggaccagaggcccaccatcgccagccatgagctgcgggctgacctgcccacctgggaggagagccctgcccccaccctggaggaggtgaatgcctgggcccagagctttgacaagctgatggtgaccccagctggaagaaatgccttccgggagttcctgaggacagagttcagcgaggagaacatgctgttctggatggcctgtgaggagctgaagaaggaggccaacaagaacatcatcgaggagaaggcccgcatcatctatgaggactacatcagcatcctgagccccaaggaggtgtccctggacagccgggtgcgggaggtgatcaacagaaacatggtggagcccagccagcacatctttgatgatgcccagctgcagatctacaccctgatgcaccgggacagctacccccgcttcatgaacagcgctgtgtacaaggacctgctgcagagcctgtctgagaagagcattgaggcctag

SEQ ID NO: 140205 - DNA, 726 bp, Artificial Sequence
  derived and/or modified sequence
atgcggaccgccgacggcggcgagcccgccggcgccagcagccccgcggggcgagtggacggcggactgcagatgggctctgagcgaatggagatgcggaagcggcagatgcccgctgctcaggatacccctggcgccgcccccggccagccgggagctggctcaagagggagcaacgcatgctgtttctgttggtgctgctgctgtagctgcagctgccttacagttcgtaaccaagaggaccaacggcctactattgcttctcacgagctgagagctgacctgcccacctgggaagaatcaccggcccccacgctcgaggaagttaatgcttgggcgcagagcttcgataaactgatggtgactcccgcagggcgaaatgcgttccgtgagttcttgcgcaccgagttttccgaagagaatatgctattctggatggcctgcgaggaactcaaaaaagaagctaataagaatattatcgaagaaaaagctagaattatctacgaagattacatctctatattgtcccccaaggaagtgagcctcgactccagggtcagagaggtaataaatcggaatatggttgagccctcccaacacatcttcgacgatgcccagctacagatatacactctgatgcacagggacagttatcctcgcttcatgaactcagccgtgtacaaggatcttctgcagtctctttctgagaagagcatcgaagcttag

SEQ ID NO: 140206 - DNA, 726 bp, Artificial Sequence
  derived and/or modified sequence
atgcgaactgctgatggaggagagccagctggcgcttcttcccccgcaggtcgcgtggatggaggcctacagatggggtctgaacgcatggagatgcggaagaggcagatgcccgcagcgcaggatacacctggggcagcccctggccaaccaggggcaggctctaggggaagcaacgcatgttgcttctgttggtgctgttgctgctcctgctcatgcttgaccgtcagaaaccaggaagaccaacgtcctaccattgcatcccacgagcttcgcgcagatctgcctacctgggaggagtcccccgctcctacgttggaagaggtgaatgcttgggcccagtccttcgacaaacttatggtcacccccgctggaaggaacgcctttagggaattcttgcggaccgagttttccgaggaaaatatgcttttttggatggcttgtgaggagctgaagaaggaagcaaataagaatatcatagaggagaaggctcgcataatctacgaggactatatctccatcttaagtcccaaagaggtttccctggatagccgcgtccgagaagtgataaataggaacatggtcgagccatcccagcacattttcgacgacgcacaacttcagatctacacgctgatgcatagggactcctacccaagatttatgaattccgccgtgtacaaggatctgctacagagcctgagcgaaaagagtatcgaggcctag

SEQ ID NO: 140207 - DNA, 1664 bp, Artificial Sequence
  derived and/or modified sequence
gggagaagagggctagagcaaagaccgagagccggagaaaggcgaaaggcgcggtgagcaatcgccgacgtagagagggcagccctccgcgctgcaatattgagaaggcacccgcgggacgcatgcgcacggcggacggaggcgagccggccggggcttcctccccggccggcagggtggacggtgggctccagatgggatcagagcggatggagatgcggaagcggcagatgcccgccgcccaggacacaccaggcgccgccccaggccagcccggagcggggagtcgcgggtccaacgcatgctgcttctgctggtgctgctgttgtagctgctcgtgtctcactgttagaaaccaggaagatcagaggcccacaatagcttcccacgaactcagagcagatcttccaacctgggaagaaagccctgctcctactctggaagaagtcaacgcctgggctcagtcatttgacaaattaatggtcactccagcaggaaggaatgcattccgtgaattcctccgaacagaattcagtgaggaaaatatgctcttctggatggcctgtgaggaactgaaaaaggaagctaataaaaacattattgaagagaaagcaaggataatctatgaagactacatttctatactttctcctaaggaggtgagcttagactcccgggtgagagaagtgatcaacagaaacatggtggagccatcccaacacatattcgatgatgctcaacttcagatttacaccctgatgcacagagactcatatcctcgattcatgaactctgctgtctataaggacttgcttcagtccttatcggagaaatctattgaagcataggatttttcaaatatatttattattaataaaataataaaagaattcatgggctacaactagcacagggaatttagaggttgtagcatcttctgctggagtaatactcaggctattctaataacagatgattccttcaacagactgctatatattcaccatgtaaactgcagccacctttagtgatacttttgaaaaaaaaaaataaagggatatggctgttgtagaaagatagcgtatttgcatttacaataacagtagcatgttgtcagtggccaaggctacacagaaggctccctgctgcccggagcaggtacatccaccagagcaaagggaaccacttttattttgcatgagtttggtaactgattactctcccctcaaagaaaagacattcaggtgtttctcaacgacatcttctgtccagcaagctcggtttgaatacgtcacttaccagtgccattgcaggacccaaattcacagttcataaaagatgtgaccactacatgtaaaaatagcattctacttgatcttacagtatgtatgtatgtatgtatggagacatatgtgtgcgtgtggatgtctacatggttaatggaaagcactgtgctctgaagtggatcagtctcaagtgtctggtaacagcagcagtgcttagaaaattcttttgttgaaaagagttactgttattatcagaatttgccaacctaaagaatgaatttttaaattcataacttggtcatgttcacaacaaaactgtcaaataagcatatttccatttttattactgaaagaaatatgggcattttcattctttaa

SEQ ID NO: 140208 - protein, 857 aa, Artificial Sequence
  derived and/or modified sequence
MAKAKKVGARRKASGAPAGARGGPAKANSNPFEVKVNRQKFQILGRKTRHDVGLPGVSRARALRKRTQTLLKEYKERDKSNVFRDKRFGEYNSNMSPEEKMMKRFALEQQRHHEKKSIYNLNEDEELTHYGQSLADIEKHNDIVDSDSDAEDRGTLSAELTAAHFGGGGGLLHKKTQQEGEEREKPKSRKELIEELIAKSKQEKRERQAQREDALELTEKLDQDWKEIQTLLSHKTPKSENRDKKEKPKPDAYDMMVRELGFEMKAQPSNRMKTEAELAKEEQEHLRKLEAERLRRMLGKDEDENVKKPKHMSADDLNDGFVLDKDDRRLLSYKDGKMNVEEDVQEEQSKEASDPESNEEEGDSSGGEDTEESDSPDSHLDLESNVESEEENEKPAKEQRQTPGKGLISGKERAGKATRDELPYTFAAPESYEELRSLLLGRSMEEQLLVVERIQKCNHPSLAEGNKAKLEKLFGFLLEYVGDLATDDPPDLTVIDKLVVHLYHLCQMFPESASDAIKFVLRDAMHEMEEMIETKGRAALPGLDVLIYLKITGLLFPTSDFWHPVVTPALVCLSQLLTKCPILSLQDVVKGLFVCCLFLEYVALSQRFIPELINFLLGILYIATPNKASQGSTLVHPFRALGKNSELLVVSAREDVATWQQSSLSLRWASRLRAPTSTEANHIRLSCLAVGLALLKRCVLMYGSLPSFHAIMGPLQALLTDHLADCSHPQELQELCQSTLTEMESQKQLCRPLTCEKSKPVPLKLFTPRLVKVLEFGRKQGSSKEEQERKRLIHKHKREFKGAVREIRKDNQFLARMQLSEIMERDAERKRKVKQLFNSLATQEGEWKALKRKKFKK

SEQ ID NO: 140209 - protein, 575 aa, Artificial Sequence
  derived and/or modified sequence
MKRFALEQQRHHEKKSIYNLNEDEELTHYGQSLADIEKHNDIVDSDSDAEDRGTLSAELTAAHFGGGGGLLHKKTQQEGEEREKPKSRKELIEELIAKSKQEKRERQAQREDALELTEKLDQDWKEIQTLLSHKTPKSENRDKKEKPKPDAYDMMVRELGFEMKAQPSNRMKTEAELAKEEQEHLRKLEAERLRRMLGKDEDENVKKPKHMSADDLNDGFVLDKDDRRLLSYKDGKMNVEEDVQEEQSKEASDPESNEEEGDSSGGEDTEESDSPDSHLDLESNVESEEENEKPAKEQRQTPGKGLISGKERAGKATRDELPYTFAAPESYEELRSLLLGRSMEEQLLVVERIQKCNHPSLAEGNKAKLEKLFGFLLEYVGDLATDDPPDLTVIDKLVVHLYHLCQMFPESASDAIKFVLRDAMHEMEEMIETKGRAALPGLDVLIYLKITGLLFPTSDFWHPVVTPALVCLSQLLTKCPILSLQDVVKGLFVCCLFLEYVALSQRFIPELINFLLGILYIATPNKASQGSTLVHPFRALGKNSELLVVSAREDVATWQQSSLSLRWWSRIPDLR

SEQ ID NO: 140210 - DNA, 2574 bp, Artificial Sequence
  derived and/or modified sequence
atggcgaaagccaagaaggtgggggctaggaggaaagccagcggcgcccccgccggagccagggggggtcctgccaaagccaacagcaatccattcgaggttaaggtgaatcgtcagaaattccagattctgggacgcaagacccgtcacgacgtggggcttcctggggtgtcccgggcgcgtgccctgcgcaaacggacccaaacacttctgaaggagtacaaggagagagacaaatccaacgtatttcgggataagcggttcggagaatacaacagtaacatgtccccagaagagaagatgatgaaaaggtttgctctggagcagcagcgccatcatgagaaaaaatccatttacaacctgaatgaagacgaggaactgactcactatggtcagtccctggcagatattgagaaacataatgatatcgtggactctgattccgacgcagaagatagaggtaccctgtccgcagagcttactgctgcacacttcggcggaggcggagggctgctgcacaaaaagacccagcaggagggagaggagcgggagaagcccaaatcccggaaagaactgattgaggaactaatagccaagtccaagcaggagaagcgggaaaggcaagcccagagggaagatgccctcgagctcacggagaagctggaccaagactggaaggaaatccagaccttgctgtctcataagacgcccaagtcagagaatcgggataagaaggagaagccaaagcccgatgcttacgacatgatggtgcgcgagctcggctttgaaatgaaggcacaacctagcaatagaatgaagaccgaagctgaactagccaaggaagaacaggagcacttgaggaagctggaggctgaacggctaaggcggatgctggggaaggacgaagatgaaaatgttaaaaaacccaagcatatgtcggcagatgacttgaacgatggtttcgtgctggacaaggacgatcgcagactgctgtcttataaggacggcaaaatgaatgtcgaggaggatgtgcaagaggaacaaagcaaggaagcttctgatccggaatcgaatgaagaagaaggtgatagttctgggggagaggataccgaagaatcagactctccggatagccacctggatcttgagtctaatgttgaatccgaggaagaaaacgagaagccagcaaaggagcagagacagacccccggtaaaggtcttatatctggcaaagaacgggcaggcaaagccaccagggatgagctgccgtacaccttcgccgcccccgagagttacgaggaacttcgcagccttctccttggaagaagcatggaggaacagctgcttgtcgtggagcgcatccagaagtgtaaccacccgtctctggccgaggggaacaaggccaagctggagaaattgttcggatttctacttgaatatgttggcgacctcgctacagatgaccctcccgatcttacggtgattgataaactagtcgtccatctgtatcatctctgccagatgtttccggaatctgcctcagacgctatcaagttcgtattgagggatgccatgcatgagatggaggaaatgattgagacaaagggacgggccgctctcccaggacttgacgtcctgatttatcttaagatcaccggactcctgttccctacatccgatttttggcacccagttgtgacaccagctctagtgtgtttgtcacagctcctaacaaagtgccctatcttgtcactgcaagacgtggtgaaagggctgttcgtgtgctgcctgtttctggaatacgtcgcactcagtcagcggttcatccccgagttaatcaatttcctgctcgggatcctgtacatcgcgaccccaaacaaagcctcccaaggatccacgctagtgcacccttttcgggcgctcggcaaaaattctgagcttctcgttgtgtctgcacgagaagacgtagccacgtggcagcaaagcagtctcagcttgagatgggcgagtaggctgagagcccccacctccacagaagcaaatcatattcggctgagttgtctagctgttggtctggcgctactcaagcgttgcgtgcttatgtatggaagcctgcctagcttccatgcgattatgggtccgctccaagcattgctgacggatcatctcgccgattgtagccatcctcaagagctgcaagagctgtgccagagcaccttaacagagatggaaagccagaaacaactgtgtcgccctctcacctgtgaaaagagcaaacccgtcccgctcaagctgttcacgcccagactggtgaaggtgctggagttcggtaggaagcagggcagcagcaaggaagagcaggaaagaaaaaggttgatccacaaacacaagcgcgagtttaagggggccgtccgagagattcgcaaagacaaccagtttctggccagaatgcaactgagcgagatcatggagcgggacgccgagaggaaacgcaaagtaaaacagctgtttaacagcttggcgacccaggagggcgagtggaaggctctcaagcgcaagaagttcaaaaagtag

SEQ ID NO: 140211 - DNA, 2574 bp, Artificial Sequence
  derived and/or modified sequence
atggcaaaggcgaaaaaggtgggggctcggcgtaaagcaagtggggcccccgctggcgcacgaggtggccctgctaaggcaaactctaacccattcgaagtcaaggtaaaccggcagaaatttcagattttgggaaggaagacccgccacgacgtgggcctgccgggcgtttccagggcccgcgccttgcggaagcggacacaaacactgttgaaggaatacaaagaaagggataagagtaacgtattccgcgataagcggttcggcgagtataactcgaatatgtctcctgaggaaaaaatgatgaaacgctttgccctcgagcagcagcggcatcatgagaagaagagcatctacaacctgaatgaggacgaagaattgacccactatggccagtccctggcagatatcgaaaaacacaacgacattgttgattcagactccgacgccgaggaccggggcacactgagcgccgaacttacggccgcacacttcggtggcggaggggggttgttgcacaagaaaacccagcaggagggtgaggaacgggagaagccgaagtctagaaaggaattaatcgaggaactgattgctaagagcaaacaggaaaagcgtgagcgacaggcccagcgcgaagatgccctggagctcaccgagaagctggaccaggactggaaggagattcagacacttctgtctcacaagactccaaaatccgagaatcgagacaaaaaggagaaacccaaacctgacgcttacgatatgatggtgagggagcttggctttgaaatgaaggctcaacctagcaacaggatgaaaacggaggcggagttagccaaagaggaacaggaacacctcaggaaacttgaggcagaaagattaaggagaatgttagggaaggatgaggacgagaacgtcaagaagccaaagcacatgtctgcagacgacttgaatgacggatttgttctggataaggatgaccgccgcctactgagctataaggatgggaagatgaacgtagaagaggacgttcaggaggaacagtcaaaagaggcgtctgacccggaaagtaatgaagaagaaggcgacagtagcggcggagaagataccgaagagtccgactcaccagacagccacctggatctcgagagcaacgtcgagagcgaagaagagaacgaaaagcctgcgaaagaacagagacagacgcctggaaagggtttaatctccgggaaagagagagcggggaaggccactagggatgagctcccttacacatttgcggctcctgaaagctatgaggaattgaggtcactgctgctcggaagaagcatggaggaacaacttctggtggttgagaggatacaaaaatgcaatcacccaagcctggcggaaggtaacaaagccaaactagagaagctctttgggttcctgctcgagtacgtgggtgatctggccaccgatgatcctcccgatctaacagtgatagacaagctggtcgtccacctctaccacctatgtcagatgttccctgagagcgctagtgacgccataaaattcgtactgagagatgccatgcacgaaatggaggagatgattgaaaccaaggggagagcggcgctgccaggactggacgtgttgatatatctcaagatcacaggactgttattccccacttccgatttctggcaccctgtagtgactcctgccctggtctgcctgtctcagctcttaaccaaatgccctattttgtccctgcaggacgtagtgaagggtctctttgtctgctgcttgttccttgagtacgtggcactgtcccagagattcatcccagagcttatcaacttcctgctggggatactctatatagctacccccaacaaggcatctcaaggctctacattagttcacccctttagggcgctcggcaaaaactcggagttgctggttgtatcagcccgcgaagacgtcgccacctggcaacagtctagcctttcactacgctgggcctcaaggctgcgagcacctacaagtacggaggccaaccacatccgactgagttgcctggctgtagggttagccctgctgaaacgctgcgtgttaatgtacggatctctgccttcttttcacgccattatggggccactgcaagcattgttgaccgaccacctggcggattgtagtcacccacaagagctccaggagctctgccagtccacactgactgaaatggagtcccagaaacagctgtgtagacccctgacatgtgaaaaatctaagcctgtcccactgaaactgttcacacctcgcctcgtgaaggtgcttgagttcggccgaaaacagggatcatcgaaagaagagcaagaacgcaagcgccttatacataaacataagcgggaatttaaaggggccgtccgcgagatcagaaaagataatcagtttttagcccgtatgcagctctccgagattatggagagggacgccgagcggaaacggaaggtcaaacagttgttcaatagtctcgccacgcaagaaggcgagtggaaggctttgaagaggaagaagttcaagaaatag

SEQ ID NO: 140212 - DNA, 1728 bp, Artificial Sequence
  derived and/or modified sequence
atgaagagattcgccttggagcagcaacgccaccatgagaaaaagagtatttacaacttaaacgaagatgaagaactcactcactacggtcagagccttgctgatattgagaagcataatgatattgtggatagtgactcagatgctgaagacagaggcaccctgtctgctgagctaaccgctgcccacttcggcggcgggggcgggctactgcacaagaaaacccagcaagagggcgaagagcgagagaagccgaaaagtcgaaaggagttaattgaggagttaattgcaaagtctaaacaggaaaagcgcgaaagacaggctcagcgggaggatgcccttgagcttacagagaagttagatcaggattggaaagagattcaaaccctgctttcacataaaacgccaaagagcgaaaacagggacaagaaagaaaaacccaaacctgacgcctacgacatgatggttcgggagttgggcttcgagatgaaggcacagccctccaatcgtatgaagactgaggctgagctggcgaaggaagagcaggagcatctgcgcaagctcgaagcagagagacttcgtcgtatgttaggcaaggatgaagacgagaatgtgaagaaacctaagcatatgtcagctgacgatctaaacgatggcttcgtgctcgataaagatgaccgccggctcctgtcttacaaagatggcaaaatgaacgtggaagaggacgtgcaggaggagcagtcaaaggaagcatcagaccctgagtccaatgaggaggagggcgatagctcaggaggggaggacaccgaggagagtgacagccccgatagccatctggacctggagagcaacgtcgagtctgaggaggagaacgagaaacccgcaaaagagcagaggcaaacacctgggaaaggcctgatcagcggcaaagagcgcgctggcaaggccacaagagacgagctgccatataccttcgcggccccagaaagctatgaagaactgcggtcgctgttgttggggcggagcatggaggaacagttgttagtggtagaaagaatccagaagtgtaaccatccatccctggccgaaggaaacaaggctaagttggagaagcttttcggattcctgctggaatacgtaggggacctcgccaccgacgacccacctgatctgacggtcatagataagctggtcgtacacctgtatcatctctgtcagatgtttccagagagcgcctccgacgcgatcaaatttgtcctcagggatgcaatgcatgaaatggaagaaatgattgagactaaaggaagagccgccctcccgggattggacgtactgatttatctcaaaattacagggctactgttcccgactagtgacttctggcacccggttgtcaccccagccctcgtctgcctctcccagcttcttaccaagtgccctattttgtccctgcaagacgttgtaaaaggtctgttcgtgtgctgtctcttcttggagtacgtggccctttcacaacgatttattcctgaattgattaattttctgttgggcatcctatatattgcaacaccaaataaagcttcacaagggtcaactctcgtccacccctttagggctctcggaaagaactctgaactgctggtggtgtccgcacgggaagacgttgccacctggcagcagtcttccctgtccctgcggtggtggagtcgcatccctgatctgaggtag

SEQ ID NO: 140213 - DNA, 2574 bp, Artificial Sequence
  derived and/or modified sequence
atggccaaggccaagaaggtgggcgcccggaggaaggccagcggggccccagctggggcccggggcggccctgccaaggccaacagcaacccctttgaggtgaaggtgaaccggcagaagttccagatcctgggcaggaagaccaggcatgatgtgggcctgcccggggtgtcccgggcccgggccctgaggaagaggacccagaccctgctgaaggagtacaaggagcgggacaagagcaatgtgttccgggacaagagatttggagagtacaacagcaacatgagccctgaggagaagatgatgaagagatttgccctggagcagcagaggcaccacgagaagaagagcatctacaacctgaatgaagatgaggagctgacccactacggccagagcctggccgacatcgagaagcacaatgacatcgtggacagcgacagtgatgctgaagatcggggcaccctgtctgctgagctgacagctgcccactttggaggcggcggcggcctgctgcacaagaagacccagcaggagggggaggagcgggagaagcccaagagcaggaaggagctgattgaggagctgattgccaagagcaagcaggagaagcgggagcggcaggcccagcgggaggatgccctggagctgacagagaagctggaccaggactggaaggagatccagaccctgctgagccacaagacccccaagtctgagaacagagacaagaaggagaagcccaagccagatgcctatgacatgatggtgcgggagctgggctttgagatgaaggcccagcccagcaacaggatgaagacagaggccgagctggccaaggaggagcaggagcacctgaggaagctggaggccgagcggctgcggaggatgctgggcaaggatgaagatgaaaatgtgaagaagcccaagcacatgtctgcagatgacctgaatgatggctttgtgctggacaaggatgaccggcggctgctgagctacaaggatggcaagatgaatgtggaggaggatgtgcaggaggagcagagcaaggaggccagtgaccctgagagcaatgaggaggagggggacagcagtggaggagaggacacagaggagagtgacagcccagacagccacctggacctggagagcaatgtggagagcgaggaggagaatgagaagccagccaaggagcagaggcagaccccaggcaagggcctcatcagcggcaaggagcgggccggcaaggccaccagagatgagctgccctacacctttgctgcccctgagagctatgaggagctgcggagcctgctgctgggccgctccatggaggagcagctgctggtggtggagcgcatccagaagtgcaaccaccccagcctggccgagggcaacaaggccaagctggagaagctgtttggcttcctgctggagtatgtgggggacctggccacagatgatcctccagacctgactgtgattgacaagctggtggtgcacctgtaccacctgtgccagatgtttcctgagagcgccagtgatgccatcaagtttgtgctgagagatgccatgcatgagatggaggagatgattgagaccaagggccgggccgccctgcccggcctggatgtgctgatctacctgaagatcaccggcctgctcttccccaccagtgacttctggcaccctgtggtgaccccagccctggtgtgcctgagccagctgctgaccaagtgccccatcctgagcctgcaggatgtggtgaagggcctgtttgtgtgctgcctcttcctggagtatgtggccctgagccagcgcttcatccctgagctgatcaacttcctgctgggcatcctgtacatcgccacccccaacaaggccagccagggcagcaccctggtgcaccccttccgggccctgggcaagaacagcgagctgctggtggtgtctgcccgggaggatgtggccacctggcagcagagcagcctgagcctgcgctgggccagccggctgcgggcccccaccagcacagaggccaaccacatccggctgagctgcctggccgtgggcctggccctgctgaagagatgtgtgctgatgtatggcagcctgcccagcttccacgccatcatgggccccctgcaggccctgctgacagaccacctggccgactgcagccacccccaggagctgcaggagctgtgccagagcaccctgacagagatggagagccagaagcagctgtgccggcccctgacctgtgagaagagcaagcctgtgcccctgaagctgttcaccccccggctggtgaaggtgctggagtttggaaggaagcagggcagcagcaaggaggagcaggagaggaagaggctcatccacaagcacaagcgggagttcaagggagctgtgcgggagatcaggaaggacaaccagttcctggccaggatgcagctgtctgagatcatggagagagatgctgagaggaagaggaaggtgaagcagctgttcaacagcctggccacccaggagggggagtggaaggccctgaagaggaagaagttcaagaagtag

SEQ ID NO: 140214 - DNA, 1728 bp, Artificial Sequence
  derived and/or modified sequence
atgaagagatttgccctggagcagcagaggcaccacgagaagaagagcatctacaacctgaatgaagatgaggagctgacccactacggccagagcctggccgacatcgagaagcacaatgacatcgtggacagcgacagtgatgctgaggaccggggcaccctgtctgctgagctgacagctgcccactttggaggcggcggcggcctgctgcacaagaagacccagcaggagggggaggagcgggagaagcccaagagcaggaaggagctgattgaggagctgattgccaagagcaagcaggagaagcgggagcggcaggcccagagagaagatgccctggagctgacagagaagctggaccaggactggaaggagatccagaccctgctgagccacaagacccccaagtcagaaaatagagacaagaaggagaagcccaagccagatgcctatgacatgatggtgcgggagctgggctttgagatgaaggcccagcccagcaacaggatgaagacagaagctgagctggccaaggaggagcaggagcacctgaggaagctggaggccgagcggctgcggaggatgctgggcaaggatgaagatgaaaatgtgaagaagcccaagcacatgtctgcagatgacctgaatgatggctttgtgctggacaaggatgaccggcggctgctgagctacaaggatggcaagatgaatgtggaggaggatgtgcaggaggagcagagcaaggaggccagtgaccctgagagcaatgaggaggagggggacagcagtggaggagaggacacagaggagagtgacagcccagacagccacctggacctggagagcaatgtggagagcgaggaggagaatgagaagccagccaaggagcagaggcagacccctgggaagggcctcatcagcggcaaggagagagctgggaaggccaccagagatgagctgccctacacctttgctgcccctgagagctatgaggagctgcggagcctgctgctgggccgctccatggaggagcagctgctggtggtggagcgcatccagaagtgcaaccaccccagcctggccgagggcaacaaggccaagctggagaagctgtttggcttcctgctggagtatgtgggggacctggccacagatgaccccccagacctgaccgtcatcgacaagctggtggtgcacctgtaccacctgtgccagatgtttcctgagagcgccagtgatgccatcaagtttgtgctgagagatgccatgcatgagatggaggagatgattgagaccaagggccgggccgccctgcccggcctggatgtgctgatctacctgaagatcaccggcctgctcttccccaccagtgacttctggcaccctgtggtgaccccagccctggtgtgcctgagccagctgctgaccaagtgccccatcctgagcctgcaggatgtggtgaagggcctgtttgtgtgctgcctcttcctggagtatgtggccctgagccagcgcttcatccctgagctgatcaacttcctgctgggcatcctgtacatcgccacccccaacaaggccagccagggcagcaccctggtgcaccccttccgggccctgggcaagaacagcgagctgctggtggtgtctgccagagaagatgtggccacctggcagcagagcagcctgagcctgcgctggtggagccgcatcccagacctgaggtag

SEQ ID NO: 140215 - DNA, 2574 bp, Artificial Sequence
  derived and/or modified sequence
atggccaaggccaagaaggtgggcgcccggcggaaggccagcggcgctcccgctggcgctcgcggaggacctgcaaaggccaactctaacccgtttgaagtcaaggtcaaccggcagaaattccaaatcttgggcaggaagacccggcatgacgtaggcttgcctggggtatcccgggcccgggctctgagaaaacggacccaaaccctcctgaaagaatacaaagaacgagataaatctaatgtattccgggataagcggtttggggagtacaattccaacatgagccctgaggagaagatgatgaagcgatttgctctcgagcagcagaggcaccatgaaaagaagtctatttacaaccttaacgaggatgaagaactgacccactacggccagtcccttgccgacattgagaagcacaacgacatcgtggattccgacagtgatgccgaagatcgaggcaccctttctgcggaattaaccgccgctcacttcggaggcggcggtgggctcctccataaaaaaacccagcaggaaggtgaggaacgggaaaagccaaaaagtcggaaggagctgatcgaggagctgattgccaaaagcaaacaggagaaaagggagaggcaggcgcaaagagaggatgccctggagttgactgaaaagcttgaccaggattggaaggagatccagactctcttgtcccacaagacccccaagtcagaaaacagggacaagaaggagaaacccaaacctgacgcctatgatatgatggttagagagcttggattcgaaatgaaagcacagccgtccaaccgcatgaagacagaggcagagctcgccaaggaggagcaggagcatctcaggaaactggaggccgaaaggcttaggaggatgcttggtaaggacgaagatgagaatgtgaagaagccaaagcacatgtctgcagatgatctgaatgacggatttgtacttgataaagacgacaggcgtttgttaagctataaagatggcaagatgaatgtggaagaggatgtgcaggaagaacagtctaaagaggcctctgatcctgagagtaacgaggaagagggggattcaagcgggggggaggacacggaagaatccgattcacccgattctcatctcgatctggaaagtaatgtcgagagcgaggaggaaaacgaaaagccagctaaggaacagcgacaaactcccgggaaaggactgatctctgggaaggagagagcgggcaaagccacacgggatgaattgccatacactttcgctgcaccagaatcttatgaggagctacggagcctgctgctgggaagatctatggaagaacaactgcttgtcgttgaacggattcagaaatgcaaccatccttcattggcagagggtaacaaagccaaactggagaagctattcggatttctgctagagtatgtgggagatctggccacagacgatcctccagatctgactgttattgacaaacttgtcgttcacttataccacctctgccagatgttcccagaatcagcttctgatgccatcaaatttgttctgcgagacgcgatgcacgagatggaagagatgattgagaccaagggccgcgctgcccttcccgggctggacgtcctcatataccttaagatcacgggattgctgttccccactagcgatttctggcatcctgtggttactcctgctctggtgtgtctgagtcagttgctgacgaagtgccctatattgtcactacaggatgtagtgaaaggattatttgtttgctgcctcttcttggaatatgtcgcactcagccagagattcatacctgaactgataaattttctgctgggcatcctatatattgcaactcctaacaaagcaagccagggcagcaccctcgttcatccatttagggcacttggaaagaacagcgaactgcttgtggtctccgctagagaggacgtggccacttggcaacaatcaagcctgtccctcagatgggcttcccggctgcgagcacctacaagcaccgaagcaaatcatatccggctgtcctgcttagccgtgggtctggcactgctgaaacggtgtgtacttatgtacggcagcttgccctccttccatgccattatgggcccgttgcaggcactcctgacagatcacttagctgattgctctcacccacaggaactccaggagttatgccagtcaactttaacagagatggagtctcagaagcagctgtgcaggcctcttacatgtgagaagtcaaagcccgtacccctaaagctgttcactcctaggctcgtgaaagtgctggaattcgggcgtaagcagggctcctccaaggaggaacaggaaaggaaacgtcttatccataagcacaagcgtgaattcaaaggcgccgttcgtgagattagaaaagacaaccaattcctagctcggatgcaactgtccgagattatggaaagagatgctgagaggaaaaggaaggtaaagcagctgtttaatagtctggctactcaggagggtgagtggaaagccctgaagcgcaagaaattcaaaaaatag

SEQ ID NO: 140216 - DNA, 2574 bp, Artificial Sequence
  derived and/or modified sequence
atggccaaggccaagaaggtgggcgcccggcggaaggccagcggcgcccccgcgggtgcccggggcggccctgcaaaggcaaactcaaatcctttcgaggtaaaggtcaataggcagaagtttcagatcttgggaaggaagaccaggcatgatgttgggctacccggagtttctagagctcgagctctccggaaacggacacagacactgctaaaggaatacaaagaacgtgacaagagtaatgtgtttcgagacaaaaggttcggcgagtataacagcaacatgtccccagaggagaagatgatgaaacgttttgcattggaacagcagcgtcaccatgagaagaagagcatttacaacctgaacgaagatgaggagctgacgcactacggacagagcttggccgacatcgagaaacacaatgacattgttgactcagactccgatgcggaagatagggggactctgtccgccgagcttactgcagcccattttggcggcggcggcggactgctccataaaaagacacaacaggagggcgaagaaagagagaaaccgaaatcccggaaggagctcatcgaggagctcattgctaaatccaagcaagagaagagagagaggcaggcccagcgcgaggacgcactagagctaaccgagaagctggaccaggactggaaggaaattcagacattactcagtcacaaaacacccaagtccgagaatcgcgacaaaaaagagaaaccaaaaccagacgcctatgatatgatggttcgcgaactcggatttgagatgaaggcccagccatcaaaccggatgaaaacagaagccgaacttgcgaaggaggagcaggaacacttacgtaagctggaggcggaacgcttaagaaggatgttgggaaaagatgaggacgagaacgtgaagaagcctaagcatatgtccgccgatgatttgaatgatgggttcgtcctggacaaagatgatcggaggctcctctcttacaaggacggtaagatgaatgtggaagaagacgtgcaggaggagcagtcaaaggaggccagtgatcccgagtctaacgaagaggaaggggactcttctggtggggaggataccgaggagtcagatagccccgactcccatttggatctggagtccaacgtggagagcgaggaggaaaatgaaaagccggccaaggagcagcgccagacgcccggaaagggcttaattagtggaaaggagcgcgccggcaaagctacccgagacgaattaccgtatacctttgcggccccagagagctacgaagagttgcgaagcctactcctcggacgctctatggaggaacagttgttggtggtggaaaggatccagaaatgcaatcatccttcactagcagagggaaacaaggctaaactcgagaaactgtttggattcttactggagtatgtcggtgacttagctacagacgatccaccggacctcacagtgatcgacaagctggtagtgcatctgtaccacctctgtcagatgtttccagagagtgcaagtgacgccatcaagttcgtcctgagggatgcaatgcatgaaatggaagagatgatcgagactaagggccgcgccgctctgcctggccttgatgtcctgatttaccttaaaatcacaggtctcctttttcctacaagtgatttctggcaccccgttgtgacacccgccctggtgtgcctttctcagctgctgaccaagtgccccatcctaagtttgcaagatgtggtcaaaggactattcgtttgttgcctttttctcgaatacgtggcgctgagccaacgctttatccctgagctgatcaattttctactcgggattctctatatcgccacgccaaacaaggccagccagggctctacattagtgcatccatttagagccctaggaaaaaattctgagcttctggtcgtctccgccagagaggacgtggccacgtggcagcagagctctttgtccctgcggtgggcatcgcgtttgcgagctccaacgagcacggaggctaatcatatccggctgtcatgtctggctgtagggctggcgttgctgaaaaggtgcgtactgatgtatggaagtctgccctcctttcacgcaataatggggcccctgcaggccctcctgacggatcaccttgccgactgcagtcatccgcaagaacttcaggaactgtgccagtccaccctgacagagatggaaagccaaaagcagttgtgtagacccctgacctgcgagaagagcaaacctgtaccactcaagctcttcacaccacggctggttaaggtcctggaatttggtaggaagcagggatcttctaaagaggagcaggaaagaaaaagactgatccacaaacacaagcgggagttcaaaggtgcggtgcgggagatccggaaagacaatcagtttctggcacggatgcaactgagcgaaattatggagcgcgatgccgaaaggaaaagaaaggtcaagcaactcttcaatagccttgcaacccaggagggcgagtggaaagccctgaaacgaaaaaagttcaaaaaatag

SEQ ID NO: 140217 - DNA, 1728 bp, Artificial Sequence
  derived and/or modified sequence
atgaagcggttcgccctggagcagcagcggcaccacgagaagaagagtatttataacttgaatgaagacgaagaactgacccactacggacagagtctcgcggatatcgagaagcacaacgacattgtcgactcggactccgatgctgaagaccgggggaccttatctgctgagttgacagccgcccactttggtgggggcggtgggctcctccacaagaagacacagcaagaaggcgaggagagagagaaaccgaaatccagaaaggaacttatcgaggagctgattgccaaatcaaaacaggagaaaagggaaaggcaagcacagagagaggatgctctggaactgacagaaaagctagatcaggattggaaggagatccagactctcctgagccacaagacccccaagtccgaaaatcgtgacaaaaaagaaaagcccaagccagacgcttatgatatgatggtgagggagctcgggtttgagatgaaagcccagccttccaatcgcatgaagacagaagctgagttggcaaaagaagaacaggagcatctgcgcaagcttgaggctgaacgtctcagacgcatgctcggcaaagatgaagacgaaaatgtgaagaagcctaagcacatgagtgctgatgatctgaatgatggtttcgttctggacaaggatgaccgtcgactgctatcttataaggacggtaaaatgaacgtcgaagaggacgtgcaggaagaacaatcaaaggaagcctctgatcctgaatccaacgaggaagaaggagatagttctggcggcgaggacaccgaagaatcagatagccccgactcacacctggacttagagtcaaacgttgagtccgaagaagagaatgagaaacctgccaaagagcaaaggcagactcccggtaaagggttaatttccggaaaagaacgcgctgggaaggccaccagggacgagctgccctacaccttcgctgcaccagaatcttacgaggagttgagatccctacttctgggacgaagtatggaggagcagctattggtggtcgaacgtatccaaaaatgcaatcacccctctctagcagaaggcaacaaagctaaactcgagaaactgtttgggtttctcctggagtatgtcggggatctggccaccgatgatccccccgatctcactgtcatagacaagctggtggttcatctatatcatctatgccaaatgttcccagagagcgcttcggatgccataaagttcgtcttacgcgacgccatgcacgaaatggaggagatgattgagacgaaggggcgggccgcactgcccgggttggacgtgctaatatacctcaagattacaggcttattgtttcctacaagcgacttctggcacccagtcgtgacacctgcactggtttgtttgtcccaactgttaactaagtgccctatccttagcttgcaggacgtggtgaagggcctgtttgtctgttgtctgtttctagagtacgtcgccctgtcacagcgtttcatccctgaattaatcaatttcctgctcggtatcctgtacattgccacacccaataaagctagccaggggagcactcttgtccacccgttcagagccttaggaaagaattcagaactgctggtggtctcagccagagaagacgtggctacgtggcagcagtctagtctcagtctgcgttggtggagccggatccctgatttgaggtag

SEQ ID NO: 140218 - DNA, 2889 bp, Artificial Sequence
  derived and/or modified sequence
cctgtctctcttcgggtctcgggcccttgggcgcagcggggcgcgcgccatggcgaaggcgaagaaggtcggggcgcgaaggaaggcctccggggcgccggcgggagcgcgagggggcccggcgaaggccaactccaatccgttcgaggtgaaagttaacaggcagaagttccagatcctgggccggaagacgcgccacgacgtgggactgcccggggtgtctcgcgcacgggccctcaggaagcgtacacagactttactaaaagagtacaaagaaagggataaatccaatgtattcagagataaacgcttcggagaatacaacagcaacatgagccccgaggagaagatgatgaagaggtttgctctggaacagcagcgacatcatgagaaaaaaagcatctacaatctaaatgaagatgaagaattgactcattatggccagtctttggcagacatcgagaagcataatgacattgtggacagtgacagcgatgctgaggatcgaggaacgttgtctgctgagctgactgctgcccactttggaggaggcggtgggctccttcacaagaagactcaacaggaaggcgaggagcgggagaaaccgaagtcccggaaagagctgattgaagagctcattgccaagtcaaaacaagagaagagggagagacaagctcaacgagaagatgccctcgagctcacggagaagctagaccaagactggaaagaaattcagactctcctgtcccacaaaactcccaagtcagagaacagagacaaaaaggaaaaacccaagcccgatgcatatgacatgatggttcgcgagcttggctttgaaatgaaggcgcagccctctaacaggatgaagacggaggcagaattggcaaaggaagagcaggagcacctcaggaagctggaggctgagagacttcgaagaatgcttggaaaggatgaggatgaaaatgttaagaaaccaaaacatatgtcagcagatgatctgaatgatggcttcgtgctagataaagatgacaggcgtttgctttcctacaaagatggaaagatgaatgtcgaggaagatgtccaggaagagcaaagcaaggaagccagtgaccctgagagcaacgaggaagaaggtgacagttcaggcggggaggacacagaggagagcgacagcccagatagccacttggacctggaatccaacgtggagagtgaggaagaaaacgagaagccagcaaaagagcagaggcagactcctgggaaagggttgataagcggcaaggaaagagctggaaaagctaccagagacgagctgccctacacgttcgcagcccctgaatcctatgaggaactgagatctctgttgttaggaagatcgatggaagagcagcttttggtggtggagagaattcagaagtgcaaccacccgagtctcgcagaaggaaacaaagcaaaattagaaaaactgtttggctttcttttggaatacgttggcgatttggctacagatgacccaccagacctcacagtcattgataagttggttgtgcacttatatcatctttgccagatgtttcctgaatctgcaagtgacgctatcaaatttgttctccgagatgcgatgcatgagatggaagaaatgattgagaccaaaggccgggcggcattgccagggttggatgtgctcatttatttgaaaatcactgggctgctatttccaacttccgacttctggcacccagtggtgacccctgccctcgtgtgcctcagtcagctgctcaccaagtgccccatcctgtccctccaggacgtggtgaagggcctgttcgtgtgctgcctgttcctggagtatgtggctttgtcccagaggtttatacctgagcttattaattttcttcttgggattctttacatagcaactccaaacaaagcaagccaaggttccactctggtgcaccctttcagagcgcttgggaagaactcggaactgctcgtggtgtctgctagagaggatgtggccacgtggcagcagagcagcctctccctccgctgggcgagtagactgagggccccaacttcgacagaggccaatcacatccgactgtcctgcctggctgtgggcctggccctgctgaagcgctgcgtgctcatgtacgggtccctgccatccttccacgccatcatggggcctctccaagccctcctcacggatcacctggcggactgcagccacccgcaggagctccaggagctgtgtcagagcacactgaccgaaatggaaagccagaagcagctctgccggccgctgacctgtgagaagagcaagcctgtcccactgaagcttttcacaccccggctggtcaaagtcctcgagtttggaagaaaacaaggcagtagtaaggaggaacaggaaaggaagaggctgatccacaaacacaagcgtgaatttaaaggggccgttcgagaaatccgcaaggacaatcagttcctggcgaggatgcaactctcagaaatcatggaacgggatgcggaaagaaagcggaaagtaaagcagctttttaacagcctggctacacaggaaggcgaatggaaggctctgaagaggaaaaagttcaaaaaataaattacattttataaataagctccccccacccgctgcctgcggttttgtttctgttaaaacgtcacctgatgaaatagaatgaatcctgaaatgcacctctgggatcgggaatggtctgtgtgttatcagctgcgactggttcactgcgtctggacaagcctcatggggactggggattctggccagtgtaatttctgtcaaccacggacgtttgccttcatgtgtagaatttactgttgttatgcaaattatattttcaattataa

SEQ ID NO: 140219 - DNA, 3538 bp, Artificial Sequence
  derived and/or modified sequence
tcttagggtagcgcgcgcctgtctctcttcgggtctcgggcccttgggcgcagcggggcgcgcgccatggcgaaggcgaagaaggtcggggcgcgaaggaaggcctccggggcgccggcgggagcgcgagggggcccggcgaaggccaactccaatccgttcgaggtgaaagttaacaggcagaagttccagatcctgggccggaagacgcgccacgacgtgggactgcccggggtgtctcgcgcacgggccctcaggaagcgtacacagactttactaaaagagtacaaagaaagggataaatccaatgtattcagagataaacgcttcggagaatacaacagcaacatgagccccgaggagaagatgatgaagaggtttgctctggaacagcagcgacatcatgagaaaaaaagcatctacaatctaaatgaagatgaagaattgactcattatggccagtctttggcagacatcgagaagcataatgacattgtggacagtgacagcgatgctgaggatcgaggaacgttgtctgctgagctgactgctgcccactttggaggaggcggtgggctccttcacaagaagactcaacaggaaggcgaggagcgggagaaaccgaagtcccggaaagagctgattgaagagctcattgccaagtcaaaacaagagaagagggagagacaagctcaacgagaagatgccctcgagctcacggagaagctagaccaagactggaaagaaattcagactctcctgtcccacaaaactcccaagtcagagaacagagacaaaaaggaaaaacccaagcccgatgcatatgacatgatggttcgcgagcttggctttgaaatgaaggcgcagccctctaacaggatgaagacggaggcagaattggcaaaggaagagcaggagcacctcaggaagctggaggctgagagacttcgaagaatgcttggaaaggatgaggatgaaaatgttaagaaaccaaaacatatgtcagcagatgatctgaatgatggcttcgtgctagataaagatgacaggcgtttgctttcctacaaagatggaaagatgaatgtcgaggaagatgtccaggaagagcaaagcaaggaagccagtgaccctgagagcaacgaggaagaaggtgacagttcaggcggggaggacacagaggagagcgacagcccagatagccacttggacctggaatccaacgtggagagtgaggaagaaaacgagaagccagcaaaagagcagaggcagactcctgggaaagggttgataagcggcaaggaaagagctggaaaagctaccagagacgagctgccctacacgttcgcagcccctgaatcctatgaggaactgagatctctgttgttaggaagatcgatggaagagcagcttttggtggtggagagaattcagaagtgcaaccacccgagtctcgcagaaggaaacaaagcaaaattagaaaaactgtttggctttcttttggaatacgttggcgatttggctacagatgacccaccagacctcacagtcattgataagttggttgtgcacttatatcatctttgccagatgtttcctgaatctgcaagtgacgctatcaaatttgttctccgagatgcgatgcatgagatggaagaaatgattgagaccaaaggccgggcggcattgccagggttggatgtgctcatttatttgaaaatcactgggctgctatttccaacttccgacttctggcacccagtggtgacccctgccctcgtgtgcctcagtcagctgctcaccaagtgccccatcctgtccctccaggacgtggtgaagggcctgttcgtgtgctgcctgttcctggagtatgtggctttgtcccagaggtttatacctgagcttattaattttcttcttgggattctttacatagcaactccaaacaaagcaagccaaggttccactctggtgcaccctttcagagcgcttgggaagaactcggaactgctcgtggtgtctgctagagaggatgtggccacgtggcagcagagcagcctctccctccgctgggcgagtagactgagggccccaacttcgacagaggccaatcacatccgactgtcctgcctggctgtgggcctggccctgctgaagcgctgcgtgctcatgtacgggtccctgccatccttccacgccatcatggggcctctccaagccctcctcacggatcacctggcggactgcagccacccgcaggagctccaggagctgtgtcagagcacactgaccgaaatggaaagccagaagcagctctgccggccgctgacctgtgagaagagcaagcctgtcccactgaagcttttcacaccccggctggtcaaagtcctcgagtttggaagaaaacaaggcagtagtaaggaggaacaggaaaggaagaggctgatccacaaacacaagcgtgaatttaaaggggccgttcgagaaatccgcaaggacaatcagttcctggcgaggatgcaactctcagaaatcatggaacgggatgcggaaagaaagcggaaagtaaagcagctttttaacagcctggctacacaggaaggcgaatggaaggctctgaagaggaaaaagttcaaaaaataaattacattttataaataaggcaaggaactggacattacctcacatctgcaattccaaccctctgggaggccaaggcaggaagattgcttcagcccaggagttcgagaccagcctgggcaacacaggaagaccccgtctctaccaaaaaaacataaaaattagccaagtgtggtggcacgcacctgtagtcccaactactcgggaggctgaagcaggaggactgcttgagctgagtccaaggttacagtgagccgtgattgagccactgcactccagcctcggccacagtgcaagactgtgtcgcttaaaaaaaaatttttttttttgagacggagttttgctcttgttgcccaggctggagtgcaatggcacaacctccacctcctgggttcaagcgattctcctgcctcagcctcccgagtagctgggattacagacatgtgccaccacgcccagctaattttgtatttttagtagagacggggtttctccatgttggtcaggctggtctcgaattcccgacctcaggtaatccacctgccttggccccccaattataggtgtgagccacagcacccagccaaaaaagtaattttttttagagtaataatgctataatgttggtgtgattccaacctccagctccccccacccgctgcctgcggttttgtttctgttaaaacgtcacctgatgaaatagaatgaatcctgaaatgcacctctgggatcgggaatggtctgtgtgttatcagctgcgactggttcactgcgtctggacaagcctcatggggactggggattctggccagtgtaatttctgtcaaccacggacgtttgccttcatgtgtagaatttactgttgttatgcaaattatattttcaattataaatgaaacaa

SEQ ID NO: 140220 - DNA, 2080 bp, Artificial Sequence
  derived and/or modified sequence
cctgtctctcttcgggtctcgggcccttgggcgcagcggggcgcgcgccatggcgaaggcgaagaaggtcggggcgcgaaggaaggcctccggggcgccggcgggagcgcgagggggcccggcgaaggccaactccaatccgttcgaggtgaaagttaacaggcagaagttccagatcctgggccggaagacgcgccacgacgtgggactgcccggggtgtctcgcgcacgggccctcaggaagcgtacacagactttactaaaagagtacaaagaaagggataaatccaatgtattcagagataaacgcttcggagaatacaacagcaacatgagccccgaggagaagatgatgaagaggtttgctctggaacagcagcgacatcatgagaaaaaaagcatctacaatctaaatgaagatgaagaattgactcattatggccagtctttggcagacatcgagaagcataatgacattgtggacagtgacagcgatgctgaggatcgaggaacgttgtctgctgagctgactgctgcccactttggaggaggcggtgggctccttcacaagaagactcaacaggaaggcgaggagcgggagaaaccgaagtcccggaaagagctgattgaagagctcattgccaagtcaaaacaagagaagagggagagacaagctcaacgagaagatgccctcgagctcacggagaagctagaccaagactggaaagaaattcagactctcctgtcccacaaaactcccaagtcagagaacagagacaaaaaggaaaaacccaagcccgatgcatatgacatgatggttcgcgagcttggctttgaaatgaaggcgcagccctctaacaggatgaagacggaggcagaattggcaaaggaagagcaggagcacctcaggaagctggaggctgagagacttcgaagaatgcttggaaaggatgaggatgaaaatgttaagaaaccaaaacatatgtcagcagatgatctgaatgatggcttcgtgctagataaagatgacaggcgtttgctttcctacaaagatggaaagatgaatgtcgaggaagatgtccaggaagagcaaagcaaggaagccagtgaccctgagagcaacgaggaagaaggtgacagttcaggcggggaggacacagaggagagcgacagcccagatagccacttggacctggaatccaacgtggagagtgaggaagaaaacgagaagccagcaaaagagcagaggcagactcctgggaaagggttgataagcggcaaggaaagagctggaaaagctaccagagacgagctgccctacacgttcgcagcccctgaatcctatgaggaactgagatctctgttgttaggaagatcgatggaagagcagcttttggtggtggagagaattcagaagtgcaaccacccgagtctcgcagaaggaaacaaagcaaaattagaaaaactgtttggctttcttttggaatacgttggcgatttggctacagatgacccaccagacctcacagtcattgataagttggttgtgcacttatatcatctttgccagatgtttcctgaatctgcaagtgacgctatcaaatttgttctccgagatgcgatgcatgagatggaagaaatgattgagaccaaaggccgggcggcattgccagggttggatgtgctcatttatttgaaaatcactgggctgctatttccaacttccgacttctggcacccagtggtgacccctgccctcgtgtgcctcagtcagctgctcaccaagtgccccatcctgtccctccaggacgtggtgaagggcctgttcgtgtgctgcctgttcctggagtatgtggctttgtcccagaggtttatacctgagcttattaattttcttcttgggattctttacatagcaactccaaacaaagcaagccaaggttccactctggtgcaccctttcagagcgcttgggaagaactcggaactgctcgtggtgtctgctagagaggatgtggccacgtggcagcagagcagcctctccctccgctggtggtctcgaattcccgacctcaggtaa

SEQ ID NO: 140221 - DNA, 2574 bp, Artificial Sequence
  derived and/or modified sequence
atggcaaaggccaaaaaggtgggtgctcgcaggaaggcaagtggagccccagcaggtgctagaggtggcccagctaaggccaacagtaatccattcgaggtcaaagtaaacaggcagaagtttcaaatcctcgggaggaaaactcgacatgacgtgggactgccgggagtctctcgagcccgtgcactgagaaagaggactcaaactctgcttaaggagtataaggaacgtgataaatcaaatgtgtttcgggataaacggtttggcgaatataacagcaatatgtcacccgaagaaaagatgatgaaaaggtttgctctggagcagcagcgccaccatgaaaaaaagtccatttacaaccttaacgaagacgaagagctcacacactacggccagtcgttggcagacatcgagaaacacaacgacatcgtcgacagtgatagcgatgctgaggatcgcggtacactgtctgccgagctcacagccgcacacttcggagggggtggcggattgcttcacaagaaaacacaacaggaaggcgaggagcgggagaagcccaagtcacgtaaagagcttatagaagagctcattgctaagagtaaacaggagaaacgggagcgccaagcccaaagggaagatgcgctggaacttacggagaagctagatcaagactggaaggaaatacagaccctcctaagtcataagacaccaaaaagtgagaatagggacaaaaaagaaaagccgaagcccgacgcttacgatatgatggtgcgggagctgggctttgaaatgaaggctcagccttctaacaggatgaagactgaagccgagctggcgaaggaggagcaggagcatctccgcaagttagaagcggaaaggctgagaaggatgcttggtaaggacgaagacgagaacgtcaagaaaccaaagcacatgagcgctgacgacctgaatgacgggttcgttctggacaaagacgaccgcagacttctgtcctacaaggacggaaagatgaatgttgaggaggacgtccaggaagaacagagtaaggaagcttcagatcctgagagtaatgaagaagagggggattccagcgggggtgaggacaccgaggagtccgacagccccgactctcatctcgacttggaaagtaatgtggaatccgaagaagagaacgagaaaccagctaaggaacagcggcagacaccgggtaagggtttgatttcaggtaaagagcgagccggtaaggccactcgggacgagttgccatataccttcgccgctcccgaatcctacgaggagctgcgcagcttgctgcttggacgtagcatggaagaacagctccttgtggtggagcgcattcagaagtgcaatcacccttctcttgccgaggggaacaaagcaaagctagagaaactcttcgggtttttgctagagtatgtgggcgacctagccacggacgacccccctgacctgaccgtgatcgacaagctcgttgtacacctctaccacctgtgccagatgttccccgaatcagcctctgatgccattaaattcgtcctccgtgatgcgatgcatgaaatggaggaaatgattgagaccaaggggagggccgctcttccgggactcgacgtgctcatatacctcaagattaccgggttgcttttcccgacttctgatttttggcacccggtggtaacgcctgcattagtatgcctgtcccagctgctgaccaaatgtccaattctgtctctgcaagatgtggttaaggggttattcgtctgctgtttgtttcttgagtacgttgccttgagccagaggttcattcccgagctcatcaacttcctactcggcatcttatatatagccaccccgaacaaagcatctcagggctcaactctcgtgcaccccttcagggcactggggaaaaactcagagctgttggtagtgagcgcgagggaggacgtggcaacttggcagcagtcttccctgtctctgcgatgggcatctaggcttcgggctcccaccagcaccgaggcgaatcacattcggctgtcctgcctcgcggttggcctagccttactgaagaggtgcgttttgatgtatggcagtctaccaagtttccatgccattatgggcccactgcaggccctgttaaccgatcacctggcggactgctcccaccctcaggagctccaggaactttgtcagagcacactcacagagatggagagtcagaagcaactgtgtcgacctctgacctgtgagaaatcaaagccggtcccgctgaagctatttactccgagattggtgaaggttctggagtttggtaggaaacaaggatcctccaaggaggagcaggagcgcaaaaggcttatccacaaacacaagcgcgagttcaaaggagccgttagggaaataaggaaggataatcaatttttggcacggatgcaattgagcgagattatggagagggatgcagaacggaaacgcaaggtgaagcaattgttcaatagtcttgcaactcaggaaggcgagtggaaggccctcaagcgtaagaagttcaagaagtag

SEQ ID NO: 140222 - DNA, 2574 bp, Artificial Sequence
  derived and/or modified sequence
atggctaaagctaagaaagtaggagctcgcaggaaggcctccggggcacccgctggggctcgcggtggtcctgctaaggcgaactcaaatccattcgaagtgaaagttaacaggcagaaatttcagatactgggtaggaagacaagacatgatgtggggcttcccggagttagcagggccagggccctcagaaagcggacccagaccctgctcaaggaatacaaagagcgtgataaaagtaacgtgtttcgcgacaagcggtttggtgaatacaattccaatatgagccctgaggagaagatgatgaagcggtttgccctggagcaacagagacaccatgagaaaaagtctatctataatctgaatgaggacgaagaactcacacattacgggcagtccctcgcagacattgaaaaacacaacgatattgtggattcagattccgatgccgaagacaggggtaccctgtcagcagagctgacagccgcacattttggaggcggagggggacttttgcataaaaaaactcagcaggaaggggaagagagggaaaagcccaaatcccgtaaggagctgatcgaggagcttatcgcaaagagcaagcaggagaaaagagagagacaggctcaaagggaagatgccctagaactgaccgagaaacttgatcaagattggaaggaaattcagactctgctcagccataagacacccaagtcggagaatagggacaaaaaagaaaagcctaagcccgacgcttatgacatgatggtcagagagctcggtttcgaaatgaaggcccaaccttccaacagaatgaagacagaagctgagttggctaaggaggagcaagaacatctgaggaagctggaagctgaacgactccgccgtatgctcggaaaagacgaggatgagaacgtgaaaaagcccaagcacatgtctgcagatgacctgaatgacggattcgtgcttgataaggatgacaggcgattgctcagttataaggacggcaaaatgaatgtggaggaagatgttcaagaagagcagtcaaaggaagcaagcgaccccgaaagcaatgaggaggagggtgattcctcaggcggagaagataccgaagagtcagattccccggatagccacctggatctggagagtaacgtggaaagcgaagaagagaatgagaaacccgctaaagaacagcggcagacccccggtaaaggactgataagcgggaaggagcgcgctggaaaggccacgcgggatgagctgccgtatacgttcgctgcccctgagtcgtatgaggagctccggagtttattgttgggtcggagtatggaagagcaacttctggtggtggaaagaatccaaaagtgcaaccacccatcgctggcagagggcaataaggccaaattggagaaactgttcggcttcctccttgagtacgtgggggacctggccacggacgacccccctgacttgactgtcattgataagttggtcgtccatctgtatcacttgtgtcagatgtttcctgagtcggcttcggacgcaatcaaatttgtactccgagatgccatgcacgaaatggaggagatgatagaaaccaaaggcagagccgcactcccaggtctcgatgtcttgatatacctgaagattaccggcctactgttccctacatctgatttttggcatccagtggtcacacctgcattggtgtgtctgagccagctcctgaccaaatgccctatactctcactgcaggacgtggtgaagggcctctttgtctgttgcttgttcctggagtacgttgctctcagtcaaaggttcattcccgaactgatcaattttctgctggggatactgtacatagccacgcccaataaggcatctcaggggtcaacactggttcacccttttcgtgctttgggcaaaaactctgagctgttggtggtgtcagcccgagaggacgtggccacttggcagcaatcttcccttagtctcagatgggcctcccgactgagagcaccaactagtacggaggcgaatcacatcagactgagctgtcttgcagtcggcctcgcactgctgaaacgctgcgtcctgatgtatgggagtttaccgagctttcacgcaatcatgggccctcttcaggctctattgaccgatcacctagctgactgttcccacccacaggagttacaagaactgtgtcagtctacactcacggaaatggagtctcaaaaacagctgtgtagacctcttacatgcgagaaaagtaaacctgtgccactgaagctgtttacaccaaggctggtgaaggtcttggaattcggcagaaagcagggatcttctaaggaggagcaggagcgaaagcggctcatacacaagcacaagcgtgagtttaagggtgccgttagagagatccgcaaagacaatcagtttctcgccaggatgcagttaagtgagatcatggaacgcgatgctgagcgaaaacggaaagtcaaacagctgttcaactccctagctacacaggaaggcgaatggaaggccctgaaacggaaaaagtttaagaaatag

SEQ ID NO: 140223 - DNA, 1728 bp, Artificial Sequence
  derived and/or modified sequence
atgaagcggttcgctctggagcagcagagacaccacgaaaagaagtccatctataatctgaatgaggatgaggaacttactcattatggccagtctctcgcagacatcgagaaacacaacgacattgtagacagcgattcagacgctgaagataggggcaccttatctgctgagttgactgcggcacactttggcggtgggggaggtctgctgcacaaaaagactcagcaggaaggggaggaaagagagaagccgaagagccggaaggaactaattgaagaactcatcgcaaagtccaagcaggagaaaagagagagacaggctcagcgtgaggacgcactcgaacttaccgagaaactggaccaagattggaaggaaattcaaactttattgagccacaaaacccccaaaagcgaaaatagagataaaaaggagaagcctaaacctgatgcttatgacatgatggttcgtgaactgggcttcgagatgaaggcccagccttccaatcgtatgaaaactgaggcagaactcgcaaaggaagagcaggagcatctgagaaagctcgaggcagaacgcctgcgcaggatgctcgggaaagatgaggatgagaatgttaagaaacccaagcacatgagtgctgatgacctgaatgatggcttcgtcctggataaagatgaccgcagactgctctcctacaaggatgggaaaatgaatgtcgaagaggacgttcaagaggagcagagcaaagaagctagcgaccccgaatccaacgaagaagaaggggattctagtggcggtgaagatacggaagagtctgacagcccagactcccatctggatctggagtccaatgttgaatccgaggaggagaacgaaaagccagccaaggagcagcggcaaacccctgggaagggtctgatttcggggaaggagcgggctggcaaagctacccgagatgaacttccctacaccttcgccgcacctgaatcatatgaggaactgaggtctctcctactgggaaggtcaatggaggaacagctgttagtcgtagaaagaatacagaagtgtaaccatcccagcctagcggaggggaataaagccaagttggagaaacttttcgggtttctcctggagtacgtgggagacttagccacagatgacccacctgatctgacagtgattgacaaattggttgtccatctgtaccacctgtgccagatgttcccagaaagcgcatctgacgccatcaagttcgtgctccgtgacgccatgcacgagatggaggaaatgattgagaccaagggacgtgcagctctcccaggactggatgtgctcatttacctgaagattactggcctgctgttccccacttccgacttctggcacccagtggtcacgcccgcactagtctgtttatctcagctcctcaccaaatgccctattctgtccctgcaagacgttgtgaaagggctctttgtgtgctgcctgttcctggaatacgtggccctttcccagcgctttatcccagagttgattaattttctgctagggattttgtatatcgccacccctaacaaagccagtcagggttccacactcgtgcatcctttccgcgctctggggaagaattccgagctgttagtggtttcagcaagggaggacgtcgctacttggcagcagagttcactctccctacgctggtggagcaggattccagatctcaggtag

SEQ ID NO: 140224 - DNA, 2574 bp, Artificial Sequence
  derived and/or modified sequence
atggccaaggccaagaaggtgggcgccagaagaaaggccagcggcgcccccgccggcgccagaggcggccccgccaaggccaacagcaaccccttcgaggtgaaggtgaacagacagaagttccagatcctgggcagaaagaccagacacgacgtgggcctgcccggcgtgagcagagccagagccctgagaaagagaacccagaccctgctgaaggagtacaaggagagagacaagagcaacgtgttcagagacaagagattcggcgagtacaacagcaacatgagccccgaggagaagatgatgaagagattcgccctggagcagcagagacaccacgagaagaagagcatctacaacctgaacgaggacgaggagctgacccactacggccagagcctggccgacatcgagaagcacaacgacatcgtggacagcgacagcgacgccgaggacagaggcaccctgagcgccgagctgaccgccgcccacttcggcggcggcggcggcctgctgcacaagaagacccagcaggagggcgaggagagagagaagcccaagagcagaaaggagctgatcgaggagctgatcgccaagagcaagcaggagaagagagagagacaggcccagagagaggacgccctggagctgaccgagaagctggaccaggactggaaggagatccagaccctgctgagccacaagacccccaagagcgagaacagagacaagaaggagaagcccaagcccgacgcctacgacatgatggtgagagagctgggcttcgagatgaaggcccagcccagcaacagaatgaagaccgaggccgagctggccaaggaggagcaggagcacctgagaaagctggaggccgagagactgagaagaatgctgggcaaggacgaggacgagaacgtgaagaagcccaagcacatgagcgccgacgacctgaacgacggcttcgtgctggacaaggacgacagaagactgctgagctacaaggacggcaagatgaacgtggaggaggacgtgcaggaggagcagagcaaggaggccagcgaccccgagagcaacgaggaggagggcgacagcagcggcggcgaggacaccgaggagagcgacagccccgacagccacctggacctggagagcaacgtggagagcgaggaggagaacgagaagcccgccaaggagcagagacagacccccggcaagggcctgatcagcggcaaggagagagccggcaaggccaccagagacgagctgccctacaccttcgccgcccccgagagctacgaggagctgagaagcctgctgctgggcagaagcatggaggagcagctgctggtggtggagagaatccagaagtgcaaccaccccagcctggccgagggcaacaaggccaagctggagaagctgttcggcttcctgctggagtacgtgggcgacctggccaccgacgacccccccgacctgaccgtgatcgacaagctggtggtgcacctgtaccacctgtgccagatgttccccgagagcgccagcgacgccatcaagttcgtgctgagagacgccatgcacgagatggaggagatgatcgagaccaagggcagagccgccctgcccggcctggacgtgctgatctacctgaagatcaccggcctgctgttccccaccagcgacttctggcaccccgtggtgacccccgccctggtgtgcctgagccagctgctgaccaagtgccccatcctgagcctgcaggacgtggtgaagggcctgttcgtgtgctgcctgttcctggagtacgtggccctgagccagagattcatccccgagctgatcaacttcctgctgggcatcctgtacatcgccacccccaacaaggccagccagggcagcaccctggtgcaccccttcagagccctgggcaagaacagcgagctgctggtggtgagcgccagagaggacgtggccacctggcagcagagcagcctgagcctgagatgggccagcagactgagagcccccaccagcaccgaggccaaccacatcagactgagctgcctggccgtgggcctggccctgctgaagagatgcgtgctgatgtacggcagcctgcccagcttccacgccatcatgggccccctgcaggccctgctgaccgaccacctggccgactgcagccacccccaggagctgcaggagctgtgccagagcaccctgaccgagatggagagccagaagcagctgtgcagacccctgacctgcgagaagagcaagcccgtgcccctgaagctgttcacccccagactggtgaaggtgctggagttcggcagaaagcagggcagcagcaaggaggagcaggagagaaagagactgatccacaagcacaagagagagttcaagggcgccgtgagagagatcagaaaggacaaccagttcctggccagaatgcagctgagcgagatcatggagagagacgccgagagaaagagaaaggtgaagcagctgttcaacagcctggccacccaggagggcgagtggaaggccctgaagagaaagaagttcaagaagtag

SEQ ID NO: 140225 - DNA, 1728 bp, Artificial Sequence
  derived and/or modified sequence
atgaagagattcgccctggagcagcagagacaccacgagaagaagagcatctacaacctgaacgaggacgaggagctgacccactacggccagagcctggccgacatcgagaagcacaacgacatcgtggacagcgacagcgacgccgaggacagaggcaccctgagcgccgagctgaccgccgcccacttcggcggcggcggcggcctgctgcacaagaagacccagcaggagggcgaggagagagagaagcccaagagcagaaaggagctgatcgaggagctgatcgccaagagcaagcaggagaagagagagagacaggcccagagagaggacgccctggagctgaccgagaagctggaccaggactggaaggagatccagaccctgctgagccacaagacccccaagagcgagaacagagacaagaaggagaagcccaagcccgacgcctacgacatgatggtgagagagctgggcttcgagatgaaggcccagcccagcaacagaatgaagaccgaggccgagctggccaaggaggagcaggagcacctgagaaagctggaggccgagagactgagaagaatgctgggcaaggacgaggacgagaacgtgaagaagcccaagcacatgagcgccgacgacctgaacgacggcttcgtgctggacaaggacgacagaagactgctgagctacaaggacggcaagatgaacgtggaggaggacgtgcaggaggagcagagcaaggaggccagcgaccccgagagcaacgaggaggagggcgacagcagcggcggcgaggacaccgaggagagcgacagccccgacagccacctggacctggagagcaacgtggagagcgaggaggagaacgagaagcccgccaaggagcagagacagacccccggcaagggcctgatcagcggcaaggagagagccggcaaggccaccagagacgagctgccctacaccttcgccgcccccgagagctacgaggagctgagaagcctgctgctgggcagaagcatggaggagcagctgctggtggtggagagaatccagaagtgcaaccaccccagcctggccgagggcaacaaggccaagctggagaagctgttcggcttcctgctggagtacgtgggcgacctggccaccgacgacccccccgacctgaccgtgatcgacaagctggtggtgcacctgtaccacctgtgccagatgttccccgagagcgccagcgacgccatcaagttcgtgctgagagacgccatgcacgagatggaggagatgatcgagaccaagggcagagccgccctgcccggcctggacgtgctgatctacctgaagatcaccggcctgctgttccccaccagcgacttctggcaccccgtggtgacccccgccctggtgtgcctgagccagctgctgaccaagtgccccatcctgagcctgcaggacgtggtgaagggcctgttcgtgtgctgcctgttcctggagtacgtggccctgagccagagattcatccccgagctgatcaacttcctgctgggcatcctgtacatcgccacccccaacaaggccagccagggcagcaccctggtgcaccccttcagagccctgggcaagaacagcgagctgctggtggtgagcgccagagaggacgtggccacctggcagcagagcagcctgagcctgagatggtggagcagaatccccgacctgagatag

SEQ ID NO: 140226 - protein, 571 aa, Artificial Sequence
  derived and/or modified sequence
MENVKEIFGQTIIHHHIPFNWDCEFIRLHFGHNRKKHLNYTEFTQFLQELQLEHARQAFALKDKSKSGMISGLDFSDIMVTIRSHMLTPFVEENLVSAAGGSISHQVSFSYFNAFNSLLNNMELVRKIYSTLAGTRKDVEVTKEEFAQSAIRYGQVTPLEIDILYQLADLYNASGRLTLADIERIAPLAEGALPYNLAELQRQQSPGLGRPIWLQIAESAYRFTLGSVAGAVGATAVYPIDLVKTRMQNQRGSGSVVGELMYKNSFDCFKKVLRYEGFFGLYRGLIPQLIGVAPEKAIKLTVNDFVRDKFTRRDGSVPLPAEVLAGGCAGGSQVIFTNPLEIVKIRLQVAGEITTGPRVSALNVLRDLGIFGLYKGAKACFLRDIPFSAIYFPVYAHCKLLLADENGHVGGLNLLAAGAMAGVPAASLVTPADVIKTRLQVAARAGQTTYSGVIDCFRKILREEGPSAFWKGTAARVFRSSPQFGVTLVTYELLQRWFYIDFGGLKPAGSEPTPKSRIADLPPANPDHIGGYRLATATFAGIENKFGLYLPKFKSPSVAVVQPKAAVAATQ

SEQ ID NO: 140227 - protein, 678 aa, Artificial Sequence
  derived and/or modified sequence
MAVKVQTTKRGDPHELRNIFLQYASTEVDGERYMTPEDFVQRYLGLYNDPNSNPKIVQLLAGVADQTKDGLISYQEFLAFESVLCAPDSMFIVAFQLFDKSGNGEVTFENVKEIFGQTIIHHHIPFNWDCEFIRLHFGHNRKKHLNYTEFTQFLQELQLEHARQAFALKDKSKSGMISGLDFSDIMVTIRSHMLTPFVEENLVSAAGGSISHQVSFSYFNAFNSLLNNMELVRKIYSTLAGTRKDVEVTKEEFAQSAIRYGQVTPLEIDILYQLADLYNASGRLTLADIERIAPLAEGALPYNLAELQRQQSPGLGRPIWLQIAESAYRFTLGSVAGAVGATAVYPIDLVKTRMQNQRGSGSVVGELMYKNSFDCFKKVLRYEGFFGLYRGLIPQLIGVAPEKAIKLTVNDFVRDKFTRRDGSVPLPAEVLAGGCAGGSQVIFTNPLEIVKIRLQVAGEITTGPRVSALNVLRDLGIFGLYKGAKACFLRDIPFSAIYFPVYAHCKLLLADENGHVGGLNLLAAGAMAGVPAASLVTPADVIKTRLQVAARAGQTTYSGVIDCFRKILREEGPSAFWKGTAARVFRSSPQFGVTLVTYELLQRWFYIDFGGLKPAGSEPTPKSRIADLPPANPDHIGGYRLATATFAGIENKFGLYLPKFKSPSVAVVQPKAAVAATQ

SEQ ID NO: 140228 - DNA, 2037 bp, Artificial Sequence
  derived and/or modified sequence
atggcagtcaaagtacaaacgactaaaaggggcgacccacatgaactcagaaacatctttctgcaatacgcctctacagaggttgacggagagcggtatatgacccccgaagactttgtgcagagatatctcgggctgtacaacgaccctaactctaatcccaaaatcgtgcagctactcgcaggcgtggccgatcagacgaaagacggcctgattagctaccaggagtttctggccttcgagtccgttctctgcgcacccgatagcatgtttattgtagctttccagctgtttgacaagtcagggaatggagaggtaacttttgagaatgtgaaggaaattttcggccagactatcatccaccaccacatcccctttaactgggattgtgagttcatcaggctgcattttggccacaatcgtaagaaacaccttaattacactgagtttacacagttccttcaggagcttcaactagaacacgcccgacaagccttcgcactgaaagacaagtctaaatctgggatgatttccggcttggacttttccgatattatggtaaccatccgcagccatatgctcactccttttgtggaagagaacttggtatccgccgccggtggttccatatcccaccaagtgtccttcagctacttcaatgctttcaatagcctgctgaacaatatggaattggtgaggaaaatctactcaactctggctggtacccgcaaggatgtcgaagtcacaaaagaagagtttgcccaatctgcaattcgctatggccaggtgacacctttggagatcgacatcttgtaccaactcgctgatttgtataacgcttctggtcggctcacgctcgcagacatcgagcgcatcgcccccttggcagagggggcactgccatacaacctcgcagagctccaacgacaacaatcccctggactaggcaggcccatatggctgcagattgccgagtctgcttataggttcacactgggttctgtcgctggagcggtaggcgctacagcagtgtacccaattgatctggtcaaaacaaggatgcagaatcaaaggggctcggggtctgtggtaggggagctgatgtataaaaattctttcgattgctttaagaaggtccttagatacgaaggcttctttggtctctataggggcttaataccacagctaatcggcgtcgctcctgagaaagccatcaagctgactgtgaacgattttgtccgggataaattcactcgtagagacgggagcgtgcccctcccagccgaagtactagccggcggctgtgcgggaggctctcaagtcatttttaccaaccccctggagatcgtaaagatcagactgcaggtggccggcgaaattacaactggaccgcgtgtctcagctctgaatgtgctgagagatttaggtatatttggactgtacaagggggctaaagcgtgttttctcagggatatcccctttagcgccatatactttcccgtatatgcccattgtaaattgcttctcgctgatgagaatggccatgtgggtgggctgaatctcttggccgctggcgccatggccggagtaccagctgcgtcactcgttacccccgctgacgtgattaagacacgtctacaggttgcagcaagagccggtcaaaccacttattctggagtcatagactgctttaggaagatactccgcgaagaagggccttctgccttttggaagggcactgccgcccgggtgttccggagtagtccacagtttggagtgaccctggtcacatacgagcttttgcagaggtggttctacatcgactttggcggtctgaagccagccgggagcgaacctactccgaaaagccgtattgcagaccttccacccgcaaatcccgatcacataggtggttatagacttgccacagccacatttgcgggaattgaaaataagttcggcctctatttgcccaaatttaagtcccccagtgttgccgttgtgcagcccaaggccgctgtcgccgcaactcagtag

SEQ ID NO: 140229 - DNA, 2037 bp, Artificial Sequence
  derived and/or modified sequence
atggctgtgaaggtgcagaccaccaagagaggagacccccatgagctgaggaacatcttcctgcagtatgccagcacagaggtggatggagagcgctacatgaccccagaagattttgtgcagcgctacctgggcctgtacaatgaccccaacagcaaccccaagatcgtgcagctgctggccggcgtggccgaccagaccaaggatggcctcatctcctaccaggagttcctggcctttgagagcgtgctgtgtgccccagacagcatgttcatcgtggccttccagctgtttgacaagtctggaaatggagaggtgacctttgaaaatgtgaaggagatcttcggccagaccatcatccaccaccacatccccttcaactgggactgtgagttcatccggctgcacttcggccacaacaggaagaagcacctgaactacacagagttcacccagttcctgcaggagctgcagctggagcacgcccggcaggcctttgccctgaaggacaagagcaagagcggcatgatcagcggcctggacttcagtgacatcatggtgaccatccgcagccacatgctgaccccatttgtggaggagaacctggtgtctgctgctgggggcagcatcagccaccaggtgtccttctcctacttcaatgccttcaacagcctgctgaacaacatggagctggtgaggaagatctacagcaccctggccggcaccaggaaggatgtggaggtgaccaaggaggagtttgcccagagcgccatccgctatggccaggtgacccccctggagattgacatcctgtaccagctggccgacctgtacaatgccagcggccgcctgaccctggccgacatcgagcgcatcgcccccctggccgagggcgccctgccctacaacctggccgagctgcagaggcagcagagccctggcctgggccggcccatctggctgcagattgctgagagcgcctaccgcttcaccctgggctctgtggccggggctgtgggcgccacagctgtgtaccccatcgacctggtgaagaccaggatgcagaaccagaggggcagcggctctgtggtgggggagctgatgtacaagaacagctttgactgcttcaagaaggtgctgcgctatgagggcttcttcggcctgtaccggggcctcatcccccagctgattggagtggcccctgagaaggccatcaagctgactgtgaatgactttgtgcgggacaagttcaccaggagagatggctctgtgcccctgcctgctgaggtgctggccggcggctgtgccggcggcagccaggtgatcttcaccaaccccctggagatcgtgaagatccggctgcaggtggccggggagatcaccaccggcccccgggtgtctgccctgaatgtgctgcgggacctgggcatcttcggcctgtacaagggggccaaggcctgcttcctgcgggacatccccttcagcgccatctacttccctgtgtatgcccactgcaagctgctgctggctgatgaaaatggacatgtgggcggcctgaacctgctggccgccggggccatggccggcgtgcctgctgccagcctggtgaccccagcagatgtgatcaagacccggctgcaggtggccgcccgggccggccagaccacctacagcggcgtgattgactgcttcaggaagatcctgcgggaggagggccccagcgccttctggaagggcacagctgcccgggtcttccgcagcagcccccagtttggagtgaccctggtgacctatgagctgctgcagcgctggttctacatcgactttggaggcctgaagccagctggcagcgagcccacccccaagagcagaattgctgacctgcccccagccaacccagaccacatcggcggctaccgcctggccacagccacctttgctggcatcgagaacaagtttggcctgtacctgcccaagttcaagagccccagcgtggccgtggtgcagcccaaggctgctgtggccgccacccagtag

SEQ ID NO: 140230 - DNA, 2037 bp, Artificial Sequence
  derived and/or modified sequence
atggccgtgaaggtgcagaccaccaagcggggcgacccccacgagctgaggaatatcttcctgcagtacgcctccaccgaggtcgacggcgaaagatatatgacccccgaggactttgtgcagcgttacctgggtttgtacaatgaccctaactctaacccaaagatagtacaacttttggccggggtcgcagatcagacgaaagacgggctgatatcctaccaggagtttctcgcatttgagtcagtgctatgcgctcccgactccatgttcatcgtggcattccagttgttcgataaatccggcaacggagaagtgacctttgaaaatgtgaaagagatcttcggacagacgatcatacatcaccacattccgttcaattgggattgcgaattcatccgtctgcactttggccataatcgcaagaagcacctgaattatactgagtttacccagttcctccaggagctgcagttggagcatgcccggcaggcctttgccctgaaggacaagtctaagtctggtatgattagtggcttagacttctctgacataatggttaccattcgaagccacatgttaactcccttcgtagaagagaacttggtgtccgcagccggcggcagtatatcgcatcaggttagtttctcctactttaatgccttcaatagtctgcttaataacatggagctggtgcgcaaaatctacagtacactagcagggacccgcaaggacgtggaggtgactaaagaagaatttgcccaatcagccatcagatacggccaagtgactcccttggaaatcgacatactttaccagctggccgatttgtataacgcatcagggagacttaccctggctgatattgagcgaattgccccactagcagagggggccctgccctacaatctggctgaactacagagacaacagtctccgggcctcggacgtcctatctggctgcaaatcgctgagagcgcttatcgttttaccttagggtctgtggctggagccgtgggtgctacagccgtctatccaatagacctggtcaaaactcgaatgcagaaccagcgaggatcggggagtgtcgtgggcgagcttatgtacaagaatagttttgactgcttcaagaaggtcttgcggtatgagggcttctttgggctgtacagagggttaattccgcagctcataggcgtggcccctgagaaggcaattaaactaactgtcaacgactttgttcgtgacaagttcacaagaagagatggctccgttcccctgcctgccgaagtgctcgctggaggttgcgccggtgggtcgcaagttatttttacgaacccattagagatagtgaaaattaggctacaggtcgctggcgagatcaccactggccccagggtgagtgcgttgaacgtgcttcgcgatctgggtatctttggactttacaagggggctaaggcctgtttcctgcgagatattcccttttccgcaatctactttcccgtctacgctcattgcaagctcttgttggcagatgaaaacggtcacgtgggcgggctcaatttattagccgctggcgctatggccggagtcccagcggcgtccctcgtgacacctgctgacgtgattaagaccagactgcaggtcgccgcccgtgctggccagaccacatacagcggcgtcatcgactgcttcagaaagattctcagagaggaagggccttccgccttctggaaggggactgctgcaagggtgttcagatccagccctcaatttggagtcactctggtgacctacgagctactgcagcgctggttttacatagattttggcggcttgaaacctgctggcagcgaacccactcccaagtctcgaatcgctgatctacctcccgcaaaccctgaccacataggaggttacaggcttgcaacggcaactttcgctggaatcgagaataaattcggtctctacttgccaaaatttaagtcccccagcgtcgcggtcgtccagccaaaagccgccgtggctgctacccagtag

SEQ ID NO: 140231 - DNA, 2037 bp, Artificial Sequence
  derived and/or modified sequence
atggccgtcaaggtgcagactacgaaacgcggagacccccatgaattgagaaacatcttcctccaatacgccagcaccgaagtcgacggtgagcgatatatgaccccagaagacttcgtgcagagatacctgggactctataacgaccccaactccaaccccaaaatcgtgcagctgttggcaggggtggcagatcagacaaaggatggtctgattagctatcaggagttcttagctttcgagtctgtgctatgcgccccagactcaatgttcatcgtcgcgttccagctgttcgataagagtggcaacggggaagtcactttcgagaacgtgaaagaaatcttcgggcaaaccattattcaccatcacatcccattcaactgggactgtgagttcatccgcctccattttggtcataacagaaaaaagcacctgaattatacagaattcacacagtttctgcaggaattgcagctggagcacgccaggcaagcctttgctcttaaagataagtccaagtcagggatgatctccggcctggacttcagcgatatcatggtgacaatccgcagtcacatgttgaccccttttgttgaggagaacctggtcagtgctgctggcggatctatcagtcaccaggtatcgttttcatactttaacgctttcaacagccttctcaacaacatggagctggtcagaaagatctactccacactcgccggaacacgcaaggatgtggaagttaccaaggaggagttcgctcagtccgcaatccgctatggacaggtgacccctctcgagattgacatattgtatcagctggcagatctgtacaatgcaagcggaagactgaccttagctgatatagagcgaattgccccactagctgagggagccctcccatataatctggccgaactccagaggcagcagtcgccgggtctcggccgtcccatctggctccagatcgccgagtccgcttatcgctttacgctcgggtccgtcgcaggcgctgtgggggctaccgccgtatatcccattgacctggtaaagacccgcatgcagaaccagaggggaagtggctccgtcgtcggggagctgatgtataagaacagtttcgactgctttaagaaggtgctaagatatgaggggttttttggcctatatcgagggttgatacctcaactgatcggcgtggctccagaaaaagccattaaactcaccgtcaacgattttgttagagacaaatttactcggcgagatggtagcgtccctcttcccgcagaagtgctcgctggaggatgcgcagggggaagccaagtcatttttacaaatcccctggagatcgtgaagattcgactgcaggtagcaggagagattactactgggcctcgcgtgagtgctctgaatgtgctgcgtgacctcgggatcttcggcctgtacaaaggagcaaaggcttgctttctgcgagatatccctttttcagccatatacttccccgtgtatgcacactgcaaactacttttggctgatgagaatgggcatgttggtggcttgaatcttctagcagccggtgcgatggcaggcgtaccagctgcaagcctcgtcactccagccgatgttatcaaaacacgtctgcaggtggccgcacgtgccggacagactacctattcgggtgtgatagattgctttcgaaaaatccttagagaagaaggaccctccgctttttggaaaggaacagccgctcgagttttccgctcatcaccccagttcggggtaactctcgtgacctatgaactgctgcagcgatggttctacattgatttcgggggactgaagccagcaggcagcgaacccacccccaaaagccgtatagcggatcttccacccgcaaacccagaccacatcggaggctatcgcctggcaaccgctacatttgccggaattgagaacaaatttggcttatacctgcctaaattcaaatcaccatcagttgctgtggtgcagccaaaagcggctgttgctgctacccagtag

SEQ ID NO: 140232 - DNA, 2979 bp, Artificial Sequence
  derived and/or modified sequence
gctcgctcactcgctcgtccccggcttccgagcacagcatggcggtcaaggtgcagacaactaagcgaggggatcctcatgagttaagaaacatatttctacagtatgccagtactgaggttgatggagagcgttatatgaccccagaagactttgttcagcgctatcttggactgtataatgatccaaatagtaacccaaagatcgtgcagctcttggcaggagtagctgatcaaaccaaggatgggttgatctcctatcaagagtttttggcatttgaatctgttttatgtgctccagattccatgttcatagtggctttccagttgtttgacaagagtggaaatggagaggtgacatttgaaaatgtcaaagaaatttttggacagactattattcatcatcatatcccttttaactgggattgtgaatttatccgactgcattttgggcataaccggaagaagcatcttaactacacagaattcacgcagtttctccaggagctgcaattggaacatgcaagacaagcctttgcactcaaagacaaaagcaaaagtggcatgatttctggtctggatttcagtgacatcatggttaccattagatctcacatgcttactccttttgtggaggagaacttagtttcagcagctggaggaagtatctcacaccaggttagcttctcctacttcaatgcatttaactcgttactgaataacatggagcttgttcgtaagatatatagcactctagctggcacaaggaaagatgttgaagtcacaaaggaggaatttgcccagagtgccatacgctatggacaagtcacaccactagaaattgatattctatatcagcttgcagacttatataatgcttcagggcgcttgactttggcagatattgagagaatagccccattggctgagggggccttaccttacaacctggcagaacttcagagacagcagtctcctgggttaggcaggcctatctggctccagattgccgagtctgcttacagattcactctgggctcagttgctggagctgtgggagccactgcagtgtatcctatagatctggtgaagacccgaatgcaaaaccagcgtggctctggctctgttgttggggagctaatgtacaaaaacagctttgactgttttaagaaagtcttgcgttatgagggcttctttggactctacaggggtctgataccacaacttataggggttgctccagaaaaggccattaaactgactgttaatgattttgttcgggacaaatttaccagaagagatggctctgttccacttccagcagaagttcttgctggaggctgtgctggaggctctcaggtcatttttaccaacccattggagatagtgaagattcgtctgcaagtagctggagagatcaccacgggacccagagtcagcgccctgaatgtgctccgggacttgggaatttttggtctgtataagggtgccaaagcgtgtttcctccgagacattcccttctctgcaatctattttcctgtttatgctcattgcaaactacttctggctgatgaaaatggacacgtgggaggtttaaatcttcttgcagctggagccatggcaggtgtcccagctgcatctctggtgacccctgctgatgtcatcaagacaagactgcaggtggctgcccgcgctggccagacgacatacagtggtgtcatcgactgtttcaggaagattctccgggaagaagggccctcagcattttggaaagggactgcagctcgagtgtttcgatcctctccccagtttggtgttaccttggtcacttatgaacttctccagcggtggttttacattgattttggaggcctcaaacccgctggttcagaaccaacacctaagtcacgcattgcagaccttcctcctgccaaccctgatcacatcggtggatacagactcgccacagccacgtttgcaggcatcgaaaacaaatttggcctttatctcccgaaatttaagtctcctagtgttgctgtggttcagccaaaggcagcagtggcagccactcagtgatgagacaactgttgagtgtggcaaaatggcgccttgaagaaagaggcctaggagagcagccctgtaatgtatccagtcagctgcatggtactgactgagctgaggagtcaaactcttctttctgtatgacatatacatatacttgtttataaaataatcatttgcccagggaaaaaaccacaacgctgtttcaagctttagtcttatgtgttgaaatgtttttgtaagccttggcatgaattagtgttctagactctgctttgcacagcttgcacttacagtgattgtacatattgtacatctttgtacagagacatcttggcacctcatcccaacaaatcacatttgtagaaatgtaatgcggttctgagtggcttgaaatgtacagaatgttttgaaagtgttttattaagaatcacacaaaaataaatgtattaaaattaaattcattctcttattggtgacttatggaaataaagcatcaatattggatgtatttaattcctagtttgttttccattctggaataaaaaggtatttgctgataaaaggcataacgagacatagtgctgctaccactgaataagtgatactttggaaagatgcatgccagtggatgccagaggaccaggctaatgacttgtgtgtgctgatgtgtttccatttgtatttaatgtgtgtagaccctcctctgttcatcaatcaaaaagcatttcctaggcagctcctcgcctgtcagtgtgcatatggaaacagggacatctccatcattactggcttagttttgctttcctttgacacagtaaggcaaaggccaagctttcaaaagagtaaaggatactttcacaatttcccttcatatggatatgattccagtcaaaaataaaatgcacaccaaaatgta

SEQ ID NO: 140233 - DNA, 2037 bp, Artificial Sequence
  derived and/or modified sequence
atggccgtgaaggtgcagaccaccaagagaggcgacccccacgagctgagaaacatcttcctgcagtacgccagcaccgaggtggacggcgagagatacatgacccccgaggacttcgtgcagagatacctgggcctgtacaacgaccccaacagcaaccccaagatcgtgcagctgctggccggcgtggccgaccagaccaaggacggcctgatcagctaccaggagttcctggccttcgagagcgtgctgtgcgcccccgacagcatgttcatcgtggccttccagctgttcgacaagagcggcaacggcgaggtgaccttcgagaacgtgaaggagatcttcggccagaccatcatccaccaccacatccccttcaactgggactgcgagttcatcagactgcacttcggccacaacagaaagaagcacctgaactacaccgagttcacccagttcctgcaggagctgcagctggagcacgccagacaggccttcgccctgaaggacaagagcaagagcggcatgatcagcggcctggacttcagcgacatcatggtgaccatcagaagccacatgctgacccccttcgtggaggagaacctggtgagcgccgccggcggcagcatcagccaccaggtgagcttcagctacttcaacgccttcaacagcctgctgaacaacatggagctggtgagaaagatctacagcaccctggccggcaccagaaaggacgtggaggtgaccaaggaggagttcgcccagagcgccatcagatacggccaggtgacccccctggagatcgacatcctgtaccagctggccgacctgtacaacgccagcggcagactgaccctggccgacatcgagagaatcgcccccctggccgagggcgccctgccctacaacctggccgagctgcagagacagcagagccccggcctgggcagacccatctggctgcagatcgccgagagcgcctacagattcaccctgggcagcgtggccggcgccgtgggcgccaccgccgtgtaccccatcgacctggtgaagaccagaatgcagaaccagagaggcagcggcagcgtggtgggcgagctgatgtacaagaacagcttcgactgcttcaagaaggtgctgagatacgagggcttcttcggcctgtacagaggcctgatcccccagctgatcggcgtggcccccgagaaggccatcaagctgaccgtgaacgacttcgtgagagacaagttcaccagaagagacggcagcgtgcccctgcccgccgaggtgctggccggcggctgcgccggcggcagccaggtgatcttcaccaaccccctggagatcgtgaagatcagactgcaggtggccggcgagatcaccaccggccccagagtgagcgccctgaacgtgctgagagacctgggcatcttcggcctgtacaagggcgccaaggcctgcttcctgagagacatccccttcagcgccatctacttccccgtgtacgcccactgcaagctgctgctggccgacgagaacggccacgtgggcggcctgaacctgctggccgccggcgccatggccggcgtgcccgccgccagcctggtgacccccgccgacgtgatcaagaccagactgcaggtggccgccagagccggccagaccacctacagcggcgtgatcgactgcttcagaaagatcctgagagaggagggccccagcgccttctggaagggcaccgccgccagagtgttcagaagcagcccccagttcggcgtgaccctggtgacctacgagctgctgcagagatggttctacatcgacttcggcggcctgaagcccgccggcagcgagcccacccccaagagcagaatcgccgacctgccccccgccaaccccgaccacatcggcggctacagactggccaccgccaccttcgccggcatcgagaacaagttcggcctgtacctgcccaagttcaagagccccagcgtggccgtggtgcagcccaaggccgccgtggccgccacccagtag

SEQ ID NO: 140234 - protein, 527 aa, Artificial Sequence
  derived and/or modified sequence
MGSSEVSIIPGLQKEEKAAVERRRLHVLKALKKLRIEADEAPVVAVLGSGGGLRAHIACLGVLSEMKEQGLLDAVTYLAGVSGSTWAISSLYTNDGDMEALEADLKHRFTRQEWDLAKSLQKTIQAARSENYSLTDFWAYMVISKQTRELPESHLSNMKKPVEEGTLPYPIFAAIDNDLQPSWQEARAPETWFEFTPHHAGFSALGAFVSITHFGSKFKKGRLVRTHPERDLTFLRGLWGSALGNTEVIREYIFDQLRNLTLKGLWRRAVANAKSIGHLIFARLLRLQESSQGEHPPPEDEGGEPEHTWLTEMLENWTRTSLEKQEQPHEDPERKGSLSNLMDFVKKTGICASKWEWGTTHNFLYKHGGIRDKIMSSRKHLHLVDAGLAINTPFPLVLPPTREVHLILSFDFSAGDPFETIRATTDYCRRHKIPFPQVEEAELDLWSKAPASCYILKGETGPVVMHFPLFNIDACGGDIEAWSDTYDTFKLADTYTLDVVVLLLALAKKNVRENKKKILRELMNVAG

SEQ ID NO: 140235 - protein, 541 aa, Artificial Sequence
  derived and/or modified sequence
MGSSEVSIIPGLQKEEKAAVERRRLHVLKALKKLRIEADEAPVVAVLGSGGGLRAHIACLGVLSEMKEQGLLDAVTYLAGVSGSTWAISSLYTNDGDMEALEADLKHRFTRQEWDLAKSLQKTIQAARSENYSLTDFWAYMVISKQTRELPESHLSNMKKPVEEGTLPYPIFAAIDNDLQPSWQEARAPETWFEFTPHHAGFSALGAFVSITHFGSKFKKGRLVRTHPERDLTFLRGLWGSALGNTEVIREYIFDQLRNLTLKGLWRRAVANAKSIGHLIFARLLRLQESSQGEHPPPEDEGGEPEHTWLTEMLENWTRTSLEKQEQPHEDPERKGSLSNLMDFVKKTGICASKWEWGTTHNFLYKHGGIRDKIMSSRKHLHLVDAGLAINTPFPLVLPPTREVHLILSFDFSAGDPFETIRATTDYCRRHKIPFPQVEEAELDLWSKAPASCYILKGETGPVVMHFPLFNIDACGGDIEAWSDTYDTFKLADTYTLDVVVLLLALAKKNVRENKKKILRELMNVAGLYYPKDSARSCCLA

SEQ ID NO: 140236 - DNA, 1626 bp, Artificial Sequence
  derived and/or modified sequence
atgggctcttccgaagtttccatcatcccagggctgcagaaggaagaaaaggctgccgtggaacgccgccgtctccacgttttaaaagccctgaaaaagctgcgcatcgaagctgacgaggcccctgtggttgctgtacttgggagcggtggcggcctaagggcccacatcgcatgtttgggagtgttgagcgaaatgaaagagcagggactgctggatgcagtgacctatctcgctggcgtgagcggttcaacttgggcaatcagcagcttatacaccaatgatggcgacatggaagcccttgaggcggacctgaagcataggtttacaagacaagagtgggatctggcaaagtccttgcagaagaccattcaggcagcgcgatctgagaattattctctcaccgatttttgggcatacatggtgatttcaaagcagacccgtgagctcccagagagtcacctgtccaacatgaagaagcctgtagaagagggcactctgccctacccaatctttgcggctatagataatgatctgcagccatcctggcaggaagcccgggctccggagacttggttcgaattcacacctcatcacgctggattctctgcccttggggcctttgtatctatcactcattttgggagcaaatttaagaagggacgtctcgtccgcactcatcccgaaagggaccttacattcctaaggggcctgtgggggagcgccctcggtaatactgaggtaatcagggaatatatattcgatcagctcagaaatttgacgttgaagggcctgtggcgcagagccgttgccaacgctaagagcattggccatctaatcttcgccaggttgctgcggcttcaggagtccagccaaggcgaacaccccccacccgaggacgaggggggggagcctgagcacacgtggttgacggagatgctcgagaactggactaggacctctctggaaaagcaagagcagccacatgaagacccagaacggaagggatccctaagcaacttgatggactttgttaaaaaaaccggcatctgtgcctctaagtgggagtggggcacaacacacaattttttatacaagcatgggggtattcgtgataagataatgagcagtcggaagcatctacatctggtcgacgctgggctggccattaatacaccttttcctctggtgctgcctccaactcgcgaagtgcatctgattctgagcttcgatttcagcgctggggatccttttgagaccatacgagcaacgaccgattactgtagacgccataagataccttttcctcaggtggaggaggctgaacttgacctgtggtcaaaggcacccgccagttgttacatattgaaaggcgagaccgggccagtggtgatgcacttccccctatttaatattgatgcatgtgggggagacatagaagcctggtcagatacatacgataccttcaagttagccgacacttataccttagacgtggtggtgctgttgctggcccttgccaaaaagaatgtgcgagaaaataaaaaaaaaattttgagagagctgatgaatgtggctgggctctactatcccaaggactctgctcgctcctgttgcctcgcttag

SEQ ID NO: 140237 - DNA, 1626 bp, Artificial Sequence
  derived and/or modified sequence
atgggcagcagcgaggtgtccatcatccctggcctgcagaaggaggagaaggctgctgtggagcggcggcggctgcacgtgctgaaggccctgaagaagctgcgcatcgaggctgatgaggcccctgtggtggccgtgctgggcagcggcggcggcctgcgggcccacatcgcctgcctgggcgtgctgtctgagatgaaggagcagggcctgctggatgctgtgacctacctggccggcgtgtctggcagcacctgggccatcagcagcctgtacaccaatgatggagacatggaggccctggaggccgacctgaagcaccgcttcacccggcaggagtgggacctggccaagagcctgcagaagaccatccaggccgcccggtctgagaactacagcctgacagacttctgggcctacatggtgatcagcaagcagacccgggagctgcctgagagccacctgagcaacatgaagaagcctgtggaggagggcaccctgccctaccccatctttgctgccatcgacaatgacctgcagcccagctggcaggaggcccgggcccctgagacctggtttgagttcaccccccaccacgccggcttcagcgccctgggcgcctttgtgtccatcacccacttcggcagcaagttcaagaagggccgcctggtgaggacccaccctgagcgggacctgaccttcctgcggggcctgtggggcagcgccctgggcaacacagaggtgatccgggagtacatctttgaccagctgaggaacctgaccctgaagggcctgtggaggagagctgtggccaatgccaagagcatcggccacctgatctttgcccggctgctgcggctgcaggagagcagccagggcgagcaccccccaccagaagatgagggcggggagcctgagcacacctggctgacagagatgctggagaactggaccaggaccagcctggagaagcaggagcagccccatgaggaccctgagaggaagggcagcctgagcaacctgatggactttgtgaagaagacaggcatctgtgccagcaagtgggagtggggcaccacccacaacttcctgtacaagcatggaggcatccgggacaagatcatgagcagcaggaagcacctgcacctggtggatgctggcctggccatcaacacccccttccccctggtgctgccccccacccgggaggtgcacctgatcctgagctttgacttctctgctggggacccctttgagaccatccgggccaccacagactactgcagaagacacaagatccccttcccccaggtggaggaggccgagctggacctgtggagcaaggccccagccagctgctacatcctgaagggggagaccggccctgtggtgatgcacttccccctcttcaacattgatgcctgtggcggggacatcgaggcctggagcgacacctatgacaccttcaagctggccgacacctacaccctggatgtggtggtgctgctgctggccctggccaagaagaatgtgcgggagaacaagaagaagatcctgcgggagctgatgaatgtggccggcctgtactaccccaaggacagcgcccggagctgctgcctggcctag

SEQ ID NO: 140238 - DNA, 1626 bp, Artificial Sequence
  derived and/or modified sequence
atgggcagcagcgaggtgagcatcatccccggcctgcagaaggaggagaaagctgcagtggaaagacgcagattgcatgtgttgaaagctctgaaaaagctgcgaatcgaggccgacgaggctcctgtggtcgcagtgctcggatccggcggcggactgagggcacatattgcctgcctgggagtgctgtcagaaatgaaggaacaggggctgctagacgctgtgacctatctggcaggcgtgtccggctccacctgggccatttcgtccctgtataccaacgatggagacatggaagccttggaggccgacttgaagcatcgattcacacgtcaagaatgggacctggccaagtccctgcagaagaccattcaggcagctcggagcgagaactatagcctcactgatttctgggcgtacatggtgatatcaaaacagacccgagagcttccagaatctcacctgagcaatatgaagaagcccgtcgaggagggcactttgccttaccccatctttgctgctatcgataatgatctgcaacctagctggcaggaggcccgggcgcctgagacctggttcgagtttacgccccaccacgcagggttctccgccctcggagctttcgtgtctataactcacttcggctcgaagttcaagaagggcaggctggttaggacacacccagaaagggatctgacattccttaggggcctttggggtagcgccttaggaaacaccgaggtcatccgcgaatatatattcgaccagctgcggaaccttaccctcaagggactctggcgccgggcggtagccaatgctaaaagcatcggccatctcatctttgcacgccttctgcggctccaggagtccagtcagggggagcatccacccccggaggacgagggcggagagcctgagcatacatggcttacagaaatgctagaaaactggacaaggacctcactcgagaagcaggagcagccacatgaggaccctgaacggaagggctcccttagcaacctgatggattttgtgaagaagaccggcatctgtgcaagcaaatgggaatgggggactacccataactttctttataaacatggagggattagagacaaaatcatgagttcacgcaagcacttgcacctggtagacgccgggctggcaatcaatacacctttccccctggtgctgccacctacccgggaggtgcacctgattttaagctttgacttctcagcaggagacccatttgagactattcgggcgacaactgattactgcagacgtcacaagatcccctttccgcaggttgaagaggcagagctggatctgtggtctaaggcaccagcttcatgctatatcctcaaaggcgagaccgggcctgtcgtcatgcatttccctctgttcaatatagatgcatgcgggggggacatcgaggcgtggtctgatacgtacgacactttcaagctggctgacacatacaccctggacgtggtcgtgcttctcctggccctcgctaaaaaaaatgtacgcgaaaataagaaaaaaattttacgagaactgatgaatgtggctggcctctattaccctaaagattcagcgcggtcatgctgccttgcatag

SEQ ID NO: 140239 - DNA, 1626 bp, Artificial Sequence
  derived and/or modified sequence
atgggaagctctgaagtttccataattcctgggctccagaaagaagaaaaggcggccgtggagagacgaagacttcatgtgctgaaagctctgaagaagctaaggattgaggctgatgaggccccagttgttgctgtgctgggctcaggcggaggactgcgggctcacattgcctgccttggggtcctgagtgagatgaaagaacagggcctgttggatgccgtcacgtacctcgcaggggtctctggatccacttgggcaatatcttctctctacaccaatgatggtgacatggaagctctcgaggctgacctgaaacatcgatttacccgacaggagtgggacttggctaagagcctacagaaaaccatccaagcagcgaggtctgagaattactctctgaccgacttctgggcctacatggttatctctaagcaaaccagagaactgccggagtctcatttgtccaatatgaagaagcccgtggaagaagggacactaccctacccaatatttgcagccattgacaatgacctgcaaccttcctggcaggaggcaagagcaccagagacctggttcgagttcacccctcaccacgctggcttctctgcactgggggcctttgtttccataacccacttcggaagcaaattcaagaagggaagactggtcagaactcaccctgagagagacctgactttcctgagaggtttatggggaagtgctcttggtaacactgaagtcattagggaatacatttttgaccagttaaggaatctgaccctgaaaggtttatggagaagggctgttgctaatgctaaaagcattggacaccttatttttgcccgattactgaggctgcaagaaagttcacaaggggaacatcctcccccagaagatgaaggcggtgagcctgaacacacctggctgactgagatgctcgagaattggaccaggacctccctggaaaagcaggagcagccccatgaggaccccgaaaggaaaggctcactcagtaacttgatggattttgtgaagaaaacaggcatttgcgcttcaaagtgggaatgggggaccactcacaacttcctgtacaaacacggtggcatccgggacaagataatgagcagccggaagcacctccacctggtggatgctggtttagccatcaacactcccttcccactcgtgctgcccccgacgcgggaggttcacctcatcctctccttcgacttcagtgccggagatcctttcgagaccatccgggctaccactgactactgccgccgccacaagatcccctttccccaagtagaagaggctgagctggatttgtggtccaaggcccccgccagctgctacatcctgaaaggagaaactggaccagtggtgatgcattttcccctgttcaacatagatgcctgtggaggtgatattgaggcatggagtgacacatacgacacattcaagcttgctgacacctacactctagatgtggtggtgctactcttggcattagccaagaagaatgtcagggaaaacaagaagaagatccttagagagttgatgaacgtggccgggctctactacccgaaggatagtgcccgaagttgctgcttggcatag

SEQ ID NO: 140240 - DNA, 1626 bp, Artificial Sequence
  derived and/or modified sequence
atggggtcgtctgaggtatctattatacccggactgcagaaggaggaaaaagccgcagttgagcgacggcgactccatgtcttgaaggctcttaaaaagctgaggatcgaggctgacgaggcacctgtggtggcagtactcgggtccggtggaggcctaagggctcatatcgcgtgcctgggtgtcctgtcggagatgaaggaacaggggcttttggatgcggtgacttatctggccggagtgtcaggttctacgtgggcaatttcatccttgtacacaaatgacggggatatggaggccctggaagccgatctgaaacacaggtttacgcgccaggaatgggacctggcaaagtcactgcagaaaacaatccaggccgctagatccgagaactatagcctcacagatttctgggcttacatggtgatttctaaacaaactagagaattgccagagtcccacctgtctaatatgaaaaaaccagtggaagaggggaccctgccttaccccatctttgcagctatcgataatgaccttcagccttcgtggcaggaggccagagcccctgaaacttggtttgagttcacgccccatcacgcgggattctccgccctgggcgcttttgtgagcattacccacttcggatcaaaattcaagaagggacgcctagtcagaactcatcctgagagggatcttacgttcctgagaggactgtggggaagtgctcttggcaacacggaggtgatcagagaatacattttcgaccagcttcggaatctgacacttaagggcttgtggcggagggccgtcgctaatgccaagtccattgggcacctcattttcgcaaggctgctccgtctccaagagtccagccagggtgaacaccccccacccgaagacgagggcggagagccagagcacacatggttaacagaaatgttagaaaattggactagaactagtctggaaaaacaggaacagccgcatgaagaccccgaacgtaagggtagcctgagcaatctcatggattttgttaagaagaccgggatttgcgctagcaagtgggagtggggcaccacccacaatttcctgtataaacatggtggaattcgcgacaagatcatgtcttctagaaagcatttgcacttggtggatgccggtcttgccatcaacactccattcccgctggtactcccacctactcgggaggtgcatctaatcctgagttttgatttctccgcaggggatccctttgaaacaatacgcgctacgactgattactgtagaagacataagattccattcccccaggtagaagaagccgaactggatctctggagcaaagccccagccagctgctatatcctcaagggcgagaccgggccagttgtgatgcactttccactgttcaatattgacgcttgcgggggagacattgaagcctggagcgatacatacgacacctttaaactcgccgatacctacacactggacgtcgtggttctgttactggccctggccaagaaaaacgtgcgcgaaaacaagaagaaaatactccgcgagctcatgaatgtggcagggctgtattaccctaaagatagtgccagatcatgctgtctggcttag

SEQ ID NO: 140241 - DNA, 1626 bp, Artificial Sequence
  derived and/or modified sequence
atgggcagcagcgaggtgagcatcatccccggcctgcagaaggaggagaaggccgccgtggagagaagaagactgcacgtgctgaaggccctgaagaagctgagaatcgaggccgacgaggcccccgtggtggccgtgctgggcagcggcggcggcctgagagcccacatcgcctgcctgggcgtgctgagcgagatgaaggagcagggcctgctggacgccgtgacctacctggccggcgtgagcggcagcacctgggccatcagcagcctgtacaccaacgacggcgacatggaggccctggaggccgacctgaagcacagattcaccagacaggagtgggacctggccaagagcctgcagaagaccatccaggccgccagaagcgagaactacagcctgaccgacttctgggcctacatggtgatcagcaagcagaccagagagctgcccgagagccacctgagcaacatgaagaagcccgtggaggagggcaccctgccctaccccatcttcgccgccatcgacaacgacctgcagcccagctggcaggaggccagagcccccgagacctggttcgagttcaccccccaccacgccggcttcagcgccctgggcgccttcgtgagcatcacccacttcggcagcaagttcaagaagggcagactggtgagaacccaccccgagagagacctgaccttcctgagaggcctgtggggcagcgccctgggcaacaccgaggtgatcagagagtacatcttcgaccagctgagaaacctgaccctgaagggcctgtggagaagagccgtggccaacgccaagagcatcggccacctgatcttcgccagactgctgagactgcaggagagcagccagggcgagcaccccccccccgaggacgagggcggcgagcccgagcacacctggctgaccgagatgctggagaactggaccagaaccagcctggagaagcaggagcagccccacgaggaccccgagagaaagggcagcctgagcaacctgatggacttcgtgaagaagaccggcatctgcgccagcaagtgggagtggggcaccacccacaacttcctgtacaagcacggcggcatcagagacaagatcatgagcagcagaaagcacctgcacctggtggacgccggcctggccatcaacacccccttccccctggtgctgccccccaccagagaggtgcacctgatcctgagcttcgacttcagcgccggcgaccccttcgagaccatcagagccaccaccgactactgcagaagacacaagatccccttcccccaggtggaggaggccgagctggacctgtggagcaaggcccccgccagctgctacatcctgaagggcgagaccggccccgtggtgatgcacttccccctgttcaacatcgacgcctgcggcggcgacatcgaggcctggagcgacacctacgacaccttcaagctggccgacacctacaccctggacgtggtggtgctgctgctggccctggccaagaagaacgtgagagagaacaagaagaagatcctgagagagctgatgaacgtggccggcctgtactaccccaaggacagcgccagaagctgctgcctggcctag

SEQ ID NO: 140242 - protein, 456 aa, Artificial Sequence
  derived and/or modified sequence
MKIEEVKSTTKTQRIASHSHVKGLGLDESGLAKQAASGLVGQENAREACGVIVELIKSKKMAGRAVLLAGPPGTGKTALALAIAQELGSKVPFCPMVGSEVYSTEIKKTEVLMENFRRAIGLRIKETKEVYEGEVTELTPCETENPMGGYGKTISHVIIGLKTAKGTKQLKLDPSIFESLQKERVEAGDVIYIEANSGAVKRQGRCDTYATEFDLEAEEYVPLPKGDVHKKKEIIQDVTLHDLDVANARPQGGQDILSMMGQLMKPKKTEITDKLRGEINKVVNKYIDQGIAELVPGVLFVDEVHMLDIECFTYLHRALESSIAPIVIFASNRGNCVIRGTEDITSPHGIPLDLLDRVMIIRTMLYTPQEMKQIIKIRAQTEGINISEEALNHLGEIGTKTTLRYSVQLLTPANLLAKINGKDSIEKEHVEEISELFYDAKSSAKILADQQDKYMK

SEQ ID NO: 140243 - protein, 386 aa, Artificial Sequence
  derived and/or modified sequence
MKIEEVKSTTKTQRIASHSHVKGLGLDESGLAKQAASGLVGQENAREACGVIVELIKSKKMAGRAVLLAGPPGTGKTALALAIAQELGSKVPFCPMVGSEVYSTEIKKTEVLMENFRRAIGLRIKETKEVYEGEVTELTPCETENPMGGYGKTISHVIIGLKTAKGTKQLKLDPSIFESLQKERVEAGDVIYIEANSGAVKRQGRCDTYATEFDLEAEEYVPLPKGDVHKKKEIIQDVTLHDLDVANARPQGGQDILSMMGQLMKPKKTEITDKLRGEINKVVNKYIDQGIAELVPGVLFVDEVHMLDIECFTYLHRALESSIAPIVIFASNRGNCVIRGTEDITSPHGIPLDLLDRVMIIRTMLYTPQEMKQVLSAAADPGQLAC

SEQ ID NO: 140244 - DNA, 1371 bp, Artificial Sequence
  derived and/or modified sequence
atgaaaatcgaggaagtgaagtcaacaacaaagacacaacggattgcttcccattcgcacgtcaagggcctgggattggacgaaagtggtcttgccaagcaggcagctagcggacttgtgggccaggagaatgcccgtgaagcttgcggggtgatcgtcgagctcatcaagtccaagaaaatggcaggcagggccgtactgttggccgggccccccggcactggtaagacagcactggcgctcgccattgcccaagagctgggaagcaaggtccccttttgccctatggtgggaagtgaggtgtactccacagagatcaaaaagacagaggtcctgatggagaacttcagaagagctatcggtctgcgcatcaaggaaacgaaagaggtgtacgagggagaagtgaccgagctgactccctgtgaaactgagaacccaatgggcggttacggaaaaaccatctcacatgtgatcatcgggcttaaaactgccaaagggaccaagcagctcaaattagatccgtctatcttcgagtccctgcagaaggagcgggttgaggctggcgacgtaatctatatcgaggctaacagtggtgcggtgaaaagacaaggccggtgcgatacctatgctaccgaatttgacctggaagcagaagagtacgttccactgccgaagggcgacgttcataagaaaaaagagatcatccaggatgtgaccttacatgaccttgacgtggctaacgccaggccgcagggtgggcaggacattctctcaatgatggggcagttgatgaaacccaagaagaccgaaataactgacaagctgcgtggcgaaatcaataaggtcgttaataagtacatcgaccagggcatcgcggagctcgttcccggtgtcctcttcgttgatgaggtccacatgttagatatcgaatgctttacttaccttcacagggcactggaatcatccatcgcgcctattgtgatcttcgcaagcaatcgagggaattgtgtgatccgaggcaccgaggatatcacctccccccatggcatccctctggatctgctcgacagagtgatgattatacgaaccatgttgtataccccgcaagagatgaagcaaattataaaaatccgagctcagaccgaagggattaacatttccgaggaagcgctcaaccacctgggggagattgggactaagaccaccctgagatattcagtgcaactactgactcctgccaacttgctggccaagatcaacgggaaggacagcatcgaaaaggagcatgttgaggagataagcgagctgttttatgacgcaaaatcctccgctaagattttagccgaccaacaagacaaatatatgaagtag

SEQ ID NO: 140245 - DNA, 1371 bp, Artificial Sequence
  derived and/or modified sequence
atgaagattgaggaggtgaagagcaccaccaagacccagagaattgccagccacagccacgtgaagggcctgggcctggatgaaagtggcctggccaagcaggccgccagcggcctggtgggccaggagaatgcccgggaggcctgtggggtcatcgtggagctgatcaagagcaagaagatggccggccgggctgtgctgctggccggccccccaggcaccgggaagacagccctggccctggccatcgcccaggagctgggcagcaaggtgcccttctgccccatggtgggcagcgaggtgtacagcacagagatcaagaagacagaggtgctgatggagaacttcagaagagccatcggcctgcgcatcaaggagaccaaggaggtgtatgaaggagaggtgacagagctgaccccctgtgaaacagagaaccccatgggcggctacggcaagaccatcagccacgtgatcatcggcctgaagacagccaagggcaccaagcagctgaagctggaccccagcatctttgagagcctgcagaaggagcgggtggaggccggagatgtgatctacatcgaggccaacagcggggctgtgaagaggcagggccgctgtgacacctacgccacagaatttgacctggaggccgaggagtatgtgcccctgcccaagggagatgtgcacaagaagaaggagatcatccaggatgtgaccctgcatgacctggatgtggccaatgcccggccccagggcggccaggacatcctgtccatgatgggccagctgatgaagcccaagaagacagagatcacagacaagctgcggggggagatcaacaaggtggtgaacaagtacatcgaccagggcattgctgagctggtgcctggggtgctgtttgtggatgaggtgcacatgctggacatcgagtgcttcacctacctgcaccgggccctggagagcagcatcgcccccatcgtcatctttgccagcaacagaggcaactgtgtgatccggggcacagaggacatcaccagcccccacggcatccccctggacctgctggacagagtgatgatcatccgcaccatgctgtacaccccccaggagatgaagcagatcatcaagatccgggcccagacagagggcatcaacatcagcgaggaggccctgaaccacctgggggagatcggcaccaagaccaccctgcgctacagcgtgcagctgctgaccccagccaacctgctggccaagatcaacgggaaggacagcattgagaaggagcacgtggaggagatcagcgagctgttctatgatgccaagagcagcgccaagatcctggccgaccagcaggacaagtacatgaagtag

SEQ ID NO: 140246 - DNA, 1371 bp, Artificial Sequence
  derived and/or modified sequence
atgaagatcgaggaggtgaagagcaccaccaagacccagcggatcgcttcccatagccacgttaagggcttaggcttggacgagtctggactggccaagcaggcagcatcaggactcgtagggcaggagaatgcccgggaggcttgtggggtcattgtggaattaatcaagagtaaaaagatggccggccgtgccgtgttgctcgccgggcctcctggcaccggaaagacagcccttgccctagcaattgcccaagagctgggcagtaaagttcctttctgccccatggtgggctctgaggtgtacagcaccgaaatcaagaagactgaggtgcttatggagaacttccggcgagccataggcctcaggatcaaggagactaaagaagtctatgaaggggaagtcaccgaactgacaccctgtgaaaccgagaatcctatgggcggttatggcaaaacaatttcccatgtcataatcggcttgaagacagctaagggcacgaaacagctcaagttagatcccagtattttcgagtcgctgcagaaagaaagggtagaagccggcgacgtaatttacatagaggccaactccggcgcagtcaaacgtcaaggccggtgcgacacgtacgccacagagttcgatctggaggctgaggaatacgtgccattacccaagggagatgttcacaaaaaaaaggagatcatccaggacgtgactttgcatgatctggacgtggccaacgccagaccacaggggggtcaagacatcctgtctatgatggggcaactgatgaaacctaagaagaccgaaatcacagacaaactgcgcggggagatcaataaagtcgtcaataaatacattgaccaaggtatcgctgaacttgtgcccggagtgctgttcgtcgatgaagttcacatgttagacatcgagtgtttcacttacctgcaccgcgccctagaatcctcaattgcgccgatagtcattttcgcatccaatcgtggcaattgcgttattcgcggcacggaggacatcacttctccacacggtatacccttagacctgctcgatagggtcatgatcattaggacaatgctgtacaccccacaggagatgaaacagataattaagatcagagcacagaccgagggtattaacatctctgaagaagctctgaatcacttgggcgagattgggaccaaaacaaccttgcgttacagtgtgcagctgctcacgcctgcgaatcttttagctaagataaatggaaaagattctatcgagaaggagcatgtagaggagatttctgaattgttctatgacgcaaaatcctctgcaaaaattttagctgatcagcaggataagtacatgaaatag

SEQ ID NO: 140247 - DNA, 1371 bp, Artificial Sequence
  derived and/or modified sequence
atgaaaatcgaagaggttaagtctaccacaaaaacacaaaggatcgcctcccacagccacgtaaaaggattaggtctggacgagtcgggcctggctaagcaagcggcatctgggttggtaggacaagagaacgcacgggaggcatgtggcgtcatcgtcgaactgatcaagtccaaaaagatggctggtagagctgtgctgttggctggccctcctgggacagggaagaccgcactagcactagcaattgcccaggagcttggcagcaaggtccctttctgccctatggtaggctctgaagtctactccacagagatcaagaaaactgaagtgcttatggaaaatttccgcagggcaatcggcctgaggattaaagagaccaaggaagtgtacgagggggaggtcactgagctgacaccctgcgagactgagaatccaatggggggatatgggaagacaatctcccacgtgataatcggactgaagaccgcaaagggtacgaaacaactcaagttagacccgagtatttttgagtcacttcagaaggagcgtgtcgaggctggagacgtgatttacatcgaggccaacagcggagcagtgaagcgccagggcagatgcgatacatacgctacagagttcgatctagaggccgaagagtacgtgccactcccaaagggagacgtgcacaaaaagaaggagatcattcaggacgtgacactacatgatctggacgtagcaaacgctcggcctcagggaggacaagacattctaagtatgatgggccagttaatgaagccaaagaagactgagataacagacaagctgagaggcgagattaacaaggtcgtaaacaagtatatcgatcaagggattgccgagctcgtgccaggcgtgctgttcgtcgatgaagttcacatgcttgacatcgaatgtttcacatacctccaccgggcactggagtcctccatagctccgatcgtgatcttcgcctctaatcgcggtaactgcgtgatccgaggcacagaggatatcacctctccacatggaatccctctggatctattagatcgcgtgatgatcataagaacaatgctgtataccccccaggaaatgaaacaaattattaagatcagggctcagaccgagggtatcaatatctcagaagaggctttgaaccatttaggagaaattgggacaaaaacaaccctgcgctattcagttcaattactgacacctgccaacctgcttgcgaagataaacggcaaggactcaatcgagaaagaacatgtggaggagatttctgaacttttctatgacgccaaaagcagtgccaagatccttgccgaccagcaggataaatatatgaagtag

SEQ ID NO: 140248 - DNA, 1761 bp, Artificial Sequence
  derived and/or modified sequence
gcaaattgccctagtaacggccgcatggtaactcaggcgccgggcgcactgtcctagctgctggttttccacgctggttttagctcccggcgtctgcaaaatgaagattgaggaggtgaagagcactacgaagacgcagcgcatcgcctcccacagccacgtgaaagggctggggctggacgagagcggcttggccaagcaggcggcctcagggcttgtgggccaggagaacgcgcgagaggcatgtggcgtcatagtagaattaatcaaaagcaagaaaatggctggaagagctgtcttgttggcaggacctcctggaactggcaagacagctctggctctggctattgctcaggagctgggtagtaaggtccccttctgcccaatggtggggagtgaagtttactcaactgagatcaagaagacagaggtgctgatggagaacttccgcagggccattgggctgcgaataaaggagaccaaggaagtttatgaaggtgaagtcacagagctaactccgtgtgagacagagaatcccatgggaggatatggcaaaaccattagccatgtgatcataggactcaaaacagccaaaggaaccaaacagttgaaactggaccccagcatttttgaaagtttgcagaaagagcgagtagaagctggagatgtgatttacattgaagccaacagtggggccgtgaagaggcagggcaggtgtgatacctatgccacagaattcgaccttgaagctgaagagtatgtccccttgccaaaaggggatgtgcacaaaaagaaagaaatcatccaagatgtgaccttgcatgacttggatgtggctaatgcgcggccccaggggggacaagatatcctgtccatgatgggccagctaatgaagccaaagaagacagaaatcacagacaaacttcgaggggagattaataaggtggtgaacaagtacatcgaccagggcattgctgagctggtcccgggtgtgctgtttgttgatgaggtccacatgctggacattgagtgcttcacctacctgcaccgcgccctggagtcttctatcgctcccatcgtcatctttgcatccaaccgaggcaactgtgtcatcagaggcactgaggacatcacatcccctcacggcatccctcttgaccttctggaccgagtgatgataatccggaccatgctgtatactccacaggaaatgaaacagatcattaaaatccgtgcccagacggaaggaatcaacatcagtgaggaggcactgaaccacctgggggagattggcaccaagaccacactgaggtactcagtgcagctgctgaccccggccaacttgcttgctaaaatcaacgggaaggacagcattgagaaagagcatgtcgaagagatcagtgaacttttctatgatgccaagtcctccgccaaaatcctggctgaccagcaggataagtacatgaagtgagatggctgaggttttcagcagtaagagactccccaggtgtgcctggcctgggtccagcctgtgggcgcttgcccctgggcttggggctgccgtccccactcaggcgtggtctgcagcgctgtcagttcagtgtggaaagcatttctttttaagttatcgtaactgttcctgtggttgctttgaaagaacccttccttacctggtgtgttttctataaatcttcataggttattttgattctctctctctctctctctaagttttttaaaaataaacttttcagaacagtt

SEQ ID NO: 140249 - DNA, 1371 bp, Artificial Sequence
  derived and/or modified sequence
atgaagatcgaggaggtgaagagcaccaccaagacccagagaatcgccagccacagccacgtgaagggcctgggcctggacgagagcggcctggccaagcaggccgccagcggcctggtgggccaggagaacgccagagaggcctgcggcgtgatcgtggagctgatcaagagcaagaagatggccggcagagccgtgctgctggccggcccccccggcaccggcaagaccgccctggccctggccatcgcccaggagctgggcagcaaggtgcccttctgccccatggtgggcagcgaggtgtacagcaccgagatcaagaagaccgaggtgctgatggagaacttcagaagagccatcggcctgagaatcaaggagaccaaggaggtgtacgagggcgaggtgaccgagctgaccccctgcgagaccgagaaccccatgggcggctacggcaagaccatcagccacgtgatcatcggcctgaagaccgccaagggcaccaagcagctgaagctggaccccagcatcttcgagagcctgcagaaggagagagtggaggccggcgacgtgatctacatcgaggccaacagcggcgccgtgaagagacagggcagatgcgacacctacgccaccgagttcgacctggaggccgaggagtacgtgcccctgcccaagggcgacgtgcacaagaagaaggagatcatccaggacgtgaccctgcacgacctggacgtggccaacgccagaccccagggcggccaggacatcctgagcatgatgggccagctgatgaagcccaagaagaccgagatcaccgacaagctgagaggcgagatcaacaaggtggtgaacaagtacatcgaccagggcatcgccgagctggtgcccggcgtgctgttcgtggacgaggtgcacatgctggacatcgagtgcttcacctacctgcacagagccctggagagcagcatcgcccccatcgtgatcttcgccagcaacagaggcaactgcgtgatcagaggcaccgaggacatcaccagcccccacggcatccccctggacctgctggacagagtgatgatcatcagaaccatgctgtacaccccccaggagatgaagcagatcatcaagatcagagcccagaccgagggcatcaacatcagcgaggaggccctgaaccacctgggcgagatcggcaccaagaccaccctgagatacagcgtgcagctgctgacccccgccaacctgctggccaagatcaacggcaaggacagcatcgagaaggagcacgtggaggagatcagcgagctgttctacgacgccaagagcagcgccaagatcctggccgaccagcaggacaagtacatgaagtag

SEQ ID NO: 140250 - protein, 317 aa, Artificial Sequence
  derived and/or modified sequence
MWLYLAVFVGLYYLLHWYRERQVLSHLRDKYVFITGCDSGFGKLLARQLDARGLRVLAACLTEKGAEQLRGQTSDRLETVTLDVTKTESVAAAAQWVKECVRDKGLWGLVNNAGISLPTAPNELLTKQDFVTILDVNLLGVIDVTLSLLPLVRRARGRVVNVSSVMGRVSLFGGGYCISKYGVEAFSDSLRRELSYFGVKVAMIEPGYFKTAVTSKERFLKSFLEIWDRSSPEVKEAYGEKFVADYKKSAEQMEQKCTQDLSLVTNCMEHALIACHPRTRYSAGWDAKLLYLPMSYMPTFLVDAIMYWVSPSPAKAL

SEQ ID NO: 140251 - DNA, 954 bp, Artificial Sequence
  derived and/or modified sequence
atgtggctgtacctggccgtgttcgtgggcctgtactacctgctgcactggtacagagagagacaggtgctgagccacctgagagacaagtacgtgttcatcaccggctgcgacagcggcttcggcaagctgctggccagacagctggacgccagaggcctgagagtgctggccgcctgcctgaccgagaagggcgccgagcagctgagaggccagaccagcgacagactggagaccgtgaccctggacgtgaccaagaccgagagcgtggccgccgccgcccagtgggtgaaggagtgcgtgagagacaagggcctgtggggcctggtgaacaacgccggcatcagcctgcccaccgcccccaacgagctgctgaccaagcaggacttcgtgaccatcctggacgtgaacctgctgggcgtgatcgacgtgaccctgagcctgctgcccctggtgagaagagccagaggcagagtggtgaacgtgagcagcgtgatgggcagagtgagcctgttcggcggcggctactgcatcagcaagtacggcgtggaggccttcagcgacagcctgagaagagagctgagctacttcggcgtgaaggtggccatgatcgagcccggctacttcaagaccgccgtgaccagcaaggagagattcctgaagagcttcctggagatctgggacagaagcagccccgaggtgaaggaggcctacggcgagaagttcgtggccgactacaagaagagcgccgagcagatggagcagaagtgcacccaggacctgagcctggtgaccaactgcatggagcacgccctgatcgcctgccaccccagaaccagatacagcgccggctgggacgccaagctgctgtacctgcccatgagctacatgcccaccttcctggtggacgccatcatgtactgggtgagccccagccccgccaaggccctgtag

SEQ ID NO: 140252 - DNA, 954 bp, Artificial Sequence
  derived and/or modified sequence
atgtggttgtacctggccgtattcgtcggtttatattatctgcttcactggtaccgcgaaagacaagttctgtcccacctgcgcgacaagtacgtatttatcactggttgcgacagcggattcggcaaactcctggcccgccagttggacgcccgcggcctgcgcgtgctggccgcctgcctcacagaaaaaggcgctgaacagctgcgcggccagaccagcgacagactggagaccgtgactctggacgtgactaaaacagagagcgtggccgccgccgcccaatgggtgaaggaatgcgtgcgagataagggtctgtggggcctggtgaataacgccgggatctctctgcctaccgctccaaatgagctgctgaccaagcaggacttcgtcacaatcctggatgttaatctgctgggggtgatcgacgtcacactgtctctcttacctctggtgcgtcgtgctaggggacgcgtagtcaatgtaagcagcgttatgggcagagtctccctgttcggcggagggtactgcatctcaaagtacggggtagaggcattctccgattcgctccggagagaattgagctactttggagtgaaagtcgccatgatcgaacccggttatttcaagaccgcagtgacatccaaagaacgcttcctcaagagcttcctcgagatatgggatcgctcctctccggaggtgaaagaggcctacggcgaaaagtttgtggcggactacaagaaaagtgccgaacagatggaacagaaatgcacacaggatctgagcctcgttacgaattgcatggagcacgcgctcatcgcatgccatccgagaacgagatattctgccgggtgggatgccaagttgttgtacctgccaatgagctatatgcccactttcctggtagatgctataatgtattgggtctctcctagcccggcaaaagcgctttag

SEQ ID NO: 140253 - DNA, 954 bp, Artificial Sequence
  derived and/or modified sequence
atgtggctgtacctggccgtgtttgtgggcctgtactacctgctgcactggtaccgggagcggcaggtgctgagccacctgcgggacaagtatgtgttcatcaccggctgtgacagcggctttgggaagctgctggcccggcagctggatgcccggggcctgcgggtgctggccgcctgcctgacagagaagggagctgagcagctgcggggccagaccagtgaccggctggagaccgtgaccctggatgtgaccaagacagaatctgtggccgctgctgcccagtgggtgaaggaatgtgtgcgggacaagggcctgtggggcctggtgaacaatgccggcatcagcctgcccacagccccaaatgagctgctgaccaagcaggactttgtgaccatcctggatgtgaacctgctgggcgtgattgatgtgaccctgagcctgctgcccctggtgagaagagcccggggccgggtggtgaatgtgtcctctgtgatgggccgggtgtccctgtttggaggcggctactgcatcagcaaatatggagtggaggccttcagtgacagcctgcggcgggagctgagctactttggagtgaaggtggccatgattgagcccggctacttcaagacagctgtgaccagcaaggagcgcttcctgaagagcttcctggagatctgggacaggagcagccctgaggtgaaggaggcctacggggagaagtttgtggccgactacaagaagtctgctgagcagatggagcagaagtgcacccaggacctgagcctggtgaccaactgcatggagcacgccctgattgcctgccaccccaggacccgctacagcgctggctgggatgccaagctgctgtacctgcccatgagctacatgcccaccttcctggtggatgccatcatgtactgggtgagccccagccctgccaaggccctgtag

SEQ ID NO: 140254 - DNA, 954 bp, Artificial Sequence
  derived and/or modified sequence
atgtggctgtacctggccgtgttcgtgggcctgtactacctgctgcactggtaccgcgaacggcaggtgttatctcacctgcgcgacaagtatgtgttcattaccgggtgcgattctggctttggcaagctactggccaggcagcttgacgccagagggctgcgcgttctggcagcctgtttgactgagaagggtgcggaacagttgcgagggcaaactagcgataggttggagaccgttaccctcgatgtaacaaagacagagtcagtcgctgccgccgctcaatgggtgaaagagtgcgtacgagataaaggtctgtggggactagtgaacaatgctggcattagtctgccgactgctcccaatgaactgcttaccaaacaggattttgtgaccatcttggacgttaatttactgggggtgattgacgtgaccctgtccctgctcccattggtgaggcgcgcgagaggacgggtggtcaatgtgagctcagtaatgggccgggtgtcccttttcggaggggggtattgcatctccaaatatggcgttgaagccttctctgattcactgcgtagggaactctcatactttggcgtgaaggtggccatgattgaacccgggtatttcaagaccgctgtcactagcaaggaacgattcctgaaaagctttcttgagatttgggatcgtagcagtcctgaagtcaaagaggcctatggagagaaatttgtggcagattataaaaaatctgcggaacagatggagcagaagtgcactcaagacttgagcctcgtgacaaactgcatggaacacgcccttatagcatgccatcctcggactaggtattcagccggatgggatgccaagctgttatacctaccgatgtcctacatgcctacatttcttgtagatgcaatcatgtactgggtttctccctcccccgccaaggcactgtag

SEQ ID NO: 140255 - DNA, 954 bp, Artificial Sequence
  derived and/or modified sequence
atgtggctttacctggcggtgtttgttgggttgtactacctgctgcattggtaccgggagcggcaggtcctatcccacctgagggataaatacgtttttatcactggttgcgactccggctttggtaaactgctcgccaggcagctggacgccagaggtttgagagtgttggctgcttgtttgacagaaaagggggctgaacaattgcgcggacagacaagcgatcgcttggagacggtgactctggacgttaccaagactgagagtgtcgctgccgcagcccagtgggtaaaggagtgtgtgcgcgacaagggcctgtggggcttagtaaataacgccggtatctccctgcccactgcccctaacgaacttctcactaagcaggactttgtgacaatattggacgttaacttgctcggagtgatcgacgtgaccctgtcgctgttgcccctagtgaggcgcgcacggggtcgcgtggtgaacgtatcgtccgtaatggggagagtgtcattattcggtggcggatattgtatcagcaaatacggtgtggaggccttttcagatagcctcaggagggagctgagttacttcggagtcaaggttgcaatgattgagccgggttattttaagaccgccgtaacgtcaaaggagagattcctcaagtcctttctcgaaatttgggatcgcagctctcccgaggtgaaagaagcttacggggaaaagtttgtcgccgactacaaaaagagtgccgaacagatggagcagaaatgcacccaggacctctctctggtcaccaattgtatggaacacgcactgatcgcttgtcaccccagaacaagatatagcgctggctgggatgctaaactcctctatctccctatgtcctatatgcctaccttcctcgtggacgctattatgtattgggtgtccccgagtcccgctaaagcactgtag

SEQ ID NO: 140256 - DNA, 2405 bp, Artificial Sequence
  derived and/or modified sequence
atcacccattttctgcatcagtcacactgggagctgcagaccggagctgttcctatttgcccatcctctccctgctttctttacctctgaggttggattctccctgtgggatcctgcaatccttctgccccaaaaaactattatagcaggagggaacctgttcctgctcactctttgccttctccttctcatcctagacagcctgaccgtgccctagttttcagaggagtgattgattctggggtgcggagcaggatgaggaaactcaggctcagagagggatttccacctaatgtgcctggaaaccatgggtagctacccaataaggcctttctatgttcagaaggtcatggaccaggagtgttggtatcggagctttgtagagacagttttgacccctgtacttagagcagaggggtgtgtttgccatggagagtgtgtgtgggcagctgtgtgtaagcctgtgtgagttctgtgtatgttcctgtgtgaatatatgtgtgtgctccttcatggacacagcatgcatgtagtgggcatagcaaggcagagagaaatcaggagactaggggcacattgcccagtaggaagatagtatcttcctactgggcaggacttgaggtgtgcaaaggtgtgcatgagtactgcaaaagcagttcaaagagcagagaggtggggccagaataaatatgttgcagaaaggcagtcatcagggaggaaagtgaggattccctgccaaaatgcctgagggcttccctgcctaccacagccctctgtgttcttaaatcctcctgtctgaacagaggccagactctggtttcccccacagcctgtctgtgtctgtcctctgcaaagccatgtggctctacctggcggttttcgtgggcctgtactaccttctgcactggtaccgggagaggcaggtgctgagccacctgagagataagtatgtgttcatcacgggctgtgactctggcttcgggaaactgctggccagacagctggatgcacgaggcttgcgggtgctggctgcatgtctgacggagaaaggagccgagcagctgaggggccagacttcagacaggctggagacggtgaccctggatgttaccaagacagagagcgttgctgcagccgcccagtgggtgaaggagtgcgtgagagacaaaggactctggggcctggtgaataatgctggcatctccttgcccacggctcccaatgagttgctcaccaagcaggacttcgtgaccatactggacgtgaacttgttgggggtgattgatgtgactctgagcctgctgcccttagtgaggagggccaggggccgtgtggtcaacgtctccagtgtcatgggccgggtgtcactttttggtggaggctactgcatctccaagtatggcgtggaagccttctctgactccctcaggagggaactctcctactttggggtgaaggtggctatgattgaacctggctatttcaagactgctgtgaccagtaaggagagattcttaaagagcttcctggagatttgggaccggtccagtccagaggtcaaggaggcctatggcgagaagtttgttgcagactataagaaatcagctgaacaaatggagcagaagtgcacacaggatctgtcgttggtgaccaactgcatggagcatgcgctgattgcctgccacccccgtactcgctactcagctggctgggatgccaagcttctctacctccccatgagctacatgcccaccttcctggtggatgccattatgtactgggtctctccaagcccggccaaggctctatgaagctaaggttggatgcatggttgcatggatttggggtgtgctatgaggggtggtgtatccttgggagagatataaagtggagggagggagccgtccggtcagtagggcaccaatcccacctccttcattacctcctggccatgattctcctgggagataattctgctctctggagatgttggtaggaaagtttcaagttacgcagctgagaaacagggaccaaatagtgctcctgggtgcattgtcaccgtgggtggccactcaagggtccaagcctctagggccatccttgggctaacaactggggtgggtgtgagcaggtggaaggagcctcagcccatgccattacctcctgcttccttatcaggctgtgtgttaattctgggccagtctacaccctcccacggggtggaaatggcctggaggatgtgagggcacccctcctctgaagatccctgtacacgtggtgttgggactggaaccattatgcggccccataggcctcaggagtcatcccagaagcagtggctgggaggtggtgtcctaagtaaggatctgtgcagaggacaaataaatcagtttttgatttgtctt

SEQ ID NO: 140257 - protein, 302 aa, Artificial Sequence
  derived and/or modified sequence
MDVLASYSIFQELQLVHDTGYFSALPSLEETWQQTCLELERYLQTEPRRISETFGEDLDCFLHASPPPCIEESFRRLDPLLLPVEAAICEKSSAVDILLSRDKLLSETCLSLQPASSSLDSYTAVNQAQLNAVTSLTPPSSPELSRHLVKTSQTLSAVDGTVTLKLVAKKAALSSVKVGGVATAAAAVTAAGAVKSGQSDSDQGGLGAEACPENKKRVHRCQFNGCRKVYTKSSHLKAHQRTHTGEKPYKCSWEGCEWRFARSDELTRHYRKHTGAKPFKCNHCDRCFSRSDHLALHMKRHI

SEQ ID NO: 140258 - protein, 112 aa, Artificial Sequence
  derived and/or modified sequence
MDVLASYSIFQELQLVHDTGYFSALPSLEETWQQTCLELERYLQTEPRRISETFGEKPYKCSWEGCEWRFARSDELTRHYRKHTGAKPFKCNHCDRCFSRSDHLALHMKRHI

SEQ ID NO: 140259 - DNA, 1639 bp, Artificial Sequence
  derived and/or modified sequence
gatccacgagctggagtgattagagccctggaagggaattgttactcccgtggagaagtccccttttcctggcagtcgtctgcactgtacacgctggatgcctctctccatccaccccactcactcgctcctctctcacctcctctctccctctcctgcattgatttttttttttcctttttagttgactgaaacaaaacaaaacaaaagggccactggatgtctgccttcttggggggtgagccagacagactgacaaacaaacagccccaactgtgttcgggggagggtttcgcctcccgttttgcccggcagcagcagcatggacgtgttggctagttatagtatattccaggagctacaacttgtccacgacaccggctacttctcagctttaccatccctggaggagacctggcagcagacatgccttgaattggaacgctacctacagacggagccccggaggatctcagagacctttggtgaggacttggactgtttcctccacgcttcccctcccccgtgcattgaggaaagcttccgtcgcttagaccccctgctgctccccgtggaagcggccatctgtgagaagagctcggcagtggacatcttgctctctcgggacaagttgctatctgagacctgcctcagcctccagccggccagctcttctctagacagctacacagccgtcaaccaggcccagctcaacgcagtgacctcattaacgcccccatcgtcccctgagctcagccgccatctggtcaaaacctcacaaactctctctgccgtggatggcacggtgacgttgaaactggtggccaagaaggctgctctcagctccgtaaaggtgggaggggtcgcaacagctgcagcagccgtgacggctgcgggggccgttaagagtggacagagcgacagtgaccaaggagggctaggggctgaagcatgtcccgaaaacaagaagagggttcaccgctgtcagtttaacgggtgccggaaagtttatacaaaaagctcccacttaaaggcccaccagaggactcacacaggtgagaagccttataagtgctcatgggagggatgtgagtggcgttttgcacgaagcgatgagctcacgaggcactacaggaaacacacaggtgcaaagcccttcaaatgcaaccactgcgacaggtgtttttccaggtctgaccatcttgccctccacatgaagagacatatctaaaaaaccgaaaggccagagttgccatggcatcggctagtgtctaaaggaaacgccatgaggcagggggctggacttcaggcggggacccattgcctcgcagaagaaagctctcacttataaacctctgtacacacacacacacacacacacatatacacacactcacagacccacacacatacacactgtcatgcactcaactatatttaaaatatatacgtctattctttatgccttgccctagccagatggaagaagatgaagaaggaaaccaggtgaactcagcaaggcagactggctgcttacttcagcactattggaattatttcccgctgttgccaatggaaatcaaagaaaatggatgtgacgtctgtgcaggtggacggcagtccgaggggcttatttcac

SEQ ID NO: 140260 - DNA, 909 bp, Artificial Sequence
  derived and/or modified sequence
atggacgttctggcctcatactcaatcttccaggaacttcaactggtacatgacaccggttatttttcagccctgccctcactcgaagagacctggcagcagacctgcctagagctggagcggtatctccaaacagagccacggagaatatccgagacattcggtgaggacttggactgttttctgcatgcctccccacccccttgcatagaggaatcctttagacgtcttgacccactgcttctgccggtggaggccgccatttgcgagaagtcctcagccgtggacatcttgttgtcccgcgacaagctgttgtcagaaacctgcttatcccttcagccagcctctagtagcctggactcctacaccgcggttaatcaggctcagctgaatgcggtgacctccctgacaccaccttcctctccagagttgagtcgccacctcgttaagacctcacaaactctgtcagctgtcgatggtactgtcaccctgaagttagtggctaaaaaagccgccctttctagtgttaaagtcgggggcgttgcaaccgccgccgccgccgttacagctgctggagcagttaaaagtggccaatctgactctgatcaaggggggcttggagcagaagcatgcccggagaacaaaaaacgggtgcaccggtgtcaattcaacgggtgtaggaaagtgtatactaaaagtagccatctgaaggcccatcaacgaacccacactggcgaaaagccgtacaaatgttcctgggaaggttgcgagtggcggttcgccaggtctgatgaactgactcgtcattatcgcaagcataccggcgccaagccttttaagtgcaaccactgcgatagatgcttctcaaggtccgaccaccttgcacttcacatgaagcggcacatttag

SEQ ID NO: 140261 - DNA, 8362 bp, Artificial Sequence
  derived and/or modified sequence
agcgctgcagaaatagatggcagcttcgtgtcagtgagtttgcatcccccttcctgatccacgagctggagtgattagagccctggaagggaattgttactcccgtggagaagtccccttttcctggcagtcgtctgcactgtacacgctggatgcctctctccatccaccccactcactcgctcctctctcacctcctctctccctctcctgcattgatttttttttttcctttttagttgactgaaacaaaacaaaacaaaagggccactggatgtctgccttcttggggggtgagccagacagactgacaaacaaacagccccaactgtgttcgggggagggtttcgcctcccgttttgcccggcagcagcagcatggacgtgttggctagttatagtatattccaggagctacaacttgtccacgacaccggctacttctcagctttaccatccctggaggagacctggcagcagacatgccttgaattggaacgctacctacagacggagccccggaggatctcagagacctttggtgaggacttggactgtttcctccacgcttcccctcccccgtgcattgaggaaagcttccgtcgcttagaccccctgctgctccccgtggaagcggccatctgtgagaagagctcggcagtggacatcttgctctctcgggacaagttgctatctgagacctgcctcagcctccagccggccagctcttctctagacagctacacagccgtcaaccaggcccagctcaacgcagtgacctcattaacgcccccatcgtcccctgagctcagccgccatctggtcaaaacctcacaaactctctctgccgtggatggcacggtgacgttgaaactggtggccaagaaggctgctctcagctccgtaaaggtgggaggggtcgcaacagctgcagcagccgtgacggctgcgggggccgttaagagtggacagagcgacagtgaccaaggagggctgggggctgaagcatgtcccgaaaacaagaagagggttcaccgctgtcagtttaacgggtgccggaaagtttatacaaaaagctcccacttaaaggcccaccagaggactcacacaggtgagaagccttataagtgctcatgggagggatgtgagtggcgttttgcacgaagcgatgagctcacgaggcactacaggaaacacacaggtgcaaagcccttcaaatgcaaccactgcgacaggtgtttttccaggtctgaccatcttgccctccacatgaagagacatatctaaaaaaccgaaaggccagagttgccatggcatcggctagtgtctaaaggaaacgccatgaggcagggggctggacttcaggcggggacccattgcctcgcagaagaaagttctcacttataaacctctgtacacacacacacacacacacacatatacacacactcacagacccacacacatacacactgtcatgcactcaactatatttaaaatatatacgtctattctttatgccttgccctagccagatggaagaagatgaagaaggaaaccaggtgaactcagcaaggcagactggctgcttacttcagcactattggaattatttcccgctgttgccaatggaaatcaaagaaaatggatgtgacgtctgtgcaggtggacggcagtccgaggggcttatttcacttgcttctcagtgcaacttgataggagaatccagcatcttaaagttgcatatgtgtagcactaatgtttctttttaaatagttgggggaaaatgacctagaaaaccaaattgcagtttggtagccaaaattaactcttggtttatttgtcctttgtgtgtgaaaagtcctactattccgtgcgtcagacttcctcacagaactgttgactggttttggttcttagtactattgagatctttcgcgtcgatcccaacggccttagcggcggcagactggaataacaccttacacctttctggcctgcatttctgtagacttcactctcaagggaggagttttcttttcttacgttttgacttttgcacaccatatgcactagggattctggaaacttctagcatgactgcaaagtggccaagagaataaagtccttgatgataaatcacagtatatcccttgagcctcaccttattgccagtgctagattttttctttttaatctctccgtttttgctaacgaaaacttgaaaagcttatttggaagcttaaatgttttatcttttctccatggactaaacctctccaggactctctcggcacctggatgtccagctctcgaagcagccagtcagatgggacatcacagttctctcatcctccttgaggcatgatgacctcagctcatagtgatcaaccgttgtgctgtgtgtcattgctaccccataaccagttacagcatagatgtcgctagtctcagagggcagctgcgtatttaatttaactctggtttatgacctgacaaaaagccaaaaatatcactctttccaggagtggggaaaactgaggatgcctcccaagtctagtggcttcacaaaagatcatcctgtcttctctgtcatgcccactgagctcctattcccctacgtgttacaatacacaatttaaaacgccattgtgggagtgaagggttgacatttaaggaaaaggttgaggtgtttctctcatgggctgtctaaaaggagagacacgtttctttctttccttttttttttggctaggcccaccatgacttgtgacctagaacccccaggattaacagaggcctcacatttactctgcaagctgactccaaaggagtctacagtccttacttgtcatgccacactcacacatccagtagtggtctctatctacccgcattcctagctagctggcactggcctcaactccaaagactgcctttaggaccatcaaatggcctatgcaagcaagcggggtggttattaggacagattgtatattttgtatattctgggaccatcccttcaagacacgtctataaaacaaaaatggcgcttggtccacacacggttgctgctccctcctaccagctggctcccctcctgtcctcctttgactgtttgactcattgactgttaaaatgccaccccatacatatttgggatgcaaaactgaagtcaaaaggaaataatataagaaacacaaacacatatatgacagcaaccttcaagatctgggttttcagctttctgcaacctttgttttcactgaaatgttgaaactactcgtctgagggcaaaggaacctcctcacaaatgctatagctgccaattggacacttggggcatttcgaggtctggccctaagaatttactttctccttttccttttttctatttagaccaaaaaaaacaaaaacaaaaacaaaaaaaaaaacaaaataatacaaaacgaaaaaaaaagaaagaacacccgttaacacacacgcgcacacacacacaaaatctgtccatttgccggaggcaattgtatgtatgttagttggagggtattaaaaatcagttttattccaaagatttaaaactagacatgacttaaaaacaatttctggagcactgcttgctgacaatctcgtagttctctgctgcatttgagtgcattttgtggccagtccatcagggcgtaccatgggattatatttgaatgtgtggtgcatccttcctggatgaaggatgtgtgagggaccttgaacctcagctgtattaaactgtagcgcctccagtcagtgcactagatgaaacttttagacaccctgaattctgttggttcctttcttttcctttatgtagcagcctccagcatgaatgcacgcacacgccagtgatggcattaagccatggccaccacgatttgcaaatgttctctcccaagctggagctgctcttgcctctcgaatgctattattaagggtttataatacttaatttaattttcgaactgaccaatgcaaggctctattaaaaagaaagtttaaaaaatgcaaaagagtaatcattgcttgtttgctccctattttcatctgtggtctcatttgaatgtggcagaacaaaggccctttggtcctcatcagtgtctgaaatgttcagtaatttctctctcttttgtatcagtgaggtcctttgtaatctgctcctgacctttcttggagcagggtgcattgaaactcaatggtggtgcttgcttgcttcagagtcatttgttgactgtgagaattggcctaagaatttggtgggtgctaagtggatggctttgaaactgttcttctttagccgagttgacacctgtgaatgatgaccagtcctgatcattttggaaatggatttgtaataaaacgtccatcacctctgcagtggcagagatggttactaagagccgctagagcgagcaggttttccaagaagtaacctgaagacattttgctcccaagaggactggttatttaaaacagtgcattaatggacatttgaaacacattaaacccctttctcatttcagttgttacctcctaaccctccaggggatcccaaatttgaaaggaaaaacccggcctggtgtttctggtggtgtcctaacaagcacgcttttatccagggttcagatttgttcatgtagaaaaagagtttctaagccactgacaattttttttttttgtaatttcaaattatacttctttctcctgccacatgactgtaagtcatagacatggaaacctgaaattataatgctgctcctagctactggcctcctgccccacccatggttaatggctcagctcaatgcctggtggtaatgagtattatgtccagaaaaagagatgttcagattccatgacaaagctgcatttttgtaaaaatattggagaccccaaaatgaacttcatgctgaccatttcctcctctctgtgtgctttcccttgcaaagcccttcaaatatcctcttctctcgacgccatctcctctccacctgcacctcttgtgccctttgtacatctttgattgcctgatgataacagggtaaaaggacagccaacctcatgcctgattagcagaactgaatcctagttttaaaaaatcttctctggcttcagagaagattttataaggacttttgtttgggataagctttccagattatccatgtctatttgcatcaaaggggaaagaaatggggcttttggatggctcttccagtgcattcggaacattgcctcttgcctttattcctgcattttatggcaaagccaaaagaaactcaagttgcaagaacaaaacccagtgactcgttttgatggttcaaaatggtttcctttatggaagtcacttcataaaatgttaagtaaaaagtgggaagtgcttctgtcttctcttttgcatgagttgcttttaggagcaggaagaaggtaggcaaagtaagataaagatgcaacacatttaactacaaaaatcaggttcattttttagtttattagaatttttttgaaatcttaagagggccagcatttctggctacaattttgcacccagaacattgccaaaatgaacattcagtaaatagaacctgattgaaatttactcctggaagctttcctttgcattttcgggaagtggccacctgccaagcgcaagagttggggggcaggaggggaggactcaaattcagggtgtctggattaaatttcggtgaacatggtgatatctcagtttgaaaactagagggcctatcctgagtatacatcaatgtctctttgatggcctactttcctcagtgaggatctttgggaatacttgagatggaacaacagaaatgtgtgaaaggaagcagaaacttcttgtaaataacgtgacctcccacgacgaactgcctgaggcttcagggttttttcttgcttttaacactcttaaatctcctctgttggttcctaatagatcccagaaaagggaaaaataaagctgcagttaactttcttatgtgcatccttccaatagagtactgtatttttcaggtgttttgcatttaacataaaagtcctcgggaaacaggtgtcaaaaacagagagagaaatcctgggccatcacttcacaaatatcccaaacaagatattcttttcaaacagggctccctctcagtggtcatgagggaaggttgataatgttctttgttggggactgtttatacaattttttttcaactgtgagctttggaatcgtaacttgctgtgagtccagcttctgtctactgccataagatggaccccacgtcagcataatgagggtggtatatatgctcgcacctagacatgcgcatatgtacctgtcgtaccttcacggaaggaaaacaggctactgacgtttcggaggagtagccaccagtgcctaatatcttttgggggggatggatgcttataattgccagtatatcgaaaccacactgggagttccacatagcggggaggggttgggggtgggcagaggggacattttaaacctaggcctttggactggaggcagaacgatttctgcaaacctaggtcctgaaggctttggggcttattggctggttctcaacctttttgttttttcttcccagcatgcatttcctatctaaacccagacttagtttaatttccttatctttcacttctgcttcattccagggaggaaaaatacacctgttaatggccaagatctccttgctaacacagaggcaaaaataaatgtctaatgtttttgaagcctccccttcctttccacaagcccccacccgcccccgcgtcaagctccttctcccacttcctactcccacacaacttcccagccactgaaacttttctttcaaatctctattatcctcttaacagttgcttgaataaatttatttttgcactatacattttctttttgccagatgtgtctaacaagtgtgtttggagagacctactcccagccccgtctccttccccgcctccccccgtcacattctctcaggccttctctggtatttataatatatcacagaagtacccagtcttatagccctcggttatgcctttttttgacattttattttttttaagctttttatatatatatatatataaatatattactttgtcaagtttttttgctgtacaaaagtcttaagatttaaaactattatttgtattatatgatggtggtatgttaatgttacaaaattattaatgaagaaaaaatttatttttgttactggtctgtttcataattcttttttaaattggtatattgtaagatatctatgcaaaaaatgttatgtgacgcatttttatttaagaatgtaatatgtgtaataaacagtagaatgtgtttggccttggaatactttactgtatttctccttagcttgtttcactggggaaaaaaatcttcgaaagacgcaagtgggtacttacatacttcgtgaaagttttctttcttggagaaagggaaagcaaaaggttgtattaggttatcttcgtttgggaagttgtgtgtgtgtgtgcgtatgtgtgtattttatagtttcattgaggcagctcaatgcccaaataagggtcactgagtttatttcttcaaggggaaaaagggagccaattgttggagattatgaaaagcaatattttagaatgatagagattacaagatgttatttgtttagggggttgggagaggcttattgaaagcggtttatttggcgagagaaggaggcagtttgttctgggatggtgtttaataggaacctattgggaaaggatctttgaagcagtctgtgaaggaggaagggtaaagatcagagggaataatttaggtgaggggtagggggcagtaaaatgacaggaggtggttggagtggggaggaaatgggtaaccggaagccaggaaatccagctggctgtggagagtacaaaaaactagatggaaatacaagcagcttcagacccagagaagagagggagatgaaagccccagggaaaattctcagaactgaaaagaaaagtactaaaatctctgccacacacgacttccaggaaagagcatcaccagtaaggaggaaggtagagaacccagctggtggtgtcgcctcagcatcccgagctcagcgattccccgagagaagtggtgtcattcacaggaaacagcagtaaaacacatttgtcacatgggacacagcagtagtcaagctttctttgcattctttggacttacagaagtggatacggtggtgaataacctctatccctaatcaaatgaatctgacaagaaactttccaataaatgtttactttagaaa

SEQ ID NO: 140262 - DNA, 909 bp, Artificial Sequence
  derived and/or modified sequence
atggatgtgctggccagctacagcatcttccaggagctgcagctggtgcatgacaccggctacttcagcgccctgcccagcctggaggagacctggcagcagacctgcctggagctggagcgctacctgcagacagagccccggcgcatcagcgagaccttcggggaggacctggactgcttcctgcacgccagccccccaccctgcatcgaggagagcttccggcggctggaccccctgctgctgcctgtggaggccgccatctgtgagaagagcagcgctgtggacatcctgctgagccgggacaagctgctgtctgagacctgcctgagcctgcagcctgccagcagcagcctggacagctacacagctgtgaaccaggcccagctgaatgctgtgaccagcctgaccccacccagcagccctgagctgagccgccacctggtgaagaccagccagaccctgtctgctgtggatggcaccgtgaccctgaagctggtggccaagaaggccgccctgagctctgtgaaggtgggcggcgtggccacagctgctgctgctgtgacagctgctggagctgtgaagagcggccagagcgacagcgaccagggcggcctgggcgctgaggcctgcccagagaacaagaagagggtgcaccgctgccagttcaacggctgcaggaaggtgtacaccaagagcagccacctgaaggcccaccagaggacccacactggagagaagccctacaagtgctcctgggagggctgtgagtggaggtttgcccggagtgatgagctgaccaggcactacaggaagcacactggagccaagcccttcaagtgcaaccactgtgaccgctgcttcagcagaagtgaccacctggccctgcacatgaagaggcacatctag

SEQ ID NO: 140263 - DNA, 909 bp, Artificial Sequence
  derived and/or modified sequence
atggacgtgctggccagctacagcatcttccaggagctgcagctggttcacgacaccgggtatttctccgcattgccttccctggaagaaacatggcagcagacatgcctcgagctggaacgctacctgcagaccgagccccgtcggatatctgagacattcggggaggacttagattgcttcctacatgcctccccccccccctgcatcgaagaatcgtttcgccgacttgatccactgctcttacctgtcgaggctgcgatctgcgagaagtcaagcgccgtcgacatcctgctctcccgagataaacttctttcggaaacctgtttatctctgcagccggccagctcctctctcgacagctatacagccgtaaatcaggcacagctgaacgccgtcaccagtctcacacctcccagctcgcctgagctgagtcggcacctggtcaaaacatcgcagactctctccgccgtagatggcactgtgaccctgaaactggttgcgaagaaagctgctcttagttccgtgaaagtcgggggagtggcaacagctgcggcagctgtgaccgctgcgggagcggttaagtcagggcaaagcgattctgatcagggaggactcggggcggaagcttgccccgagaacaaaaagagggttcaccgatgccagtttaacggatgtcgaaaggtatatactaagtccagccacctgaaagcacaccagcggacccacaccggggagaaaccatacaagtgttcttgggagggatgtgaatggagatttgccaggagtgacgagctgacgaggcattaccgtaaacatacaggggctaaaccgttcaagtgcaaccactgtgaccggtgcttctctcgtagcgaccacctggctcttcacatgaagcgccacatttag

SEQ ID NO: 140264 - DNA, 909 bp, Artificial Sequence
  derived and/or modified sequence
atggatgttttggcatcctactcgatttttcaggaacttcagctggtgcacgatactggctacttttctgcactgccctcattggaggagacatggcagcagacctgtttagagctggagcgttatttgcagaccgaaccgcgacgcatctcggagacgttcggagaggatcttgattgtttccttcacgcatcacctcccccatgcattgaagaaagctttagaagactggaccctttactgctccccgttgaggccgctatctgcgaaaaatcaagtgccgttgatattcttcttagtagggacaagctgctgagtgagacatgcctgtccctccaacctgccagttccagcctggacagttacacagcagtgaaccaggcacagttgaacgcggtaacctctctcactccgccatcttctccagagctgagccgtcacctcgtcaagactagccagactcttagtgcagtggacggaaccgtgacccttaagctcgtggccaagaaggcagcactttcaagtgtcaaggtcggcggagtggctacagctgccgctgctgtcactgccgcaggggcagtcaaaagcggccagtccgacagtgatcaggggggtctcggtgcagaggcctgtcctgagaacaagaaaagggttcatcgttgccagtttaatggctgtcgaaaggtgtacacaaagtcaagccacctgaaggcccaccaacggactcatactggagaaaagccctacaaatgcagctgggagggctgcgagtggcggttcgcacggtctgacgaactgacccgccattacaggaaacacaccggtgccaaaccatttaaatgcaaccattgcgatcgctgcttctcccggagcgatcaccttgccctccacatgaagcgccatatttag

SEQ ID NO: 140265 - DNA, 909 bp, Artificial Sequence
  derived and/or modified sequence
atggacgtgctggccagctacagcatcttccaggagctgcagctggtgcacgacaccggctacttcagcgccctgcccagcctggaggagacctggcagcagacctgcctggagctggagagatacctgcagaccgagcccagaagaatcagcgagaccttcggcgaggacctggactgcttcctgcacgccagcccccccccctgcatcgaggagagcttcagaagactggaccccctgctgctgcccgtggaggccgccatctgcgagaagagcagcgccgtggacatcctgctgagcagagacaagctgctgagcgagacctgcctgagcctgcagcccgccagcagcagcctggacagctacaccgccgtgaaccaggcccagctgaacgccgtgaccagcctgaccccccccagcagccccgagctgagcagacacctggtgaagaccagccagaccctgagcgccgtggacggcaccgtgaccctgaagctggtggccaagaaggccgccctgagcagcgtgaaggtgggcggcgtggccaccgccgccgccgccgtgaccgccgccggcgccgtgaagagcggccagagcgacagcgaccagggcggcctgggcgccgaggcctgccccgagaacaagaagagagtgcacagatgccagttcaacggctgcagaaaggtgtacaccaagagcagccacctgaaggcccaccagagaacccacaccggcgagaagccctacaagtgcagctgggagggctgcgagtggagattcgccagaagcgacgagctgaccagacactacagaaagcacaccggcgccaagcccttcaagtgcaaccactgcgacagatgcttcagcagaagcgaccacctggccctgcacatgaagagacacatctag

SEQ ID NO: 140266 - protein, 284 aa, Artificial Sequence
  derived and/or modified sequence
MFDKTRLPYVALDVLCVLLAGLPFAILTSRHTPFQRGVFCNDESIKYPYKEDTIPYALLGGIIIPFSIIVIILGETLSVYCNLLHSNSFIRNNYIATIYKAIGTFLFGAAASQSLTDIAKYSIGRLRPHFLDVCDPDWSKINCSDGYIEYYICRGNAERVKEGRLSFYSGHSSFSMYCMLFVALYLQARMKGDWARLLRPTLQFGLVAVSIYVGLSRVSDYKHHWSDVLTGLIQGALVAILVAVYVSDFFKERTSFKERKEEDSHTTLHETPTTGNHYPSNHQP

SEQ ID NO: 140267 - DNA, 855 bp, Artificial Sequence
  derived and/or modified sequence
atgttcgacaagaccagactgccctacgtggccctggacgtgctgtgcgtgctgctggccggcctgcccttcgccatcctgaccagcagacacacccccttccagagaggcgtgttctgcaacgacgagagcatcaagtacccctacaaggaggacaccatcccctacgccctgctgggcggcatcatcatccccttcagcatcatcgtgatcatcctgggcgagaccctgagcgtgtactgcaacctgctgcacagcaacagcttcatcagaaacaactacatcgccaccatctacaaggccatcggcaccttcctgttcggcgccgccgccagccagagcctgaccgacatcgccaagtacagcatcggcagactgagaccccacttcctggacgtgtgcgaccccgactggagcaagatcaactgcagcgacggctacatcgagtactacatctgcagaggcaacgccgagagagtgaaggagggcagactgagcttctacagcggccacagcagcttcagcatgtactgcatgctgttcgtggccctgtacctgcaggccagaatgaagggcgactgggccagactgctgagacccaccctgcagttcggcctggtggccgtgagcatctacgtgggcctgagcagagtgagcgactacaagcaccactggagcgacgtgctgaccggcctgatccagggcgccctggtggccatcctggtggccgtgtacgtgagcgacttcttcaaggagagaaccagcttcaaggagagaaaggaggaggacagccacaccaccctgcacgagacccccaccaccggcaaccactaccccagcaaccaccagccctag

SEQ ID NO: 140268 - DNA, 855 bp, Artificial Sequence
  derived and/or modified sequence
atgtttgataaaactcgattaccttatgtggcccttgacgtgttgtgcgtgctcctcgccgggttaccgttcgcaatcctgacaagcagacacacccccttccagaggggcgtgttctgcaacgatgaaagtatcaaatacccctataaagaggataccatcccgtacgccctccttgggggtatcatcatcccattcagtattatagtcattatccttggcgaaactctttccgtatactgcaacctactgcacagcaattcttttataagaaacaactatattgccactatttataaggccataggcacattcctgttcggcgcagcagcctctcagtcactaacagacatagctaagtatagtattggcagactcaggccccatttcctggacgtgtgtgacccagactggtctaagataaactgttcagacggctacatcgagtactatatctgtcggggcaatgcagagcgggtcaaagagggccgactcagcttctattccggccacagctctttttctatgtactgtatgttatttgtggccctttacctacaggcaaggatgaaaggagattgggccagacttttaagaccgaccttgcaattcgggcttgtagcggtgtcaatctacgtaggactgtcccgtgtcagcgactacaaacatcattggagcgatgtgctgacgggcttgatccaaggcgccctggttgctattctggtggccgtgtatgttagcgatttcttcaaggaacggaccagctttaaggaacgcaaggaggaggattcacacacaacccttcacgagactccaaccaccgggaatcattatccttccaatcaccagccatag

SEQ ID NO: 140269 - DNA, 855 bp, Artificial Sequence
  derived and/or modified sequence
atgtttgacaagacccggctgccctacgtggccctggatgtgctgtgtgtgctgctggccggcctgccctttgccatcctgaccagccgccacacccccttccagaggggcgtcttctgcaatgatgagagcatcaagtacccctacaaggaggacaccatcccctatgccctgctgggcggcatcatcatccccttcagcatcatcgtcatcatcctgggggagaccctgtctgtgtactgcaacctgctgcacagcaacagcttcatccggaacaactacatcgccaccatctacaaggccatcggcaccttcctgtttggagctgctgccagccagagcctgacagacatcgccaagtacagcatcggccgcctgcggccccacttcctggatgtgtgtgaccctgactggagcaagatcaactgcagtgatggctacatcgagtactacatctgcagaggaaatgctgagcgggtgaaggagggccgcctgtccttctacagcggccacagcagcttctccatgtactgcatgctgtttgtggccctgtacctgcaggccaggatgaagggggactgggcccggctgctgcggcccaccctgcagtttggcctggtggccgtgtccatctacgtgggcctgagccgggtgtctgactacaagcaccactggagcgatgtgctgaccggcctcatccagggcgccctggtggccatcctggtggccgtgtatgtgtctgacttcttcaaggagaggaccagcttcaaggagaggaaggaggaggacagccacaccaccctgcacgagacccccaccaccggcaaccactaccccagcaaccaccagccctag

SEQ ID NO: 140270 - DNA, 855 bp, Artificial Sequence
  derived and/or modified sequence
atgttcgacaagacccggctgccctacgtggccctggacgtgctgtgtgttctgctggctggtttaccattcgcgatattaaccagccgtcatacacccttccagagaggcgtgttttgcaatgatgagagcatcaagtacccttataaagaagatacgatcccttacgcactcctcgggggaatcattattccattcagtatcatcgtgatcattctgggggaaacactttccgtgtattgtaacctgctccacagcaactccttcataaggaacaactacattgctactatttacaaggcaatcggtacgttcctgtttggggcggctgcctcccagtcacttacagatatcgccaaatacagtatcggacgtctgagaccgcatttcctcgatgtgtgcgatcctgattggagtaaaatcaattgttccgatgggtacattgaatactacatctgtcggggaaacgcggagcgcgtcaaagagggtagattgagcttttatagtggtcattcttctttttcaatgtattgcatgctgtttgtagcactgtacctgcaggcgagaatgaagggcgattgggccagacttctgcgtccaactctacagttcggtttggtggccgtgagcatctacgtcgggctgtcccgcgtgagcgactataagcatcactggagtgatgtgctcacaggcctcatccagggagctctagtggcaattcttgttgccgtgtatgtgtccgatttttttaaagaacggacgtcgttcaaagagcggaaggaggaagattcacatacaacccttcacgaaaccccgacgaccggaaatcattacccatccaaccatcaaccgtag

SEQ ID NO: 140271 - DNA, 1597 bp, Artificial Sequence
  derived and/or modified sequence
gctgctcagcgggaggggctggaccccgcgttcctcctccctgccggtccccatccttaaagcgagagtctggacgccccgcctgtgggagagagcgccgggatccggacggggagcaaccggggcaggccgtgccggctgaggaggtcctgaggctacagagctgccgcggctggcacacgagcgcctcggcactaaccgagtgttcgcgggggctgtgaggggagggccccgggcgccattgctggcggtgggagcgccgcccggtctcagcccgccctcggctgctctcctcctccggctgggaggggccgtagctcggggccgtcgccagccccggcccgggctcgagaatcaagggcctcggccgccgtcccgcagctcagtccatcgcccttgccgggcagcccgggcagagaccatgtttgacaagacgcggctgccgtacgtggccctcgatgtgctctgcgtgttgctggctggattgccttttgcaattcttacttcaaggcatacccccttccaacgaggagtattctgtaatgatgagtccatcaagtacccttacaaagaagacaccataccttatgcgttattaggtggaataatcattccattcagtattatcgttattattcttggagaaaccctgtctgtttactgtaaccttttgcactcaaattcctttatcaggaataactacatagccactatttacaaagccattggaacctttttatttggtgcagctgctagtcagtccctgactgacattgccaagtattcaataggcagactgcggcctcacttcttggatgtttgtgatccagattggtcaaaaatcaactgcagcgatggttacattgaatactacatatgtcgagggaatgcagaaagagttaaggaaggcaggttgtccttctattcaggccactcttcgttttccatgtactgcatgctgtttgtggcactttatcttcaagccaggatgaagggagactgggcaagactcttacgccccacactgcaatttggtcttgttgccgtatccatttatgtgggcctttctcgagtttctgattataaacaccactggagcgatgtgttgactggactcattcagggagctctggttgcaatattagttgctgtatatgtatcggatttcttcaaagaaagaacttcttttaaagaaagaaaagaggaggactctcatacaactctgcatgaaacaccaacaactgggaatcactatccgagcaatcaccagccttgaaaggcagcagggtgcccaggtgaagctggcctgttttctaaaggaaaatgattgccacaaggcaagaggatgcatctttcttcctggtgtacaagcctttaaagacttctgctgctgctatgcctcttggatgcacactttgtgtgtacatagttacctttaactcagtggttatctaatagctctaaactcattaaaaaaactccaagccttccaccaaaacagtgccccacctgtatacatttttattaaaaaaatgtaatgcttatgtataaacatgtatgtaatatgctttctatgaatgatgtttgatttaaatat

SEQ ID NO: 140272 - DNA, 855 bp, Artificial Sequence
  derived and/or modified sequence
atgtttgacaaaacccggttgccctacgttgccttagacgtcctgtgtgtcttactagcaggcctgcctttcgcgatcctcaccagtcgtcatacaccgtttcagcgcggagtcttctgtaatgacgaatccatcaaatacccctacaaggaagacaccatcccctacgctctcctcggtggcatcattataccttttagcattatcgttatcatacttggagaaaccttatccgtatattgcaaccttttgcattctaacagctttatccggaataactacattgctacgatttataaggcgatcgggacattcctgttcggagccgcagcttctcagtctctgactgatattgccaaatattcaatcgggaggctacgcccacatttcctcgacgtgtgtgaccccgattggtcaaagatcaactgcagtgacggctatattgagtattacatctgccggggaaacgcggaacgggttaaggaaggtcgcctcagtttttatagcgggcactccagctttagcatgtattgcatgttgtttgttgccctctacttgcaggcgaggatgaagggagattgggcgaggctgctgcgacccaccttacaattcggactcgtcgccgtttcaatctacgttggactgagcagagtttcagattacaaacatcattggagtgatgtgttgacaggactgattcagggcgctctggtggctattctggtagctgtttacgttagtgattttttcaaggaacgtacaagcttcaaagagaggaaagaagaggatagtcacacaacactccacgagactccaactaccggtaaccattacccttccaaccaccagccttag

SEQ ID NO: 140273 - protein, 288 aa, Artificial Sequence
  derived and/or modified sequence
MQRRWVFVLLDVLCLLVASLPFAILTLVNAPYKRGFYCGDDSIRYPYRPDTITHGLMAGVTITATVILVSAGEAYLVYTDRLYSRSDFNNYVAAVYKVLGTFLFGAAVSQSLTDLAKYMIGRLRPNFLAVCDPDWSRVNCSVYVQLEKVCRGNPADVTEARLSFYSGHSSFGMYCMVFLALYVQARLCWKWARLLRPTVQFFLVAFALYVGYTRVSDYKHHWSDVLVGLLQGALVAALTVCYISDFFKARPPQHCLKEEELERKPSLSLTLTLGEADHNHYGYPHSSS

SEQ ID NO: 140274 - DNA, 867 bp, Artificial Sequence
  derived and/or modified sequence
atgcagagaagatgggtgttcgtgctgctggacgtgctgtgcctgctggtggccagcctgcccttcgccatcctgaccctggtgaacgccccctacaagagaggcttctactgcggcgacgacagcatcagatacccctacagacccgacaccatcacccacggcctgatggccggcgtgaccatcaccgccaccgtgatcctggtgagcgccggcgaggcctacctggtgtacaccgacagactgtacagcagaagcgacttcaacaactacgtggccgccgtgtacaaggtgctgggcaccttcctgttcggcgccgccgtgagccagagcctgaccgacctggccaagtacatgatcggcagactgagacccaacttcctggccgtgtgcgaccccgactggagcagagtgaactgcagcgtgtacgtgcagctggagaaggtgtgcagaggcaaccccgccgacgtgaccgaggccagactgagcttctacagcggccacagcagcttcggcatgtactgcatggtgttcctggccctgtacgtgcaggccagactgtgctggaagtgggccagactgctgagacccaccgtgcagttcttcctggtggccttcgccctgtacgtgggctacaccagagtgagcgactacaagcaccactggagcgacgtgctggtgggcctgctgcagggcgccctggtggccgccctgaccgtgtgctacatcagcgacttcttcaaggccagacccccccagcactgcctgaaggaggaggagctggagagaaagcccagcctgagcctgaccctgaccctgggcgaggccgaccacaaccactacggctacccccacagcagcagctag

SEQ ID NO: 140275 - DNA, 867 bp, Artificial Sequence
  derived and/or modified sequence
atgcaaagacgctgggtgttcgttctccttgatgttctgtgcctgttggtggctagtttgccatttgcaattctgaccctagtgaacgcaccgtacaaacggggcttctattgtggggatgattccatacgctacccctatcgacccgatactatcacgcatggcctcatggccggagttacaataacggcgactgtgatcctggtctcggctggggaggcttacctcgtgtatactgatagactgtactccaggagcgacttcaacaattacgtcgccgcggtgtacaaagtcctgggcactttcctgtttggagcggctgtctctcagagtctcactgacctggccaaatacatgattggccggttacggccgaattttctcgccgtgtgtgatccggattggtcacgagtaaactgctcggtgtatgttcagttggaaaaggtgtgtaggggcaatccagcagatgtgacagaggcacgcctgtctttctactccggccatagttcttttggaatgtactgtatggtgtttcttgccttatacgtccaggctcgactctgctggaagtgggcgcggcttctgaggccaacagtgcagttctttcttgtggcttttgcactttatgtgggttacacacgtgtgtctgactacaagcaccattggtctgacgtgcttgttggactcctgcagggagccctggtcgccgccctgaccgtgtgctatatatctgacttttttaaagctcgtcctcctcagcattgtctgaaggaagaggagcttgaacggaaaccttcactcagccttacactgaccctcggggaagcagaccataaccattacgggtatccacatagttcctcctag

SEQ ID NO: 140276 - DNA, 867 bp, Artificial Sequence
  derived and/or modified sequence
atgcagaggcgctgggtgtttgtgctgctggatgtgctgtgcctgctggtggccagcctgccctttgccatcctgaccctggtgaatgccccctacaagaggggcttctactgtggagatgacagcatccgctacccctacagaccagacaccatcacccacggcctgatggccggcgtgaccatcacagccaccgtcatcctggtgtctgctggggaggcctacctggtgtacacagaccggctgtacagcagaagtgacttcaacaactacgtggccgctgtgtacaaggtgctgggcaccttcctgtttggagctgctgtgtcccagagcctgacagacctggccaagtacatgattggccgcctgcggcccaacttcctggccgtgtgtgaccctgactggagccgggtgaactgcagcgtgtatgtgcagctggagaaggtgtgccggggcaacccagcagatgtgacagaggcccggctgtccttctacagcggccacagcagctttggcatgtactgcatggtgttcctggccctgtatgtgcaggcccggctgtgctggaagtgggcccggctgctgcggcccaccgtgcagttcttcctggtggcctttgccctgtatgtgggctacaccagggtgtctgactacaagcaccactggagcgatgtgctggtgggcctgctgcagggcgccctggtggccgccctgactgtgtgctacatcagtgacttcttcaaggcccggcccccccagcactgcctgaaggaggaggagctggagaggaagcccagcctgagcctgaccctgaccctgggggaggccgaccacaaccactacggctacccccacagcagcagctag

SEQ ID NO: 140277 - DNA, 867 bp, Artificial Sequence
  derived and/or modified sequence
atgcagcggcggtgggtgttcgtgctgctggacgtgctgtgcctgttagtggccagccttccattcgcgatcttgaccctggtaaatgccccttacaaaagaggcttctattgtggcgatgattccatccgatacccgtacaggccggacactattactcacggtctgatggctggagtgacaataaccgccacagtgatactggtgtccgcaggagaagcgtatctggtctacactgatcgcttatattcacgctctgactttaataactacgtggctgccgtctacaaggtactgggaaccttcctcttcggcgctgccgtgtcgcagagtcttacggacctggccaagtacatgattggccgcctgcgacccaactttcttgccgtgtgcgaccctgattggagtcgagtgaactgtagcgtttacgttcagttggaaaaggtgtgcagggggaatcccgccgatgtcacagaggcaagattatcgttctacagcggccactcatccttcggcatgtactgtatggtcttcctggcgctgtacgtgcaagcccgtctttgctggaaatgggctaggctgctccgtccgaccgttcagttcttcctggtggccttcgcgctctacgtgggatacacccgggtgtctgattataagcatcattggtcagatgtcttagtggggctgcttcaaggtgcactcgtagcagctctgaccgtgtgctatatctcagactttttcaaggctcggccccctcagcattgtctgaaggaggaggagctggaaaggaagccatccctttcactcacccttacactgggggaggccgatcataatcattacggctatccacacagctccagttag

SEQ ID NO: 140278 - DNA, 1306 bp, Artificial Sequence
  derived and/or modified sequence
ctcctctccgcgcggggcgggctccgcgccacgtgactccgcggccgggccgggacgcgacgggacgcgctgggaccggcgtcgggggtcgcggggaccatgcagcggaggtgggtcttcgtgctgctcgacgtgctgtgcttactggtcgcctccctgcccttcgctatcctgacgctggtgaacgccccgtacaagcgaggattttactgcggggatgactccatccggtacccctaccgtccagataccatcacccacgggctcatggctggggtcaccatcacggccaccgtcatccttgtctcggccggggaagcctacctggtgtacacagaccggctctattctcgctcggacttcaacaactacgtggctgctgtatacaaggtgctggggaccttcctgtttggggctgccgtgagccagtctctgacagacctggccaagtacatgattgggcgtctgaggcccaacttcctagccgtctgcgaccccgactggagccgggtcaactgctcggtctatgtgcagctggagaaggtgtgcaggggaaaccctgctgatgtcaccgaggccaggttgtctttctactcgggacactcttcctttgggatgtactgcatggtgttcttggcgctgtatgtgcaggcacgactctgttggaagtgggcacggctgctgcgacccacagtccagttcttcctggtggcctttgccctctacgtgggctacacccgcgtgtctgattacaaacaccactggagcgatgtccttgttggcctcctgcagggggcactggtggctgccctcactgtctgctacatctcagacttcttcaaagcccgacccccacagcactgtctgaaggaggaggagctggaacggaagcccagcctgtcactgacgttgaccctgggcgaggctgaccacaaccactatggatacccgcactcctcctcctgaggccggaccccgcccaggcagggagctgctgtgagtccagctgaggcccacccaggtggtccctccagccctggttaggcactgagggctctggacgggctccaggaaccctgggctgatgggagcagtgagcgggctccgctgccccctgccctgcactggaccaggagtctggagatgcctgggtagccctcagcatttggaggggaacctgttcccgtcggtccccaaatatccccttctttttatggggttaaggaagggaccgagagatcagatagttgctgttttgtaaaatgtaatgtatatgtggtttttagtaaaatagggcacctgtttc

SEQ ID NO: 140279 - DNA, 867 bp, Artificial Sequence
  derived and/or modified sequence
atgcagcgcaggtgggtcttcgtgctcctcgacgtcttgtgcctcctggtggcgtccctaccatttgcaatcttgacgctcgtcaacgccccttacaagagaggcttttattgcggcgacgactccatcagatacccatacaggcccgataccatcacacacggactgatggctggtgttacaataactgccacagtcatactggtctccgccggagaggcatatctcgtatataccgatagactgtattctcgatccgattttaacaattatgtcgccgctgtttacaaagtcctgggcacttttttatttggcgctgctgtatcacagtctctgactgatctggctaagtatatgatcgggcgattaaggcctaatttcctcgctgtgtgcgacccagattggagccgcgtgaattgttcagtgtatgtgcaactggagaaagtgtgtcggggaaacccagctgacgtaaccgaggcccgattatctttttactcaggccactcctcatttgggatgtactgtatggtgtttctggccctgtatgttcaggcccgactgtgctggaagtgggccagactgctgcgcccaaccgtccagttcttccttgttgcctttgctctctacgtgggttacacacgagtcagcgattacaagcaccattggtcggatgtgcttgtgggcctcctccagggcgctttagttgccgctctcacagtctgttatatatcggatttcttcaaggccaggccgcctcagcactgcctgaaagaagaagaattggagcgcaagcccagcctgtctctaactctaactctcggcgaggcagaccacaatcactatggttaccctcattcatcctcctag

SEQ ID NO: 140280 - protein, 302 aa, Artificial Sequence
  derived and/or modified sequence
MCAERLGQFMTLALVLATFDPARGTDATNPPEGPQDRSSQQKGRLSLQNTAEIQHCLVNAGDVGCGVFECFENNSCEIRGLHGICMTFLHNAGKFDAQGKSFIKDALKCKAHALRHRFGCISRKCPAIREMVSQLQRECYLKHDLCAAAQENTRVIVEMIHFKDLLLHEPYVDLVNLLLTCGEEVKEAITHSVQVQCEQNWGSLCSILSFCTSAIQKPPTAPPERQPQVDRTKLSRAHHGEAGHHLPEPSSRETGRGAKGERGSKSHPNAHARGRVGGLGAQGPSGSSEWEDEQSEYSDIRR

SEQ ID NO: 140281 - DNA, 909 bp, Artificial Sequence
  derived and/or modified sequence
atgtgcgccgagagactgggtcagttcatgacactggctctggtccttgccacttttgatccagcacgaggtactgacgcgacaaaccctccagaaggaccccaggaccgtagctcacagcagaaaggacgactgtctctgcaaaacactgcagagatccagcattgtcttgttaacgccggtgacgtgggatgtggagtgtttgaatgctttgagaataatagctgtgaaattcgcggactacacggtatttgcatgaccttcctgcacaatgccggaaaattcgatgctcagggcaagagtttcatcaaggatgctttgaagtgcaaggcccatgcactacgacaccgattcggctgcatctctcgaaaatgtcccgctataagagaaatggtatcacagctgcagcgggagtgttacctgaagcacgatttgtgtgccgctgcacaggaaaacacaagagtcatagtggaaatgatccactttaaagatctccttctccatgagccatacgtggatttggttaatctcctgctgacatgtggcgaggaggtgaaggaagccatcacccactccgtccaggtccaatgcgaacagaattggggaagtctgtgcagcattttgtcgttttgtacttcggctatccagaaacccccaacggcccctcctgagaggcagcctcaggtcgataggaccaaactctcaagagcccaccacggggaggcgggtcatcacctccccgagccaagctcacgtgagaccgggagaggtgctaaaggggagagggggagcaaatcccaccctaatgcgcacgcacgcggacgtgtgggaggcctaggagctcagggaccaagcgggtcgagcgaatgggaggatgagcagtctgaatactccgatatacgcagatag

SEQ ID NO: 140282 - DNA, 909 bp, Artificial Sequence
  derived and/or modified sequence
atgtgcgcggaaagactggggcagttcatgacgctggctttggtcctagctacttttgatccagcccgggggacagatgctaccaacccccccgaagggccccaggatcggagcagccagcagaaaggccgcctatcattacaaaacacagccgagatccagcactgccttgtaaatgcaggcgacgtagggtgcggagtatttgagtgctttgaaaacaattcctgcgagattcggggcctccatggaatttgtatgaccttcctgcataacgccggtaagttcgatgcacagggcaaaagctttatcaaggacgcgctgaagtgcaaagcgcacgcacttcgccaccgattcgggtgcatctccagaaaatgtcctgcgatccgagaaatggtgtctcagctgcaaagggaatgctatctgaaacatgatctatgtgccgccgcccaggaaaatacacgcgtgatagtggagatgattcactttaaggacctgctgctccacgagccctatgttgatctggtgaacctgctgttgacctgcggtgaggaagtgaaggaagccattactcattcagtacaagtacagtgcgagcagaattggggatccctatgctccattctttccttctgtacttctgctatccaaaaaccgccaaccgccccacccgagcggcagccccaggtggatcggacaaaattgagcagagcacaccatggagaggccggacaccacctgccagagccatcatctcgagaaactggaaggggagccaaaggcgagcgcgggagcaagtctcacccaaacgcacacgccagaggccgagtcggggggctaggtgcccagggccctagtgggtctagtgaatgggaggatgagcagtcagaatacagcgatatccgccggtag

SEQ ID NO: 140283 - DNA, 909 bp, Artificial Sequence
  derived and/or modified sequence
atgtgtgccgagcgcctcggacaattcatgacactggctttagttcttgccaccttcgaccctgcccggggaacggacgcgacaaatcctcctgaagggccacaggatcgatctagtcagcagaaagggcggctgagcctgcaaaataccgcagagatccagcactgcttggtgaacgcgggagatgtggggtgcggagtctttgaatgtttcgaaaataattcttgtgagatacgtggactgcatggcatttgcatgacatttctacacaacgccggcaagttcgatgcccagggaaaatccttcataaaagacgccctgaaatgcaaagcccacgccttgaggcatcgctttggctgcatctccagaaagtgccccgccatccgagaaatggtaagccaattacagagagagtgttacctcaagcacgatctctgcgcagccgcccaggaaaatactagagtcattgttgaaatgatccacttcaaagacctacttcttcatgagccctacgtcgacttggtgaatcttctattaacctgcggagaagaagtcaaagaggccatcacccactcagttcaggttcagtgtgaacagaactggggctctttgtgctccatcttatcattctgcacgtccgcgattcagaaaccccctaccgcacccccagaacgacaaccacaggttgacaggactaagctatcgcgcgcgcaccatggagaagccggccatcacctaccagagccaagttctcgcgaaaccggtcgaggagcaaagggagagcgcgggtctaaaagtcatcctaatgcccacgctagaggccgggttggggggctgggggcccaaggacctagtggcagttctgagtgggaagacgagcagtcagaatacagcgatataaggcgatag

SEQ ID NO: 140284 - DNA, 5353 bp, Artificial Sequence
  derived and/or modified sequence
tttctccttccctccacgggccgggtgagaaagtagccgggggctatcccgacccggcggttcttggggagggggccgaacaagaaaagggaggagatggagataacttccccggatttagcttttttgtctttgtttttgttctcaccacttccatcggatgactggagagtaaaagggaacccggagcggggtggcgagcagcgctttgagaaaatgcaggagtgtgtttggagacgcgtaaagttgcctttcaagctctggcctccgggcacgcgatgctccgcggcgggctgactcagggctgccttgggcctccctgccaccctcctggaaatgatgcaagtcctgactgtcacctggatccctgcagcccagcctggaatgcgtctggattaggggaaagacgagaaacgacactccaggtgttgcacggcccaccaaagcgggaagatagggcagttgctcagaccaaatactgtatctagtgcttctgctcctatcttcaatcgtggggttctttttaatgcaaagtgtcacaaggccaggaattcccatgtgtgctcagttggcccacagcatcattgtgcctaggaaactgcttcaatttatcaagtcctctgggctgggaatctcactgaattccaaacggcggaaagaggaaactttcccaacccgatgtgggtgtgacgcgagccaggggccccagggacactgtcccagagcacaccgtccccctttaacagcaactggagcttggattcgctcttatattgtacagtcctttcgaccattgccctggagcacccgcacacgcgcacgcatctccggccgcgctcacacacactcatacacacgcacgcaaacgcgtggccgccgccaggtcggcaactttgtccggcgctcccagcggcgctcggcttcctcctgtagtagttgagcgcaggccccgcctcccggccgtgttgtcaaaagggccggggtctcggattggtccagccgccgggacaacacctgctcgactccttcattcaagtgacaccagagcttccagggatatttgaggcaccatccctgccattgccgggcactcgcggcgctgctaacggcctggtcacatgctctccggagagctacgggagggcgctgggtaacctctatccgagccgcggccgcgaggaggagggaaaaggcgagcaaaaaggaagagtgggaggaggaggggaagcggcgaaggaggaagaggaggaggaggaagaggggagcacaaaggatccaggtctcccgacgggaggttaataccaagaaccatgtgtgccgagcggctgggccagttcatgaccctggctttggtgttggccacctttgacccggcgcgggggaccgacgccaccaacccacccgagggtccccaagacaggagctcccagcagaaaggccgcctgtccctgcagaatacagcggagatccagcactgtttggtcaacgctggcgatgtggggtgtggcgtgtttgaatgtttcgagaacaactcttgtgagattcggggcttacatgggatttgcatgacttttctgcacaacgctggaaaatttgatgcccagggcaagtcattcatcaaagacgccttgaaatgtaaggcccacgctctgcggcacaggttcggctgcataagccggaagtgcccggccatcagggaaatggtgtcccagttgcagcgggaatgctacctcaagcacgacctgtgcgcggctgcccaggagaacacccgggtgatagtggagatgatccatttcaaggacttgctgctgcacgaaccctacgtggacctcgtgaacttgctgctgacctgtggggaggaggtgaaggaggccatcacccacagcgtgcaggttcagtgtgagcagaactggggaagcctgtgctccatcttgagcttctgcacctcggccatccagaagcctcccacggcgccccccgagcgccagccccaggtggacagaaccaagctctccagggcccaccacggggaagcaggacatcacctcccagagcccagcagtagggagactggccgaggtgccaagggtgagcgaggtagcaagagccacccaaacgcccatgcccgaggcagagtcgggggccttggggctcagggaccttccggaagcagcgagtgggaagacgaacagtctgagtattctgatatccggaggtgaaatgaaaggcctggccacgaaatctttcctccacgccgtccattttcttatctatggacattccaaaacatttaccattagagaggggggatgtcacacgcaggattctgtggggactgtggacttcatcgaggtgtgtgttcgcggaacggacaggtgagatggagacccctggggccgtggggtctcaggggtgcctggtgaattctgcacttacacgtactcaagggagcgcgcccgcgttatcctcgtacctttgtcttctttccatctgtggagtcagtgggtgtcggccgctctgttgtgggggaggtgaaccagggaggggcagggcaaggcagggcccccagagctgggccacacagtgggtgctgggcctcgccccgaagcttctggtgcagcagcctctggtgctgtctccgcggaagtcagggcggctggattccaggacaggagtgaatgtaaaaataaatatcgcttagaatgcaggagaagggtggagaggaggcaggggccgagggggtgcttggtgccaaactgaaattcagtttcttgtgtggggccttgcggttcagagctcttggcgagggtggagggaggagtgtcatttctatgtgtaatttctgagccattgtactgtctgggctgggggggacactgtccaagggagtggcccctatgagtttatattttaaccactgcttcaaatctcgatttcactttttttatttatccagttatatctacatatctgtcatctaaataaatggctttcaaacaaagcaactgggtcattaaaaccagctcaaagggggtttaaaaaaaaaaaaccagcccatcctttgaggctgatttttcttttttttaagttctattttaaaagctatcaaacagcgacatagccatacatctgactgcctgacatggactcctgcccacttgggggaaaccttatacccagaggaaaatacacacctggggagtacatttgacaaatttcccttaggatttcgttatctcaccttgaccctcagccaagattggtaaagctgcgtcctggcgattccaggagacccagctggaaacctggcttctccatgtgaggggatgggaaaggaaagaagagaatgaagactacttagtaattcccatcaggaaatgctgaccttttacataaaatcaaggagactgctgaaaatctctaagggacaggattttccagatcctaattggaaatttagcaataaggagaggagtccaaggggacaaataaaggcagagagaagagacagaactaaaaatacgaggaaaggagagtgaggattttcattaaaagtctcagcagtgggtttcttgggttatttaaaacatcacctaaataggccttttcttcctaattggccatcaaattaaagcctatcctttctcaagcaggagctggtattgtagggagtggccgggtattctgggctgggctcttctggagtagggggtcagcaaacattgtctgcaaagggccagatactgaatccagtactttcagtttggcgagccgtgaggtctctgtcgaaactactcaactctgccgtcctagcacaaaagcagccatagacaacacacaaacgagagggcttggctcccttccaggaagatttatttaacaggctcccagctgaatttcactcacaggacacagtttactgatctctgttctagtgagtgggtcaaaaagcatatgcatccttatccgtcaactcatcagctcttcctcaaggcaacctgaggccagacaccaagaaaccaagcgtatctgctctaaaatgacttgttcctggggaatgccttcaaccaaaacacagctagtatttctatgccccaaatccaatcccagtctttcatgatccatgccggcggttgggtggggaggggaatcattggttgggggaagggaggaaaccccacctccagcccccgccaccgggctccctgggcacccagcaagatctggggctgcagagaacagaagagctggtgcacttaatccagctctgcccttggggggaggaggacctgtgtgtcaggctctgccatgggaacgagtgtaaaccgtggctgtctcctgcagtgagccaccgcggcaggcacgttgactgttttactgacatcactcaaaagctaaagcaataacattctcctgcgttgctgagtcagctgttcatttgtccgccagctcctggactggatgtgtgaaaggcatcacatttccattttcctccgtgtaaatgttttatgtgttcgcctactgatcccattcgttgcttctattgtaaatatttgtcatttgtatttattatctctgtgttttccccctaaggcataaaatggtttactgtgttcatttgaacccatttactgatctctgttgtatatttttcatgccactgctttgttttctcctcagaagtcgggtagatagcatttctatcccatccctcacgttattggaagcatgcaacagtatttattgctcagggtcttctgcttaaaactgaggaaggtccacattcctgcaagcattgattgagacatttgcacaatctaaaatgtaagcaaagtagtcattaaaaatacaccctctacttgggctttatactgcatacaaatttactcatgagccttcctttgaggaaggatgtggatctccaaataaagatttagtgtttattttgagctctgcatcttaacaagatgatctgaacacctctcctttgtatcaataaatagccctgttattctgaagtgagaggaccaagtatagtaaaatgctgacatctaaaactaaataaatagaaaacaccaggccagaactatagtcatactcacacaaagggagaaatttaaactcgaaccaagcaaaaggcttcacggaaatagcatggaaaaacaatgcttccagtggccacttcctaaggaggaacaaccccgtctgatctcagaattggcaccacgtgagcttgctaagtgataatatctgtttctactacggatttaggcaacaggacctgtacattgtcacattgcattatttttcttcaagcgttaataaaagttttaaataaatggcttccacttga

SEQ ID NO: 140285 - DNA, 909 bp, Artificial Sequence
  derived and/or modified sequence
atgtgcgccgagagactgggccagttcatgaccctggccctggtgctggccaccttcgaccccgccagaggcaccgacgccaccaacccccccgagggcccccaggacagaagcagccagcagaagggcagactgagcctgcagaacaccgccgagatccagcactgcctggtgaacgccggcgacgtgggctgcggcgtgttcgagtgcttcgagaacaacagctgcgagatcagaggcctgcacggcatctgcatgaccttcctgcacaacgccggcaagttcgacgcccagggcaagagcttcatcaaggacgccctgaagtgcaaggcccacgccctgagacacagattcggctgcatcagcagaaagtgccccgccatcagagagatggtgagccagctgcagagagagtgctacctgaagcacgacctgtgcgccgccgcccaggagaacaccagagtgatcgtggagatgatccacttcaaggacctgctgctgcacgagccctacgtggacctggtgaacctgctgctgacctgcggcgaggaggtgaaggaggccatcacccacagcgtgcaggtgcagtgcgagcagaactggggcagcctgtgcagcatcctgagcttctgcaccagcgccatccagaagccccccaccgccccccccgagagacagccccaggtggacagaaccaagctgagcagagcccaccacggcgaggccggccaccacctgcccgagcccagcagcagagagaccggcagaggcgccaagggcgagagaggcagcaagagccaccccaacgcccacgccagaggcagagtgggcggcctgggcgcccagggccccagcggcagcagcgagtgggaggacgagcagagcgagtacagcgacatcagaagatag

SEQ ID NO: 140286 - DNA, 909 bp, Artificial Sequence
  derived and/or modified sequence
atgtgcgcagaacgcctcgggcagttcatgactctggcactcgtgctcgcaaccttcgacccagcaaggggaaccgatgcaactaatccccccgagggcccgcaggataggagcagccagcagaaaggcagattgtccttgcaaaatacagcagagatccagcattgcctggtgaatgctggagacgtcggatgtggcgtgtttgaatgtttcgagaataacagctgtgagattcgcggtttacacggaatctgtatgacttttctgcacaacgccggcaaatttgacgctcagggcaagtccttcattaaagatgctttgaaatgcaaagcccatgccctgcggcaccgcttcggctgcatttcacgaaagtgtcccgctatccgggagatggtgagtcagctccagagggagtgttacctgaaacatgacctgtgcgcagccgcccaggagaacacccgggtgattgttgaaatgattcattttaaggacttattgcttcatgaaccctatgtagacctggttaacctgctcttaacctgcggagaagaggtgaaggaggcaatcacccacagcgtgcaagtccagtgcgaacagaactgggggagtctgtgctcgatactgtctttctgtacatccgccattcagaagcctccaacggcgcccccggaacggcaacctcaagtcgaccggactaaactcagtagggcacatcacggggaggccgggcaccaccttcccgaaccatcttcaagggagaccggacgtggcgcaaaaggcgagcgaggttccaagagtcacccaaatgctcacgcgcgcggccgcgttgggggtttgggcgcacagggtccctccggaagtagtgagtgggaagatgagcagtccgaatactctgatattcgcagatag

SEQ ID NO: 140287 - DNA, 909 bp, Artificial Sequence
  derived and/or modified sequence
atgtgtgccgagcggctgggccagttcatgaccctggccctggtgctggccacctttgatcctgcccggggcacagatgccaccaaccccccagagggcccccaggacaggagcagccagcagaagggccgcctgagcctgcagaacacagctgagatccagcactgcctggtgaatgctggagatgtgggctgtggggtgtttgaatgttttgagaacaacagctgtgagatccggggcctgcacggcatctgcatgaccttcctgcacaatgctgggaagtttgatgcccagggcaagagcttcatcaaggatgccctgaagtgcaaggcccacgccctgcggcaccgcttcggctgcatcagcaggaagtgcccagccatccgggagatggtgtcccagctgcagcgggagtgctacctgaagcatgacctgtgtgccgccgcccaggagaacaccagggtcatcgtggagatgatccacttcaaggacctgctgctgcacgagccctacgtggacctggtgaacctgctgctgacctgtggggaggaggtgaaggaggccatcacccacagcgtgcaggtgcagtgtgagcagaactggggcagcctgtgcagcatcctgtccttctgcaccagcgccatccagaagccacccacagcccctcctgagcggcagccccaggtggacaggaccaagctgagccgggcccaccacggggaggccggccaccacctgcctgagcccagcagccgggagaccggccgcggggccaagggggagcggggcagcaagagccaccccaatgcccacgcccggggccgggtgggcggcctgggcgcccagggccccagcggcagcagcgagtgggaggatgagcagagcgagtacagcgacatcagaagatag

SEQ ID NO: 140288 - DNA, 909 bp, Artificial Sequence
  derived and/or modified sequence
atgtgcgccgagcggctgggccagttcatgaccctggccctggtgttagctacattcgacccggctcgaggtactgatgctactaacccgcccgagggccctcaagataggagcagccaacagaagggccgcttatctctgcagaacaccgccgagatccaacactgtctggtaaacgcgggagacgtcggctgcggcgtattcgaatgctttgagaacaactcatgtgagattaggggcctccatggtatctgcatgacttttcttcataatgccggtaaatttgacgcacaaggcaaatcattcattaaagacgctctgaagtgtaaagcacatgccctgagacacaggttcggatgtatttctcgcaagtgccctgccattagagaaatggtgtctcaacttcagcgggaatgctatttgaagcatgatctctgtgctgctgcgcaggagaacacccgtgtgatagtggagatgattcatttcaaggaccttttgctgcacgaaccgtacgttgatctggtgaatctgctgctgacctgtggggaagaagtcaaggaggccatcactcatagcgtgcaggtacaatgcgaacagaattggggatctctgtgttccattctctcattttgtacgagcgctatacagaaacctcctactgcacctcccgagcggcaaccacaagttgaccggacaaaactgtctagggcccatcacggagaggccgggcaccatctgcctgagccctcttcccgcgagaccggccggggggcgaaaggtgaacgaggatcaaagagtcaccctaacgcacacgccagagggcgggtgggcggactgggtgcacagggcccgtctggttctagtgagtgggaggacgaacaatctgagtacagcgacattcggcggtag

SEQ ID NO: 140289 - RNA, 909 nt, Artificial Sequence
  derived and/or modified sequence
augugcgcggaaagacuggggcaguucaugacgcuggcuuugguccuagcuacuuuugauccagcccgggggacagaugcuaccaacccccccgaagggccccaggaucggagcagccagcagaaaggccgccuaucauuacaaaacacagccgagauccagcacugccuuguaaaugcaggcgacguagggugcggaguauuugagugcuuugaaaacaauuccugcgagauucggggccuccauggaauuuguaugaccuuccugcauaacgccgguaaguucgaugcacagggcaaaagcuuuaucaaggacgcgcugaagugcaaagcgcacgcacuucgccaccgauucgggugcaucuccagaaaauguccugcgauccgagaaauggugucucagcugcaaagggaaugcuaucugaaacaugaucuaugugccgccgcccaggaaaauacacgcgugauaguggagaugauucacuuuaaggaccugcugcuccacgagcccuauguugaucuggugaaccugcuguugaccugcggugaggaagugaaggaagccauuacucauucaguacaaguacagugcgagcagaauuggggaucccuaugcuccauucuuuccuucuguacuucugcuauccaaaaaccgccaaccgccccacccgagcggcagccccagguggaucggacaaaauugagcagagcacaccauggagaggccggacaccaccugccagagccaucaucucgagaaacuggaaggggagccaaaggcgagcgcgggagcaagucucacccaaacgcacacgccagaggccgagucggggggcuaggugcccagggcccuagugggucuagugaaugggaggaugagcagucagaauacagcgauauccgccgguag

SEQ ID NO: 140290 - RNA, 909 nt, Artificial Sequence
  derived and/or modified sequence
augugugccgagcgccucggacaauucaugacacuggcuuuaguucuugccaccuucgacccugcccggggaacggacgcgacaaauccuccugaagggccacaggaucgaucuagucagcagaaagggcggcugagccugcaaaauaccgcagagauccagcacugcuuggugaacgcgggagauguggggugcggagucuuugaauguuucgaaaauaauucuugugagauacguggacugcauggcauuugcaugacauuucuacacaacgccggcaaguucgaugcccagggaaaauccuucauaaaagacgcccugaaaugcaaagcccacgccuugaggcaucgcuuuggcugcaucuccagaaagugccccgccauccgagaaaugguaagccaauuacagagagaguguuaccucaagcacgaucucugcgcagccgcccaggaaaauacuagagucauuguugaaaugauccacuucaaagaccuacuucuucaugagcccuacgucgacuuggugaaucuucuauuaaccugcggagaagaagucaaagaggccaucacccacucaguucagguucagugugaacagaacuggggcucuuugugcuccaucuuaucauucugcacguccgcgauucagaaacccccuaccgcacccccagaacgacaaccacagguugacaggacuaagcuaucgcgcgcgcaccauggagaagccggccaucaccuaccagagccaaguucucgcgaaaccggucgaggagcaaagggagagcgcgggucuaaaagucauccuaaugcccacgcuagaggccggguuggggggcugggggcccaaggaccuaguggcaguucugagugggaagacgagcagucagaauacagcgauauaaggcgauag

SEQ ID NO: 140291 - protein, 890 aa, Artificial Sequence
  derived and/or modified sequence
SSDSEIIGYALDTLYNIISNEEEEEVEENSTRQSEDLGSQFTEIFIKQQENVTLLLSLLEEFDFHVRWPGVKLLTSLLKQLGPQVQQIILVSPMGVSRLMDLLADSREVIRNDGVLLLQALTRSNGAIQKIVAFENAFERLLDIISEEGNSDGGIVVEDCLILLQNLLKNNNSNQNFFKEGSYIQRMKPWFEVGDENSGWSAQKVTNLHLMLQLVRVLVSPTNPPGATSSCQKAMFQCGLLQQLCTILMATGVPADILTETINTVSEVIRGCQVNQDYFASVNAPSNPPRPAIVVLLMSMVNERQPFVLRCAVLYCFQCFLYKNQKGQGEIVSTLLPSTIDATGNSVSAGQLLCGGLFSTDSLSNWCAAVALAHALQENATQKEQLLRVQLATSIGNPPVSLLQQCTNILSQGSKIQTRVGLLMLLCTWLSNCPIAVTHFLHNSANVPFLTGQIAENLGEEEQLVQGLCALLLGISIYFNDNSLESYMKEKLKQLIEKRIGKENFIEKLGFISKHELYSRASQKPQPNFPSPEYMIFDHEFTKLVKELEGVITKAIYKSSEEDKKEEEVKKTLEQHDNIVTHYKNMIREQDLQLEELRQQVSTLKCQNEQLQTAVTQQVSQIQQHKDQYNLLKIQLGKDNQHQGSYSEGAQMNGIQPEEIGRLREEIEELKRNQELLQSQLTEKDSMIENMKSSQTSGTNEQSSAIVSARDSEQVAELKQELATLKSQLNSQSVEITKLQTEKQELLQKTEAFAKSVEVQGETETIIATKTTDVEGRLSALLQETKELKNEIKALSEERTAIKEQLDSSNSTIAILQTEKDKLELEITDSKKEQDDLLVLLADQDQKILSLKNKLKDLGHPVEEEDELESGDQEDEDDESEDPGKDLDHI

SEQ ID NO: 140292 - protein, 947 aa, Artificial Sequence
  derived and/or modified sequence
MNFLRGVMGGQSAGPQHTEAETVRGAADPKVTSSCGLKFRHSFRLVKHILYHVTINVYSDSEIIGYALDTLYNIISNEEEEEVEENSTRQSEDLGSQFTEIFIKQQENVTLLLSLLEEFDFHVRWPGVKLLTSLLKQLGPQVQQIILVSPMGVSRLMDLLADSREVIRNDGVLLLQALTRSNGAIQKIVAFENAFERLLDIISEEGNSDGGIVVEDCLILLQNLLKNNNSNQNFFKEGSYIQRMKPWFEVGDENSGWSAQKVTNLHLMLQLVRVLVSPTNPPGATSSCQKAMFQCGLLQQLCTILMATGVPADILTETINTVSEVIRGCQVNQDYFASVNAPSNPPRPAIVVLLMSMVNERQPFVLRCAVLYCFQCFLYKNQKGQGEIVSTLLPSTIDATGNSVSAGQLLCGGLFSTDSLSNWCAAVALAHALQENATQKEQLLRVQLATSIGNPPVSLLQQCTNILSQGSKIQTRVGLLMLLCTWLSNCPIAVTHFLHNSANVPFLTGQIAENLGEEEQLVQGLCALLLGISIYFNDNSLESYMKEKLKQLIEKRIGKENFIEKLGFISKHELYSRASQKPQPNFPSPEYMIFDHEFTKLVKELEGVITKAIYKSSEEDKKEEEVKKTLEQHDNIVTHYKNMIREQDLQLEELRQQVSTLKCQNEQLQTAVTQQVSQIQQHKDQYNLLKIQLGKDNQHQGSYSEGAQMNGIQPEEIGRLREEIEELKRNQELLQSQLTEKDSMIENMKSSQTSGTNEQSSAIVSARDSEQVAELKQELATLKSQLNSQSVEITKLQTEKQELLQKTEAFAKSVEVQGETETIIATKTTDVEGRLSALLQETKELKNEIKALSEERTAIKEQLDSSNSTIAILQTEKDKLELEITDSKKEQDDLLVLLADQDQKILSLKNKLKDLGHPVEEEDELESGDQEDEDDESEDPGKDLDHI

SEQ ID NO: 140293 - DNA, 2394 bp, Artificial Sequence
  derived and/or modified sequence
atgggcgtgagcagactgatggacctgctggccgacagcagagaggtgatcagaaacgacggcgtgctgctgctgcaggccctgaccagaagcaacggcgccatccagaagatcgtggccttcgagaacgccttcgagagactgctggacatcatcagcgaggagggcaacagcgacggcggcatcgtggtggaggactgcctgatcctgctgcagaacctgctgaagaacaacaacagcaaccagaacttcttcaaggagggcagctacatccagagaatgaagccctggttcgaggtgggcgacgagaacagcggctggagcgcccagaaggtgaccaacctgcacctgatgctgcagctggtgagagtgctggtgagccccaccaacccccccggcgccaccagcagctgccagaaggccatgttccagtgcggcctgctgcagcagctgtgcaccatcctgatggccaccggcgtgcccgccgacatcctgaccgagaccatcaacaccgtgagcgaggtgatcagaggctgccaggtgaaccaggactacttcgccagcgtgaacgcccccagcaacccccccagacccgccatcgtggtgctgctgatgagcatggtgaacgagagacagcccttcgtgctgagatgcgccgtgctgtactgcttccagtgcttcctgtacaagaaccagaagggccagggcgagatcgtgagcaccctgctgcccagcaccatcgacgccaccggcaacagcgtgagcgccggccagctgctgtgcggcggcctgttcagcaccgacagcctgagcaactggtgcgccgccgtggccctggcccacgccctgcaggagaacgccacccagaaggagcagctgctgagagtgcagctggccaccagcatcggcaacccccccgtgagcctgctgcagcagtgcaccaacatcctgagccagggcagcaagatccagaccagagtgggcctgctgatgctgctgtgcacctggctgagcaactgccccatcgccgtgacccacttcctgcacaacagcgccaacgtgcccttcctgaccggccagatcgccgagaacctgggcgaggaggagcagctggtgcagggcctgtgcgccctgctgctgggcatcagcatctacttcaacgacaacagcctggagagctacatgaaggagaagctgaagcagctgatcgagaagagaatcggcaaggagaacttcatcgagaagctgggcttcatcagcaagcacgagctgtacagcagagccagccagaagccccagcccaacttccccagccccgagtacatgatcttcgaccacgagttcaccaagctggtgaaggagctggagggcgtgatcaccaaggccatctacaagagcagcgaggaggacaagaaggaggaggaggtgaagaagaccctggagcagcacgacaacatcgtgacccactacaagaacatgatcagagagcaggacctgcagctggaggagctgagacagcaggtgagcaccctgaagtgccagaacgagcagctgcagaccgccgtgacccagcaggtgagccagatccagcagcacaaggaccagtacaacctgctgaagatccagctgggcaaggacaaccagcaccagggcagctacagcgagggcgcccagatgaacggcatccagcccgaggagatcggcagactgagagaggagatcgaggagctgaagagaaaccaggagctgctgcagagccagctgaccgagaaggacagcatgatcgagaacatgaagagcagccagaccagcggcaccaacgagcagagcagcgccatcgtgagcgccagagacagcgagcaggtggccgagctgaagcaggagctggccaccctgaagagccagctgaacagccagagcgtggagatcaccaagctgcagaccgagaagcaggagctgctgcagaagaccgaggccttcgccaagagcgtggaggtgcagggcgagaccgagaccatcatcgccaccaagaccaccgacgtggagggcagactgagcgccctgctgcaggagaccaaggagctgaagaacgagatcaaggccctgagcgaggagagaaccgccatcaaggagcagctggacagcagcaacagcaccatcgccatcctgcagaccgagaaggacaagctggagctggagatcaccgacagcaagaaggagcaggacgacctgctggtgctgctggccgaccaggaccagaagatcctgagcctgaagaacaagctgaaggacctgggccaccccgtggaggaggaggacgagctggagagcggcgaccaggaggacgaggacgacgagagcgaggaccccggcaaggacctggaccacatctag

SEQ ID NO: 140294 - DNA, 2844 bp, Artificial Sequence
  derived and/or modified sequence
atgaacttcctgagaggcgtgatgggcggccagagcgccggcccccagcacaccgaggccgagaccgtgagaggcgccgccgaccccaaggtgaccagcagctgcggcctgaagttcagacacagcttcagactggtgaagcacatcctgtaccacgtgaccatcaacgtgtacagcgacagcgagatcatcggctacgccctggacaccctgtacaacatcatcagcaacgaggaggaggaggaggtggaggagaacagcaccagacagagcgaggacctgggcagccagttcaccgagatcttcatcaagcagcaggagaacgtgaccctgctgctgagcctgctggaggagttcgacttccacgtgagatggcccggcgtgaagctgctgaccagcctgctgaagcagctgggcccccaggtgcagcagatcatcctggtgagccccatgggcgtgagcagactgatggacctgctggccgacagcagagaggtgatcagaaacgacggcgtgctgctgctgcaggccctgaccagaagcaacggcgccatccagaagatcgtggccttcgagaacgccttcgagagactgctggacatcatcagcgaggagggcaacagcgacggcggcatcgtggtggaggactgcctgatcctgctgcagaacctgctgaagaacaacaacagcaaccagaacttcttcaaggagggcagctacatccagagaatgaagccctggttcgaggtgggcgacgagaacagcggctggagcgcccagaaggtgaccaacctgcacctgatgctgcagctggtgagagtgctggtgagccccaccaacccccccggcgccaccagcagctgccagaaggccatgttccagtgcggcctgctgcagcagctgtgcaccatcctgatggccaccggcgtgcccgccgacatcctgaccgagaccatcaacaccgtgagcgaggtgatcagaggctgccaggtgaaccaggactacttcgccagcgtgaacgcccccagcaacccccccagacccgccatcgtggtgctgctgatgagcatggtgaacgagagacagcccttcgtgctgagatgcgccgtgctgtactgcttccagtgcttcctgtacaagaaccagaagggccagggcgagatcgtgagcaccctgctgcccagcaccatcgacgccaccggcaacagcgtgagcgccggccagctgctgtgcggcggcctgttcagcaccgacagcctgagcaactggtgcgccgccgtggccctggcccacgccctgcaggagaacgccacccagaaggagcagctgctgagagtgcagctggccaccagcatcggcaacccccccgtgagcctgctgcagcagtgcaccaacatcctgagccagggcagcaagatccagaccagagtgggcctgctgatgctgctgtgcacctggctgagcaactgccccatcgccgtgacccacttcctgcacaacagcgccaacgtgcccttcctgaccggccagatcgccgagaacctgggcgaggaggagcagctggtgcagggcctgtgcgccctgctgctgggcatcagcatctacttcaacgacaacagcctggagagctacatgaaggagaagctgaagcagctgatcgagaagagaatcggcaaggagaacttcatcgagaagctgggcttcatcagcaagcacgagctgtacagcagagccagccagaagccccagcccaacttccccagccccgagtacatgatcttcgaccacgagttcaccaagctggtgaaggagctggagggcgtgatcaccaaggccatctacaagagcagcgaggaggacaagaaggaggaggaggtgaagaagaccctggagcagcacgacaacatcgtgacccactacaagaacatgatcagagagcaggacctgcagctggaggagctgagacagcaggtgagcaccctgaagtgccagaacgagcagctgcagaccgccgtgacccagcaggtgagccagatccagcagcacaaggaccagtacaacctgctgaagatccagctgggcaaggacaaccagcaccagggcagctacagcgagggcgcccagatgaacggcatccagcccgaggagatcggcagactgagagaggagatcgaggagctgaagagaaaccaggagctgctgcagagccagctgaccgagaaggacagcatgatcgagaacatgaagagcagccagaccagcggcaccaacgagcagagcagcgccatcgtgagcgccagagacagcgagcaggtggccgagctgaagcaggagctggccaccctgaagagccagctgaacagccagagcgtggagatcaccaagctgcagaccgagaagcaggagctgctgcagaagaccgaggccttcgccaagagcgtggaggtgcagggcgagaccgagaccatcatcgccaccaagaccaccgacgtggagggcagactgagcgccctgctgcaggagaccaaggagctgaagaacgagatcaaggccctgagcgaggagagaaccgccatcaaggagcagctggacagcagcaacagcaccatcgccatcctgcagaccgagaaggacaagctggagctggagatcaccgacagcaagaaggagcaggacgacctgctggtgctgctggccgaccaggaccagaagatcctgagcctgaagaacaagctgaaggacctgggccaccccgtggaggaggaggacgagctggagagcggcgaccaggaggacgaggacgacgagagcgaggaccccggcaaggacctggaccacatctag

SEQ ID NO: 140295 - DNA, 2673 bp, Artificial Sequence
  derived and/or modified sequence
tcatcggactcagaaatcattggctacgctttggacacactttacaacattatttcaaacgaagaagaggaggaggtggaagagaactccacgcgacagagtgaggatctgggatcgcagttcactgagatctttattaaacagcaggagaacgtgacattgctcttgagtctgctggaggagttcgacttccatgtgaggtggcctggtgtaaaattgctaacttccttactgaaacagcttggcccacaggtccagcaaattatcctcgtcagtccaatgggggtatcaagactgatggatttgcttgccgatagcagagaggtgatcagaaacgacggagtactgcttcttcaggctctcaccagatctaacggggcaatccagaagatcgtggcgttcgaaaatgctttcgaacgcttgctcgacataatctctgaggagggaaattcggacggcgggattgtagtagaggattgcctgattctgcttcaaaatctgctgaaaaacaataactcaaatcagaattttttcaaggaaggtagctatatacaacgtatgaaaccatggttcgaagttggggacgaaaattcaggttggtccgcacaaaaggttaccaatctccatctcatgctgcagctcgttcgcgtgctggtatcacccacaaatccacccggtgcaacctcttcatgccagaaggccatgttccagtgcggcctcctccagcaactctgcacaatactgatggccacaggagttcctgccgacatcttaacagaaactattaatacagtgagcgaggtgattcgcggatgtcaagtgaatcaggactattttgcctcagttaatgcaccctccaacccaccaaggccagcaatcgtagtcctacttatgtcaatggtgaacgagcggcagcccttcgttctgcgctgtgctgtactgtactgtttccagtgcttcctctataaaaaccagaaaggccagggcgagattgtcagcacactgcttccgtccactattgatgcaaccgggaatagcgtcagcgctgggcaactgttgtgcgggggcctcttttccaccgattccttaagtaactggtgcgccgctgtggcactggcccatgcattgcaagaaaatgccacccagaaggaacagctgcttagagtgcaactggcaaccagtattggcaacccacctgtatccttgctgcaacagtgcacaaacattctctcacagggcagcaagatccagacacgggtgggcctgctgatgctgctgtgcacctggctgagcaactgcccgatcgctgttacccacttcctccataattctgctaacgtcccgttccttacaggacagatcgcggagaatcttggagaggaggaacagctcgtccaaggactgtgcgctcttctgctgggtatctctatctatttcaacgataattccctggagtcgtacatgaaggagaaactgaagcaactgattgaaaaaaggattgggaaggagaatttcattgaaaagcttggatttatttccaaacatgaactttactccagagcctctcagaaaccgcaaccgaattttccaagccccgagtacatgatctttgatcatgagttcaccaaactcgtcaaggagctggagggcgtgatcaccaaggcaatttacaagtccagtgaggaagataagaaggaagaggaggtaaagaagacccttgagcagcacgacaatatcgtcacacattacaagaatatgatacgcgaacaggatctgcagctggaggagttgagacagcaggtgagcactttgaagtgtcagaacgagcagcttcagaccgctgtcacccagcaagtcagtcagatccagcagcacaaagatcagtacaacctgctcaagattcagctcgggaaagataatcagcatcagggctcctacagcgaaggcgcacaaatgaatgggatacagccagaagagatcggacgactccgtgaggagatagaagaactgaagcgcaatcaagaactgctgcaatcacaactgactgagaaggattctatgatcgagaacatgaaaagtagtcaaaccagcgggacaaatgagcagtccagtgcgatagtcagtgcacgcgattccgagcaggtggccgagttaaaacaggaactggcaacgttaaagagtcaactcaactcacagtcagtggagatcacaaaattacagaccgagaagcaggagctgttgcagaaaacagaggccttcgccaaaagcgtcgaagtccagggggagacagagacgatcatcgctactaaaacaactgacgtcgaaggccgactcagtgcactgctgcaggagacaaaggagctgaagaatgagatcaaagcgctatccgaagagcggaccgccattaaagagcagttggactccagcaacagtaccatagcgatcttgcagacagagaaggataagttggagctcgagattactgactccaagaaagagcaggatgatctcttggtgctcctggcagaccaggatcagaaaattctttctctaaagaataaactcaaagatctggggcaccccgtggaggaggaagacgagctggagagcggtgatcaggaggacgaagacgacgaatcagaggacccaggcaaagatttggaccatatttag

SEQ ID NO: 140296 - DNA, 2394 bp, Artificial Sequence
  derived and/or modified sequence
atgggggtgtccagactcatggatctccttgccgactccagagaagtcatccgcaatgacggcgtgcttctcctacaggccttaacacggagtaacggggcaattcagaagattgtcgctttcgagaatgctttcgaacggctcttggacattattagcgaggagggaaatagcgacggaggcattgttgttgaggattgtttaatcttgcttcaaaatctgttgaagaataataatagtaaccagaactttttcaaagaaggaagttatatccagagaatgaagccctggttcgaggtgggcgacgaaaatagcgggtggtcagcccagaaagtcaccaacctgcaccttatgctccaacttgtgcgggttttggtgagtccaaccaatccgcccggagctacatcaagttgccagaaggcaatgtttcaatgcggccttctccagcagctttgcacaatactgatggccacaggggtcccagctgatatactcacggagactataaacacagtgtctgaggtgatcaggggatgccaggtgaatcaggattactttgctagtgtgaatgctcctagcaacccaccgaggccagctatcgtggtactactgatgtctatggtgaacgagcgccaacctttcgtcctgaggtgtgccgtgctgtattgcttccagtgcttcctgtacaagaaccagaaaggccagggtgaaattgtcagtaccttgcttccatccacaattgacgccacaggaaattcagtctccgcaggacagctgctgtgcgggggccttttctccaccgatagcctctcgaattggtgtgcagccgtggctcttgctcatgccctacaggagaacgcaacccagaaagaacagcttctaagggtacagttggccacttcaatcggaaatccaccggtgagtctgttacagcaatgcacgaatattttaagccagggcagcaagatccaaactcgggtggggctgctgatgttgctgtgcacttggcttagtaattgccccattgccgtcacacacttcctgcataacagcgctaacgttcccttcctgacaggtcagatcgctgaaaatctcggagaagaagaacagctagtgcagggactttgcgctttactgctgggaattagcatttactttaatgataattctctggagagctacatgaaggaaaagctgaaacagctgattgagaagcggattggaaaagagaatttcatcgagaaattgggttttatttctaaacacgaactgtacagcagagccagccaaaagccacagcccaattttccgtccccagagtatatgatcttcgatcatgagtttaccaaattggtgaaggaactagagggggtcatcactaaggctatttacaagtctagtgaagaagacaagaaggaagaggaggtgaagaagacactggagcagcacgacaatattgtgacacactacaaaaacatgatcagggaacaggacctgcaactggaagaacttcgccaacaggtgagcaccctgaaatgtcagaacgagcagttgcagaccgccgtgactcagcaagtgtctcaaatccagcagcacaaagatcagtacaacttattgaaaattcagttgggcaaagacaatcagcaccaaggaagctactcagaaggcgctcaaatgaacgggatacagcccgaggagatcggccgattaagggaagagattgaagaactaaagcgaaaccaggaacttcttcagtctcaactcaccgaaaaggactccatgatagagaacatgaaaagctcccagacctcaggcactaacgagcagagctcagccatcgtgagtgcgcgtgattcagagcaggtagcagagctgaagcaggagctggcaacactgaaatcccagctgaatagtcagagtgtggaaataaccaagcttcagacggaaaagcaggaactgctccagaagaccgaggctttcgcaaagtcagtcgaagttcagggtgagaccgagactatcatcgcaactaaaactactgacgtggaaggacgcttgtcagctctgctccaggagaccaaggagctcaaaaatgagatcaaggcgctgtccgaagaacgaacagcaattaaggaacagctggactcttccaactcaaccattgccattctgcagacagaaaaagataagctggagctggagataaccgacagcaagaaggaacaggatgacctgttggtactgctcgccgaccaagaccagaagattctgagtttgaagaataagctgaaagacctcggacacccggtggaagaagaagacgaactcgagtccggggatcaggaggacgaggacgatgagtcggaggaccccgggaaagacctggatcatatctag

SEQ ID NO: 140297 - DNA, 2844 bp, Artificial Sequence
  derived and/or modified sequence
atgaacttcctgaggggggtcatgggtggacagagcgccggtcctcagcacaccgaggctgagacggtgcgaggcgcagcagaccctaaagtaacctccagttgtggccttaagtttcggcacagcttccggctggtcaagcacattctctaccatgtaactatcaacgtgtacagtgattctgagattatcggctacgccctggacacactctacaacattatctcgaacgaagaggaagaagaggttgaggaaaactctacaagacagtcagaggacctcggaagtcagttcacagagattttcatcaagcagcaggaaaacgtcacgctgctactgtcgctcctggaggaattcgacttccatgttcgctggccgggtgtgaaactgctgacttccctgttgaaacaattgggaccgcaggttcaacaaataatccttgtgtcacccatgggggtgagtcggctaatggatcttctagctgattctagagaagttattaggaacgacggcgtattactcctgcaggcgctgactcgatctaatggggctatccagaagatcgtcgcatttgaaaatgcatttgaaaggctgctggacatcatcagtgaagagggtaacagtgatggagggatcgtggtggaggactgtcttattttgctgcagaaccttctcaaaaataacaactctaatcagaacttttttaaggaggggagttatatccagcggatgaagccatggttcgaagttggggacgaaaactccggctggagcgcccaaaaagtaactaatcttcatctgatgctccagctcgtgagggtgctcgtgagcccgaccaacccccccggggctacttccagctgtcagaaagctatgtttcaatgcgggctcttacaacagctttgtaccatcctgatggccactggagtcccggctgacatcctgaccgagactatcaacacagtgagtgaggtcatcagggggtgtcaggtgaatcaggactactttgcttctgtgaatgctcctagcaaccctcccagaccggcaatcgttgtgctcctgatgtcaatggtcaatgagaggcagccgtttgtgcttcgctgtgctgtgttgtattgcttccagtgcttcctctacaagaaccaaaaaggtcaaggagaaattgtttccactcttctcccttctactatagatgcgacaggcaacagcgtgtccgcggggcaactgctctgcggcgggctgttcagcaccgatagcttgtctaattggtgtgcggcagtggccctggcgcatgcattacaggagaacgcgactcagaaagagcagttgttgcgagtccaactggctacatctattggtaaccctcccgtgtccttactgcagcaatgtacgaatatcctgtcccaaggctcaaagatccagaccagagtcggcctactgatgctcttgtgcacgtggttgtcaaactgcccaatcgccgtcacccattttttgcacaactctgcaaatgtcccatttcttactggccagatagcagagaacctgggagaggaggaacagttggtgcagggcctgtgtgcactcctgttaggcatctctatctattttaacgacaactcattggaatcctacatgaaggagaagctgaagcagttaatagaaaagcgaatagggaaagagaatttcattgagaagctcggttttatttcaaaacatgaattgtactctcgggccagccagaagccacagccaaatttcccaagcccagaatacatgattttcgaccatgaattcaccaagctggttaaagaactggaaggggtgatcactaaggctatctacaaatcttccgaagaggataaaaaagaagaagaggtcaaaaaaactctggagcaacacgacaatattgtgacacattataagaacatgatcagggagcaggacttacagcttgaagagcttagacagcaagtctccacactcaagtgtcagaatgagcagctccagaccgcagtcacacagcaggtttcccagattcagcagcataaggaccagtacaacctgttgaagattcagttaggcaaagacaaccagcatcagggcagctactcggaaggagcccagatgaacgggatccaacctgaggaaattggtcgactgcgagaggagattgaggaattgaagcggaatcaggaactgctacaaagccagctgaccgagaaggattccatgatcgagaacatgaaatccagccagacctccggtacgaacgagcagagctcggccatcgtctccgcgcgggactctgagcaggttgccgaacttaaacaggaactggctactctgaaaagtcaactcaatagccagtctgttgagatcaccaagctgcaaacagaaaaacaggaactattgcaaaaaaccgaggcttttgcaaaatcagtggaggtccagggggagaccgagaccatcattgcaaccaagacgacagatgtcgaaggcaggctatcagcactcctccaagaaaccaaagaactgaagaatgagattaaggccctgtccgaagaaagaacagccataaaagagcagctagatagctcgaatagcacaattgcgattcttcagacggaaaaggacaaattggagctagaaatcacggattccaaaaaggaacaggacgacttgctggtgctcctggcagaccaggatcaaaaaattctcagtcttaaaaataagctcaaggacctaggtcatcccgtggaggaggaagatgaactcgagtcaggagatcaggaggacgaagacgatgagtccgaagacccgggaaaggatctcgatcatatttag

SEQ ID NO: 140298 - DNA, 2673 bp, Artificial Sequence
  derived and/or modified sequence
agcagtgacagcgagatcatcggctacgccctggacaccctgtacaacatcatcagcaatgaggaggaggaggaggtggaggagaacagcacccggcagagcgaggacctgggcagccagttcacagagatcttcatcaagcagcaggagaatgtgaccctgctgctgagcctgctggaggagtttgacttccacgtgcgctggccaggagtgaagctgctgaccagcctgctgaagcagctgggcccccaggtgcagcagatcatcctggtgagccccatgggcgtgtcccggctgatggacctgctggccgacagccgggaggtgatcagaaatgatggagtgctgctgctgcaggccctgaccaggagcaatggagccatccagaagatcgtggcctttgaaaatgcctttgagcggctgctggacatcatcagcgaggagggcaacagtgatggcggcatcgtggtggaggactgcctgatcctgctgcagaacctgctgaagaacaacaacagcaaccagaacttcttcaaggagggcagctacatccagaggatgaagccctggtttgaggtgggagatgagaacagcggctggagcgcccagaaggtgaccaacctgcacctgatgctgcagctggtgcgggtgctggtgagccccaccaaccccccaggggccaccagcagctgccagaaggccatgttccagtgtggcctgctgcagcagctgtgcaccatcctgatggccactggagtgcctgctgacatcctgacagagaccatcaacacagtgtctgaggtgatccggggctgccaggtgaaccaggactactttgcctctgtgaatgcccccagcaacccccccaggcctgccatcgtggtgctgctgatgtccatggtgaatgaaaggcagccctttgtgctgcgctgtgctgtgctgtactgcttccagtgcttcctgtacaagaaccagaagggccagggcgagatcgtgtccaccctgctgcccagcaccattgatgccactggaaacagcgtgtctgctggccagctgctgtgtggcggcctcttcagcacagacagcctgagcaactggtgtgccgctgtggccctggcccacgccctgcaggagaatgccacccagaaggagcagctgctgcgggtgcagctggccaccagcatcggcaacccccctgtgtccctgctgcagcagtgcaccaacatcctgagccagggcagcaagatccagaccagggtgggcctgctgatgctgctgtgcacctggctgagcaactgccccatcgctgtgacccacttcctgcacaacagcgccaacgtgcccttcctgaccggccagattgctgagaacctgggggaggaggagcagctggtgcagggcctgtgtgccctgctgctgggcatcagcatctacttcaatgacaacagcctggagagctacatgaaggagaagctgaagcagctgattgagaagagaattggcaaggagaacttcatcgagaagctgggcttcatcagcaagcatgagctgtacagccgggccagccagaagccccagcccaacttccccagccctgagtacatgatctttgaccacgagttcaccaagctggtgaaggagctggagggcgtcatcaccaaggccatctacaagagcagcgaggaggacaagaaggaggaggaggtgaagaagaccctggagcagcacgacaacatcgtgacccactacaagaacatgatccgggagcaggacctgcagctggaggagctgcggcagcaggtgtccaccctgaagtgccagaatgagcagctgcagacagctgtgacccagcaggtgtcccagatccagcagcacaaggaccagtacaacctgctgaagatccagctgggcaaggacaaccagcaccagggcagctacagcgagggcgcccagatgaatggcatccagcctgaggagatcggccgcctgcgggaggagattgaggagctgaagaggaaccaggagctgctgcagagccagctgacagagaaggacagcatgattgagaacatgaagagcagccagaccagcggcaccaatgagcagagcagcgccatcgtgtctgcccgggacagcgagcaggtggccgagctgaagcaggagctggccaccctgaagagccagctgaacagccagagcgtggagatcaccaagctgcagacagagaagcaggagctgctgcagaagacagaggcctttgccaagtctgtggaggtgcagggcgagacagagaccatcatcgccaccaagaccacagatgtggagggccgcctgagcgccctgctgcaggagaccaaggagctgaagaatgagatcaaggccctgtctgaggagaggacagccatcaaggagcagctggacagcagcaacagcaccatcgccatcctgcagacagagaaggacaagctggagctggagatcacagacagcaagaaggagcaggatgacctgctggtgctgctggccgaccaggaccagaagatcctgagcctgaagaacaagctgaaggacctgggccaccctgtggaggaggaggatgagctggagagcggggaccaggaggatgaagatgatgaaagtgaagatcctgggaaggacctggaccacatctag

SEQ ID NO: 140299 - DNA, 2394 bp, Artificial Sequence
  derived and/or modified sequence
atgggcgtgtcccggctgatggacctgctggccgacagccgggaggtgatcagaaatgatggagtgctgctgctgcaggccctgaccaggagcaatggagccatccagaagatcgtggcctttgaaaatgcctttgagcggctgctggacatcatcagcgaggagggcaacagtgatggcggcatcgtggtggaggactgcctgatcctgctgcagaacctgctgaagaacaacaacagcaaccagaacttcttcaaggagggcagctacatccagaggatgaagccctggtttgaggtgggagatgaaaattctggctggagcgcccagaaggtgaccaacctgcacctgatgctgcagctggtgcgggtgctggtgagccccaccaaccccccaggggccaccagcagctgccagaaggccatgttccagtgtggcctgctgcagcagctgtgcaccatcctgatggccaccggggtgcctgctgacatcctgacagagaccatcaacacagtgtctgaggtgatccggggctgccaggtgaaccaggactactttgcctctgtgaatgcccccagcaacccccccaggcctgccatcgtggtgctgctgatgtccatggtgaatgaaaggcagccctttgtgctgcgctgtgctgtgctgtactgcttccagtgcttcctgtacaagaaccagaagggccagggcgagatcgtgtccaccctgctgcccagcaccattgatgccaccggcaacagcgtgtctgctggccagctgctgtgtggcggcctcttcagcacagacagcctgagcaactggtgtgccgctgtggccctggcccacgccctgcaggagaatgccacccagaaggagcagctgctgcgggtgcagctggccaccagcatcggcaacccccctgtgtccctgctgcagcagtgcaccaacatcctgagccagggcagcaagatccagaccagggtgggcctgctgatgctgctgtgcacctggctgagcaactgccccatcgctgtgacccacttcctgcacaacagcgccaacgtgcccttcctgaccggccagattgctgagaacctgggggaggaggagcagctggtgcagggcctgtgtgccctgctgctgggcatcagcatctacttcaatgacaacagcctggagagctacatgaaggagaagctgaagcagctgattgagaagagaattggcaaggagaacttcatcgagaagctgggcttcatcagcaagcatgagctgtacagccgggccagccagaagccccagcccaacttccccagccctgagtacatgatctttgaccacgagttcaccaagctggtgaaggagctggagggcgtcatcaccaaggccatctacaagagcagcgaggaggacaagaaggaggaggaggtgaagaagaccctggagcagcacgacaacatcgtgacccactacaagaacatgatccgggagcaggacctgcagctggaggagctgcggcagcaggtgtccaccctgaagtgccagaatgagcagctgcagacagctgtgacccagcaggtgtcccagatccagcagcacaaggaccagtacaacctgctgaagatccagctgggcaaggacaaccagcaccagggcagctacagcgagggcgcccagatgaatggcatccagcctgaggagatcggccgcctgcgggaggagattgaggagctgaagaggaaccaggagctgctgcagagccagctgacagagaaggacagcatgattgagaacatgaagagcagccagaccagcggcaccaatgagcagagcagcgccatcgtgtctgcccgggacagcgagcaggtggccgagctgaagcaggagctggccaccctgaagagccagctgaacagccagagcgtggagatcaccaagctgcagacagagaagcaggagctgctgcagaagacagaggcctttgccaagtctgtggaggtgcagggcgagacagagaccatcatcgccaccaagaccacagatgtggagggccgcctgagcgccctgctgcaggagaccaaggagctgaagaatgagatcaaggccctgtctgaggagaggacagccatcaaggagcagctggacagcagcaacagcaccatcgccatcctgcagacagagaaggacaagctggagctggagatcacagacagcaagaaggagcaggatgacctgctggtgctgctggccgaccaggaccagaagatcctgagcctgaagaacaagctgaaggacctgggccaccctgtggaggaggaggatgagctggagagcggggaccaggaggatgaagatgatgaaagtgaggaccccgggaaggacctggaccacatctag

SEQ ID NO: 140300 - DNA, 2844 bp, Artificial Sequence
  derived and/or modified sequence
atgaacttcctgcggggcgtgatgggcggccagagcgctggcccccagcacacagaggccgagaccgtgagaggagctgctgaccccaaggtgaccagcagctgtggcctgaagttccgccacagcttccggctggtgaagcacatcctgtaccacgtgaccatcaacgtgtacagcgacagcgagatcatcggctacgccctggacaccctgtacaacatcatcagcaatgaggaggaggaggaggtggaggagaacagcacccggcagagcgaggacctgggcagccagttcacagagatcttcatcaagcagcaggagaatgtgaccctgctgctgagcctgctggaggagtttgacttccacgtgcgctggccaggagtgaagctgctgaccagcctgctgaagcagctgggcccccaggtgcagcagatcatcctggtgagccccatgggcgtgtcccggctgatggacctgctggccgacagccgggaggtgatcagaaatgatggagtgctgctgctgcaggccctgaccaggagcaatggagccatccagaagatcgtggcctttgaaaatgcctttgagcggctgctggacatcatcagcgaggagggcaacagtgatggcggcatcgtggtggaggactgcctgatcctgctgcagaacctgctgaagaacaacaacagcaaccagaacttcttcaaggagggcagctacatccagaggatgaagccctggtttgaggtgggagatgaaaattctggctggagcgcccagaaggtgaccaacctgcacctgatgctgcagctggtgcgggtgctggtgagccccaccaaccccccaggggccaccagcagctgccagaaggccatgttccagtgtggcctgctgcagcagctgtgcaccatcctgatggccaccggggtgcctgctgacatcctgacagagaccatcaacacagtgtctgaggtgatccggggctgccaggtgaaccaggactactttgcctctgtgaatgcccccagcaacccccccaggcctgccatcgtggtgctgctgatgtccatggtgaatgaaaggcagccctttgtgctgcgctgtgctgtgctgtactgcttccagtgcttcctgtacaagaaccagaagggccagggcgagatcgtgtccaccctgctgcccagcaccattgatgccaccggcaacagcgtgtctgctggccagctgctgtgtggcggcctcttcagcacagacagcctgagcaactggtgtgccgctgtggccctggcccacgccctgcaggagaatgccacccagaaggagcagctgctgcgggtgcagctggccaccagcatcggcaacccccctgtgtccctgctgcagcagtgcaccaacatcctgagccagggcagcaagatccagaccagggtgggcctgctgatgctgctgtgcacctggctgagcaactgccccatcgctgtgacccacttcctgcacaacagcgccaacgtgcccttcctgaccggccagattgctgagaacctgggggaggaggagcagctggtgcagggcctgtgtgccctgctgctgggcatcagcatctacttcaatgacaacagcctggagagctacatgaaggagaagctgaagcagctgattgagaagagaattggcaaggagaacttcatcgagaagctgggcttcatcagcaagcatgagctgtacagccgggccagccagaagccccagcccaacttccccagccctgagtacatgatctttgaccacgagttcaccaagctggtgaaggagctggagggcgtcatcaccaaggccatctacaagagcagcgaggaggacaagaaggaggaggaggtgaagaagaccctggagcagcacgacaacatcgtgacccactacaagaacatgatccgggagcaggacctgcagctggaggagctgcggcagcaggtgtccaccctgaagtgccagaatgagcagctgcagacagctgtgacccagcaggtgtcccagatccagcagcacaaggaccagtacaacctgctgaagatccagctgggcaaggacaaccagcaccagggcagctacagcgagggcgcccagatgaatggcatccagcctgaggagatcggccgcctgcgggaggagattgaggagctgaagaggaaccaggagctgctgcagagccagctgacagagaaggacagcatgattgagaacatgaagagcagccagaccagcggcaccaatgagcagagcagcgccatcgtgtctgcccgggacagcgagcaggtggccgagctgaagcaggagctggccaccctgaagagccagctgaacagccagagcgtggagatcaccaagctgcagacagagaagcaggagctgctgcagaagacagaggcctttgccaagtctgtggaggtgcagggcgagacagagaccatcatcgccaccaagaccacagatgtggagggccgcctgagcgccctgctgcaggagaccaaggagctgaagaatgagatcaaggccctgtctgaggagaggacagccatcaaggagcagctggacagcagcaacagcaccatcgccatcctgcagacagagaaggacaagctggagctggagatcacagacagcaagaaggagcaggatgacctgctggtgctgctggccgaccaggaccagaagatcctgagcctgaagaacaagctgaaggacctgggccaccctgtggaggaggaggatgagctggagagcggggaccaggaggatgaagatgatgaaagtgaggaccccgggaaggacctggaccacatctag

SEQ ID NO: 140301 - DNA, 2673 bp, Artificial Sequence
  derived and/or modified sequence
agcagcgacagcgagatcatcggctacgccctggacaccctgtacaatataatcagtaatgaagaggaggaggaggtggaggagaactcaaccaggcaatcagaagacctcggatcgcagtttacggaaattttcatcaagcagcaagagaatgtaacacttctgctaagcctgctggaggagttcgacttccatgtgcgatggcctggcgttaagttgcttacctcgctgttgaagcaactgggtccgcaggtgcagcagataatcctggtttcacccatgggtgtctccagattgatggacctgcttgccgatagtagggaagtgataagaaacgacggcgtcctgctccttcaagccctcactcgttccaatggggccatccagaaaattgtggcgttcgaaaacgcgtttgaaaggctgctggatattatctcagaagagggcaatagtgacggagggatagtggttgaagactgcctcattctcttgcagaatctccttaagaacaataacagcaatcagaactttttcaaagaaggatcttacatccagcggatgaaaccctggtttgaggtgggcgacgaaaatagcggatggagcgcccagaaggtgacaaacttgcaccttatgctccagttggtaagagtgctggtctctcctacgaacccgcccggggccaccagcagctgccagaaggctatgtttcagtgcgggctgctgcagcagctgtgcacaatccttatggcaacaggcgtgcctgccgatatcctcactgaaaccatcaacacagtatcggaggttattagagggtgccaagtgaatcaggattacttcgcgagtgtcaacgcaccaagtaatccacctaggcctgcaatcgttgttctgctgatgtcaatggtgaacgaacgacagccattcgttctcaggtgcgctgttctttactgtttccagtgcttcctgtataaaaaccagaagggccaaggcgagatcgtctctacgctgctcccgagcaccattgatgccacagggaacagcgtgtccgcaggacagctcttgtgtggtggcttgtttagcacagatagcctgagcaactggtgcgccgctgtggccctggcgcatgcgctgcaagaaaatgcaactcaaaaagaacaactcctgcgcgtccagctggctaccagcattggcaaccctccggtgtccctgcttcaacaatgtacaaacatcctgtcccagggatccaagatccaaaccagagtgggcttgctgatgcttctttgtacttggctcagtaattgccctatagccgtgacccactttctgcacaatagtgctaatgtcccattcttgaccggtcagatcgctgagaaccttggagaggaagagcagcttgtccaaggcctgtgtgctctgttactgggaatctctatctactttaacgacaactctctggaaagctatatgaaagagaaacttaaacagctgatagaaaagcgaatcggcaaggagaatttcattgaaaagctcggttttatttccaaacacgagctctattcacgcgcctcccagaagccacagcccaacttccctagccctgagtatatgatatttgaccatgaatttactaagctcgtgaaggagctcgagggggtcattaccaaagctatttataaatcttctgaggaggataagaaggaggaagaagtgaagaagacgctggaacaacacgacaatatcgtaacccactacaaaaatatgatcagggagcaagatttgcagcttgaggagctgcggcaacaggtgagtacgctcaaatgtcaaaatgagcaattacaaactgccgtgacacagcaggtctcgcagattcaacaacacaaagatcagtataacttgctcaagattcagttgggaaaggataatcagcatcaggggagttatagcgagggcgcgcaaatgaatgggatccaaccagaagagattggccgactaagagaagagattgaagagctgaagcggaaccaggagctgttgcagagtcaactcaccgagaaggactccatgattgagaacatgaagtcctcccaaacctctggcacaaatgagcagagcagtgccattgtaagcgcaagagactcggagcaagtggccgaattgaaacaagaactcgccacactgaagtctcagctgaactctcagtccgttgagataactaagctgcagacagagaagcaggaactcctccagaaaactgaggcctttgcaaagagcgtggaagttcagggggagaccgagacaattatagcaacaaagacgaccgatgtggagggcaggctctctgcgctcttacaagaaacaaaagaactgaagaacgagatcaaagctcttagcgaggagagaactgcaatcaaggagcagctcgactcctccaacagtactatagccatcttacaaactgaaaaggacaaactagagctagagataaccgatagcaagaaagaacaggacgatctgttagtcttattagcggaccaagatcaaaaaatcctctcgttgaagaataaattaaaggatctcggacatcccgtagaagaggaagatgagctggagagcggggatcaggaagatgaggatgacgagtcagaggacccaggaaaggatctagaccacatctag

SEQ ID NO: 140302 - DNA, 2394 bp, Artificial Sequence
  derived and/or modified sequence
atgggcgtgagccggctgatggacctgctggccgacagccgggaggtgattagaaacgatggtgtactgttacttcaggctctcacccggagcaatggcgcaatccagaaaatcgtggcttttgagaacgccttcgaacggctgttggacatcatttctgaagagggcaactcagatggtggtatcgtggtggaggattgtttgatcctattgcagaatctgctcaagaataacaatagcaatcaaaatttcttcaaagaggggtcttatatccagcggatgaagccctggttcgaagttggagatgaaaactcagggtggtcggctcagaaggtgacaaatctgcacttgatgctgcagttggtgcgagttctggttagtcctaccaatcccccaggggccacatcctcttgccagaaagctatgttccagtgcggcctacttcagcagctttgcaccatcctgatggccacaggcgtgcctgcggacattctgactgaaactatcaataccgtgagcgaggtcattagagggtgccaagtaaatcaggactatttcgcttcagttaatgcgccttcgaacccacctcgccccgctatagtggtcctcttgatgtccatggtgaatgaacgccagccttttgtgttacggtgcgcagtgctctattgctttcaatgcttcttgtacaagaatcagaaagggcagggtgagatcgttagcacactcctgcctagcaccatcgacgccacaggcaactccgtctccgctgggcagctcctctgcggcggactgttctctaccgattctctctcaaactggtgcgctgcggtcgccctggcacacgcactgcaagaaaatgccacacagaaagaacagctactacgcgttcagctggccacttccattggcaatcccccagtgagcctcctgcagcagtgtacaaacatcttgagtcaggggagcaagatccagacacgggttgggctcttaatgctattatgtacctggctcagcaactgccctatcgctgtcacgcacttcttgcataacagtgctaatgtgccctttctgacaggccaaatcgccgagaacctaggagaagaggaacagctcgtgcaggggctctgcgccctgctgctgggaatttccatttatttcaatgataacagcctcgaatcctacatgaaggagaagttaaagcagcttatagaaaaaagaattgggaaggagaattttattgagaaactgggatttatctctaaacatgaactgtatagcagggccagccagaagcctcaaccaaacttcccatcaccagagtacatgatttttgatcacgaatttacgaaattggtcaaagaactggagggcgtgatcactaaagcaatctacaagtcgagtgaagaggataaaaaggaggaggaggttaagaaaacactagagcaacacgataacatcgtaacccactacaagaacatgattcgggagcaggacttgcagctggaggagctacgtcagcaggtgagtaccctgaaatgccagaatgagcagcttcagaccgctgttactcaacaggtttctcagattcagcagcacaaggatcagtacaatttattaaagatccaactgggaaaggataatcagcaccaggggtcctattctgagggcgcccaaatgaatggcatccagccagaggagatcggcaggttgagggaagaaatagaggaactgaaaaggaatcaggaactcttacagagccagctgaccgagaaggactccatgatcgagaacatgaagagtagccagaccagtggcaccaatgaacagtcttccgctattgttagtgcgcgcgacagcgagcaggtggctgaactgaagcaggaacttgcaaccctcaagtcccagctgaactctcagagcgttgagatcacaaaactgcagacagaaaaacaggagctcctgcaaaaaaccgaggccttcgccaagtctgtcgaggtgcaaggtgagactgagacaatcatagccacaaaaacaaccgacgtcgaaggacggctgagtgctctactccaagaaacaaaagagttgaagaacgagataaaggcgctgtccgaggagcgaacagctattaaggagcagctagacagctccaactccacaattgcaattctccagacagagaaagataaactggaactggaaattaccgacagcaagaaagaacaggatgatctgctggttctcctagcagatcaggatcaaaaaattctgagcctcaaaaataaactaaaggaccttgggcatcccgttgaagaagaagatgagttggaaagcggcgaccaggaagacgaggacgatgaatctgaggatcccggcaaagatttagaccacatatag

SEQ ID NO: 140303 - DNA, 2844 bp, Artificial Sequence
  derived and/or modified sequence
atgaacttcctgcggggcgtgatgggcggccagagcgccggcccccagcatactgaggccgagactgttcgcggcgctgctgaccccaaagttacatccagctgcggcctaaaatttcggcactcattccgtctggtgaaacacatactgtatcacgtgaccatcaacgtatattccgatagtgaaatcattggctatgcactggacaccctgtacaatatcattagtaatgaagaggaggaggaagtggaggagaatagtacgcggcagtcagaagatctcggctctcagttcaccgagattttcataaagcagcaagaaaatgtaactcttctgctctccctccttgaagaatttgacttccacgtgcggtggcctggggtcaaactgctcacttccctactcaagcagctgggccctcaagtccagcagatcatcctggtgtctccaatgggagtgtcccggttgatggaccttctcgcggacagtagagaggtcataaggaatgacggagtgctcctgttgcaggccctgaccagatcaaacggtgctattcagaagattgtcgcgtttgaaaatgcttttgagcgcttgcttgatatcatcagcgaggaaggcaacagcgacggaggtatcgtagttgaagactgtcttattttgcttcagaacctgctgaaaaataataactccaaccagaatttcttcaaagaaggaagctatattcaacgcatgaagccttggtttgaggttggcgatgagaactctggctggtcagctcagaaggtgactaatctgcatctgatgctccaactggtcagggtgttggtctcacctacaaatccccctggcgcaacttcttcctgccaaaaggctatgtttcagtgcggccttctccagcagctgtgcactatattgatggccactggggtccctgcagatatcctcaccgaaacaattaataccgtgtccgaggttatccgcggctgccaagtgaaccaagattatttcgcaagcgttaacgcaccctctaacccaccgcggccagccattgtggtgttgttaatgtcaatggtgaatgaacgccagccgtttgtgctgagatgcgccgtgctctattgcttccagtgttttctttacaaaaatcagaaaggtcagggagagatcgtcagcaccctcctccctagtacgatcgacgccactgggaactctgtcagcgccggacagctgctctgcgggggccttttctccaccgactcactatccaactggtgcgctgccgttgcactggctcacgctctccaggaaaatgcaactcagaaggaacagctcctgcgggtgcaactggctactagcatagggaatcctcccgtcagtctactccagcaatgtactaacattttgtcccagggatctaaaatacagaccagggttgggctgcttatgctgttgtgcacttggctgagtaattgcccaatcgctgtgacccactttctgcacaactccgcaaatgtacctttcttgaccggccaaattgccgagaatctgggcgaagaggaacagctcgtccagggtctctgcgccttgttgttagggatctctatatatttcaatgataattctttggagtcttatatgaaagaaaaactcaaacagcttattgagaaaaggatcgggaaggagaatttcatcgagaagctggggtttatctcaaagcacgagctttattctagagccagccagaaacctcagcctaatttcccttcgcccgagtatatgatctttgaccatgaattcacaaagctggtgaaggaactagagggcgttatcaccaaagccatttataagtcgagcgaggaggacaaaaaagaggaagaagtaaaaaagacacttgagcagcatgataacatcgtgactcattataagaatatgatccgcgaacaggacctgcaactggaggaactgaggcaacaggtttcaactttgaagtgtcagaatgagcaattacagacagctgtaacccagcaggtatcacagattcagcagcataaggatcagtataacctgctgaagatccagcttggaaaagataaccagcaccagggttcttacagcgagggagctcagatgaacggaatccagcccgaagaaattggccgccttagggaagagatcgaggaacttaaacggaatcaggaactgcttcaaagtcagcttactgagaaggatagcatgatcgaaaacatgaagtcatctcaaacctcaggcaccaacgagcaatcgagcgccatcgtgtccgctagagattccgagcaggtggctgaacttaagcaggagttagctactcttaagtcgcaactaaactcccagagcgtggagattaccaaattgcaaacggagaagcaagagctcctccagaagactgaagcctttgctaaatccgtggaggtgcagggagagaccgaaaccattatcgctaccaagacgaccgatgtggaggggagacttagcgcacttttgcaggagacgaaggagctgaaaaacgagattaaggccctgagtgaagaacggactgccattaaggagcaattggacagctcaaactccaccattgcgatcctccagaccgagaaggacaaattggagctcgagatcaccgacagtaagaaggagcaggacgatctcctggttttgttagccgaccaggaccagaagatcctgtcactaaagaataagctgaaggatctggggcatccggttgaggaggaagatgaactagaatctggcgaccaggaagacgaggatgatgagagcgaggatcctgggaaggatcttgaccacatctag

SEQ ID NO: 140304 - DNA, 2673 bp, Artificial Sequence
  derived and/or modified sequence
tctagtgacagcgagattataggctatgctctcgatacgttgtacaatataatttcaaacgaggaggaggaagaggtcgaggagaattccacccggcagtccgaggacttaggtagccagttcacagagattttcattaaacaacaggaaaacgtgacattgctcctgtccctgttggaggaatttgacttccatgttcggtggcctggcgtcaagctcctgacatctttactcaaacaactaggcccacaagtgcaacaaatcattttggtaagcccaatgggcgtatctcgtctgatggacctcctggcagattccagggaagttattaggaatgatggggttcttctactccaagcactcacaagatcgaatggtgccatacagaagatcgtggcatttgagaacgcgttcgaacgccttctggatattattagcgaagaggggaattcggatggaggaattgtggttgaagactgtctcatcttgttgcagaacctcttgaaaaataacaacagcaatcagaacttcttcaaagaggggtcatatatccagagaatgaagccctggtttgaagtgggggacgagaattcgggttggtctgctcagaaggttacaaacttgcacctaatgctccagctggttagggtgctggtgagcccaactaacccacctggagccacttcgtcctgtcagaaagccatgttccagtgcggactgctccagcagctctgtacaatcctgatggctacgggtgtgccggcagacattttgaccgaaactattaacacagttagtgaagtcatccgagggtgccaagtgaaccaggactactttgcctcggttaatgcaccttccaacccccctcgacctgcgatcgtggtactgcttatgtctatggtcaacgagcggcagcccttcgtgctgaggtgtgccgtcctgtattgctttcaatgttttctgtataaaaaccagaagggacagggggagatagtcagcaccctgctgccgagcacgattgacgcgacgggcaactccgtttcagccggacagcttttgtgcggcggattattttcaacagactcgctctccaattggtgtgcggctgtcgccctggcacatgccctgcaagaaaatgctacccagaaagaacagcttctacgggtccagctagccactagtatcgggaaccctcccgtctctctcctccagcagtgtaccaatatactgagccagggcagcaagatccaaaccagagtcggtctgttgatgctactgtgtacctggctatccaactgccccattgcagtcacccactttctccacaactctgcaaacgtaccttttctcaccggccaaattgcggagaacttgggcgaggaggaacaactcgttcagggcctgtgcgccctacttctgggaatctccatttactttaacgataatagcctggagagttatatgaaagaaaaattgaagcagctgattgagaagcgaatagggaaggaaaatttcatcgaaaagcttggcttcatttccaagcacgaactgtactcaagggcatctcagaagccgcaaccaaattttccaagccccgaatacatgattttcgatcacgagttcacaaaactggtgaaagagcttgaaggcgtgataaccaaggctatctacaagagcagcgaggaggataagaaggaggaagaagtgaagaagaccttggagcagcatgacaatatagtgactcactataagaatatgattcgtgagcaggatttacagctggaagaattaagacagcaggtaagtactctgaagtgtcaaaacgagcagctgcaaactgccgtgacacagcaggtgtcccagattcagcagcataaagatcaatataacctcctaaaaatccagctgggcaaagacaaccagcaccaggggtcgtattcagaaggcgctcagatgaatggcattcaaccggaggaaattgggaggcttagggaggagatcgaagaactgaaacgaaatcaggagttgctccagagtcagctcacagaaaaggactctatgattgagaatatgaagtcctcccagacgagcggcactaacgagcagagctctgccatagtgtcggccagggatagtgagcaggtcgcagagctgaagcaggagctggccactctgaaatcccaattgaacagccagagcgtcgagatcacaaagctccagacagagaaacaggagctgctgcagaagactgaagcatttgctaaatcggtcgaggttcagggagagactgagaccatcatagctaccaagactactgatgtggaagggagactaagcgctttgctgcaggagactaaagagttgaaaaatgaaatcaaggccctctccgaagagaggacagccattaaagagcaactggattcctcaaactccaccatcgcaatactacaaactgaaaaggataagcttgaactggaaatcacggattctaagaaggagcaggatgatctgctggtgctgctcgccgatcaggatcagaagatcctttctctcaagaacaagttgaaagatcttggccatccagtagaggaagaagatgagctagagagtggggatcaagaggacgaggacgacgagtccgaggaccctggcaaggacctggaccacatctag

SEQ ID NO: 140305 - DNA, 2394 bp, Artificial Sequence
  derived and/or modified sequence
atgggcgtaagtcgactgatggacctgttggcggactcgcgggaggtcatcaggaacgacggcgttctcttgctgcaggctctgactcgtagtaacggggcaatacagaagattgtggcatttgaaaatgcctttgaaaggctacttgacattatttctgaagagggcaatagcgacggaggcatcgtggtagaggactgtttgattttgctccagaacctgctaaaaaataacaactctaatcaaaacttcttcaaggagggctcgtatattcagcgcatgaagccttggtttgaggttggggatgagaattcaggatggagcgcacaaaaggttacaaacctccacctcatgctacagctggtgagagttctagtgtctccaacaaatccgcctggcgctacgtcgtcatgccagaaagcaatgtttcaatgtgggttgttgcagcagctgtgtactattttgatggcaacgggagttcccgctgacatcctgacagagactattaatacagtttctgaggtgatcagaggttgccaggtcaaccaggattacttcgcatcggtgaatgctccgtcaaaccctccacggcctgcgatcgttgtgctcttgatgtcaatggttaacgagcggcagccattcgtcttacgatgtgcagtgttgtattgctttcagtgctttctgtacaaaaaccagaaaggacaaggggaaatcgtgagcaccctgctcccatccacaatcgacgctactggaaatagcgttagcgccggtcagttactgtgcggcggactgttcagcactgatagtctaagtaattggtgcgctgccgtggccctggctcacgccctacaagagaacgcaacccagaaagaacagctgctgcgggttcagttagcaacctccatcggaaaccccccagtgtcattacttcagcagtgcactaacattctgagccaaggctcaaagatccagactagagtaggacttctaatgctcttgtgtacttggctgtccaattgccctatcgccgtcacacacttcctccacaattcggcgaatgtgccattcctgaccggtcagatcgccgagaacctgggcgaagaagagcaattggtgcaagggctgtgcgcattactactcgggatcagcatctattttaacgataatagtctggaaagttatatgaaggaaaaactgaagcagttgattgagaagcgcatcgggaaggagaatttcatcgagaaactgggtttcatttctaagcacgagctgtattcaagggctagtcagaaaccccagcctaacttcccctctccagagtatatgatctttgaccatgaatttacaaagttggtaaaagaactggaaggcgtaatcactaaagcgatttacaaatcatctgaagaggataaaaaggaagaagaggttaaaaaaaccctagagcagcatgacaacatagtcacacactacaagaatatgattcgagagcaggacctacagctagaggaactgaggcagcaagtgtcaacactgaagtgtcagaatgaacagctgcagactgccgtgacccagcaagtctcccagattcaacagcacaaagatcagtataatctcctcaaaattcagctgggtaaggataaccaacaccagggcagttatagtgaaggggctcagatgaatggtatccagcctgaagaaattggacgactgcgcgaagaaattgaagagctaaagcgaaatcaagaactgctccagtctcagttgaccgaaaaagattccatgatagaaaacatgaaaagttcccagacctcaggcacaaatgaacagtcctcggccatcgttagcgcaagagacagtgagcaggtggcagagctgaagcaagagctcgctacactgaaaagccaactgaactcgcaatctgtggagataacaaagctgcaaacagagaaacaggaactgctacagaaaacggaagctttcgccaagagtgtcgaagtccaaggtgagaccgagaccattattgcaactaagaccaccgacgtcgagggacggctgtccgccctcctccaggagacaaaggagcttaagaatgagattaaggcgctgagtgaagagcggaccgcgataaaagagcagctggacagctcaaacagcacaattgctatccttcaaacagagaaggataagctagagcttgaaattacagactcgaaaaaggagcaggacgatttgctggtgctgctcgcagaccaagaccagaagattctgagcttgaagaataaacttaaagatcttgggcaccccgtggaagaagaagacgagctggaatcgggggatcaagaagacgaggatgacgaaagcgaggatcccggaaaagacctggaccacatctag

SEQ ID NO: 140306 - DNA, 2844 bp, Artificial Sequence
  derived and/or modified sequence
atgaatttcctgcgcggagtgatgggcggacagagcgccggtccacaacacaccgaggcagagacagtgcggggagctgccgatccaaaagttacttcctcatgcgggctcaaatttaggcacagctttcgcctcgtgaagcacattttgtaccatgtgacgattaacgtttatagcgatagtgaaatcattgggtacgccctcgatactctgtataacatcatcagcaatgaggaggaagaagaagtggaagagaactctacgcgccagtccgaggatttgggcagccaattcaccgagatctttattaagcaacaggagaatgtcaccctcctactgagtctcctagaagagttcgattttcacgtccggtggccgggagttaagctcctgacttcactcctgaagcagctaggcccacaggtgcaacagataatcttggtgtctccaatgggggtgagcaggttgatggacctcttggccgattcacgtgaagtaatccggaatgacggagtcctgctgcttcaggctctgacacgctctaatggagccatccagaagatcgtcgccttcgaaaatgcatttgaacggttgctagacataatctctgaagaaggtaattctgacggtggcatcgtcgtcgaagattgtctgatcctgctacagaatttactgaaaaataacaacagtaaccaaaattttttcaaagagggatcttacattcagaggatgaaaccatggttcgaggtgggcgatgagaacagtggctggtccgcgcagaaagtaactaacttgcacctgatgttgcagctagtacgcgttttagtctctccaacaaaccccccaggcgcaacaagctcctgtcaaaaggctatgttccagtgcggcttgctacaacagctgtgtaccattctgatggctacaggagtgcctgcagatatactcactgaaacaattaatacagtatctgaggtgatccgagggtgtcaggtcaaccaggattatttcgcttcagttaatgcaccatccaatcctcccaggccagcaatcgttgtactgctcatgtctatggtgaatgagcggcagcctttcgtgctccgttgcgccgtcctgtattgctttcaatgtttcctctataagaaccaaaaaggtcaaggagaaattgtgtcgacactgttaccttctaccattgatgccaccggaaacagcgtgtccgccggacagttgttgtgcggtggcctgtttagcactgacagcctgtcaaactggtgcgcagccgtggccttagctcatgctctgcaagaaaacgctactcagaaggaacagcttctgcgcgtgcagcttgccacctctattggcaaccccccagtttctctcctgcaacagtgtactaacatactgagccaaggctccaagattcaaacgcgtgtggggctcttaatgttactctgcacatggttatccaattgtcctatcgccgttacccacttcctgcacaatagcgctaatgttccattccttacaggtcaaattgctgaaaatttaggagaggaggagcagttggtgcagggtctctgcgccctgttgcttgggattagtatttacttcaacgacaattctctggagtcatacatgaaggaaaaactgaaacagcttatcgagaagagaatcggcaaagagaactttatagagaagctgggattcatcagtaagcacgagctctatagccgcgcatcccagaaacctcagccgaactttccctcccctgagtacatgattttcgatcatgagttcaccaaactggttaaagagttggagggagtaattaccaaggcaatctataaaagttctgaagaggataagaaagaagaagaagtgaagaaaactttggagcaacacgacaacattgtgacccactacaagaatatgatacgcgagcaggacctgcagttggaagaactgcgccagcaagtgtcgaccctgaagtgtcagaacgagcagcttcaaaccgccgtgacacaacaggtctcgcagatccaacagcataaagatcagtacaatctcctgaaaatccagctggggaaagacaatcagcatcaaggctcctacagcgagggagctcaaatgaacggaatccaacccgaagaaattgggcgtcttcgcgaggagattgaggaacttaaaaggaatcaagagcttctgcagagtcagttaacggaaaaggacagcatgatcgagaacatgaaatcctcacagaccagcgggacaaacgagcagagttcagcaatcgtatctgccagagatagcgagcaagtcgcagagttgaaacaggaactggcaactctgaagagccagctgaattcacagtcagtggagataacaaagctgcaaacagagaagcaagagttgttgcagaaaaccgaggctttcgctaagagcgttgaggtgcagggggaaaccgaaaccattatcgctacaaagactacggacgtggaaggacgactgtcagctcttctgcaagagactaaggagctgaagaacgagataaaagcactcagtgaggaacgcaccgccatcaaagaacagctggacagttcgaacagcaccattgcaattttgcagaccgaaaaagacaagttggagctggagataaccgattcaaagaaagagcaggatgatctactggtgctcctagcggaccaggatcagaaaattctgagcttaaaaaacaaactgaaggacctcggccatcccgtggaggaagaagacgaacttgagtctggggatcaggaggatgaggacgacgagtcagaggatccgggaaaagatctggatcatatctag

SEQ ID NO: 140307 - DNA, 3897 bp, Artificial Sequence
  derived and/or modified sequence
ccttttgccttcaaccttcgagccgccacgtaatgccacgtccccgcgcatgcgcatcttggccgctgctggcggctgtttccgggcttagagggctggagtggccgccgagttggaggcggtggtggcagcagtaggagtgtgtagagtgcgggattggggcccaggccctgcggagggcgggggaagttgtcttcttttttttccggaggggccggtaaacctggtggctgaacggcaagatgaatttcctccgcggggtaatggggggtcagagtgccggaccccagcacacagaagccgagacgttcagattctgaaataataggttatgctttggacacactatataatataatatctaatgaagaagaagaagaagtagaagaaaattccacaagacagagtgaagatttgggaagccaatttacagaaattttcattaagcagcaggaaaatgtcactcttctgttatctttattggaggagtttgatttccatgtccgctggcctggtgtgaagcttcttacttctcttttaaaacaactagggcctcaggtgcaacaaattattttagtcagtcctatgggtgtttcaagattgatggacttactagcggattccagggaagttatacgtaatgatggcgtcttactactgcaggcactaacaagaagcaatggtgcaatccagaaaattgttgcttttgaaaatgctttcgagagactactggacattatttcagaggaggggaacagtgatggaggtatagtagttgaagattgtttgattttgctccaaaacttattaaaaaacaacaactccaatcaaaatttttttaaagaaggctcatatattcaacgtatgaaaccttggtttgaagttggagatgaaaattctggctggtctgcacagaaagtgaccaatctacatctaatgctacagcttgttcgtgtattggtatctcccaccaaccctcctggtgctaccagtagctgccagaaggctatgttccagtgtgggttattgcagcagctttgtactatcctaatggctactggggttcctgctgatatcctgactgagaccataaatactgtatcagaagttattcgaggctgccaagtaaaccaagactactttgcatctgtaaatgcaccttcaaacccaccaagaccggcaattgtagtacttctcatgtccatggttaatgaaaggcagccatttgttttgcgctgtgctgttctctattgtttccagtgtttcttgtataaaaaccaaaaaggacaaggagaaatcgtgtcaacacttttaccttctaccattgatgcaacaggtaattcagtttcagctggccagttattatgtggaggtttgttttctactgattcactttcaaactggtgtgctgctgtggcccttgcccatgcgttgcaagaaaatgccacccagaaagaacagttgctcagggttcaacttgctacaagtattggcaaccctccagtttctttacttcaacagtgcaccaatattctttcacagggaagcaaaatacaaacaagagttggattattaatgttgctttgtacctggctaagcaattgtcccattgcagtaacgcattttcttcacaattcagccaatgttccatttcttacaggacaaattgcagaaaatcttggagaagaagagcagttggtccaaggcttatgtgcccttttgttgggcatttcgatttatttcaatgataactcacttgagagctacatgaaagagaagctaaaacaactgattgagaagaggattggcaaagagaatttcatagagaaactaggatttattagcaaacatgagttgtattccagagcatctcagaaaccccagccaaactttcccagtccagaatacatgatatttgatcatgagtttacgaagctggtaaaagaacttgaaggtgttataactaaggctatttataagtccagtgaagaagataaaaaagaagaagaggtgaaaaaaacattagaacagcatgacaatattgtgactcactacaaaaatatgattcgagagcaggatctccaacttgaggaattaaggcagcaggtttctacattaaaatgtcaaaatgaacagctccagacggcagtcacacagcaagtatcacagatccagcagcacaaagaccagtataatcttcttaaaatacagctaggaaaagacaatcagcatcaaggttcttacagtgagggggctcagatgaatggcattcagccagaagaaattggtagattgcgagaagagatagaagaattaaaacgtaatcaggaacttttacaaagccagctgactgaaaaggactctatgattgaaaatatgaaatcttcccaaacatctggcacaaatgaacagtcttcagcaatagtttcagctagagattctgaacaagttgcagaattaaaacaggaactggcaactttaaagtctcagttaaactcacaatctgtggagatcaccaaactacagacagaaaagcaggaactgttacagaaaacagaagcgtttgcaaaatcagttgaggtacaaggagagaccgagactataatagccaccaaaactactgatgtagaaggaagactgtcagcattattacaagagaccaaagagttaaagaatgaaattaaagctctgtctgaggaaagaactgccattaaagagcagctggattcatctaatagtaccattgccattttacaaactgagaaagacaaactagagttggaaattacagattctaaaaaagaacaagatgatctcttggtgctcttggccgatcaagatcagaaaatactgtcattgaagaataaactcaaggatcttggtcatccagttgaagaagaggatgaacttgaatctggagaccaagaggatgaggatgatgaaagtgaagatcctggcaaggatctagatcatatctagttttcaaatctctaggaacaatagagattatatcataactctgaagatggactctaaactttggtttacctccatggaaaataaagatttagaaaccaggtggaaaacattcactattaagactattgatatatttttgtaatgttgccacccatgttgaaaaccttaaaactgaatttatgtagaacacacatcttttatttaaatccatctgaactgtcccaaaatgtaatttgcaaagagcttcaaacaccaaaaatataccattttaaggcatgtggtgacaatgctatttgccttagttcattcgttgtttactttgcaaaatttgtgacttttaagtactaacacatttgattgaatgtgtattgaattggaattattatttctaaattcagcatttgagtccttagttgatgattttcttttaaagaaattagtttatttaaaagcaagatagcctgggttgggagttagtgcatatcatcagccctccatctaatgtgattgctaagatgtgcaggataggacagcttagaatgagtgccttgacacctacatatggctgcattccatacctcagtgaagaagccgaaggatgctgacacacagtgatgtggagggcattccggagaaacttttgcaacagtgtattaatgtgattggttttctttttgttttaagctaaacatctaaaacaaatttcaagttaacagttcatacaactcagatttagtagtattgtttatcataaaacatattatgttcctagttttaaaaagacccaaagtatgattaatataatttattggcatttttgctgaataggtttaagtcagataatagattttaaaaaagcaaatgaggcaatgtgtcaaaatttaatgtttcataataaaaatagatacgttgacttaa

SEQ ID NO: 140308 - DNA, 2844 bp, Artificial Sequence
  derived and/or modified sequence
atgaatttcctccgcggggtaatggggggtcagagtgccggaccccagcacacagaagccgagacggtgagaggagcagcggacccgaaggtcacctccagctgtggacttaaatttagacatagttttcgtttagtcaagcacattttataccatgttactataaatgtgtattcagattctgaaataataggttatgctttggacacactatataatataatatctaatgaagaagaagaagaagtagaagaaaattccacaagacagagtgaagatttgggaagccaatttacagaaattttcattaagcagcaggaaaatgtcactcttctgttatctttattggaggagtttgatttccatgtccgctggcctggtgtgaagcttcttacttctcttttaaaacaactagggcctcaggtgcaacaaattattttagtcagtcctatgggtgtttcaagattgatggacttactagcggattccagggaagttatacgtaatgatggcgtcttactactgcaggcactaacaagaagcaatggtgcaatccagaaaattgttgcttttgaaaatgctttcgagagactactggacattatttcagaggaggggaacagtgatggaggtatagtagttgaagattgtttgattttgctccaaaacttattaaaaaacaacaactccaatcaaaatttttttaaagaaggctcatatattcaacgtatgaaaccttggtttgaagttggagatgaaaattctggctggtctgcacagaaagtgaccaatctacatctaatgctacagcttgttcgtgtattggtatctcccaccaaccctcctggtgctaccagtagctgccagaaggctatgttccagtgtgggttattgcagcagctttgtactatcctaatggctactggggttcctgctgatatcctgactgagaccataaatactgtatcagaagttattcgaggctgccaagtaaaccaagactactttgcatctgtaaatgcaccttcaaacccaccaagaccggcaattgtagtacttctcatgtccatggttaatgaaaggcagccatttgttttgcgctgtgctgttctctattgtttccagtgtttcttgtataaaaaccaaaaaggacaaggagaaatcgtgtcaacacttttaccttctaccattgatgcaacaggtaattcagtttcagctggccagttattatgtggaggtttgttttctactgattcactttcaaactggtgtgctgctgtggcccttgcccatgcgttgcaagaaaatgccacccagaaagaacagttgctcagggttcaacttgctacaagtattggcaaccctccagtttctttacttcaacagtgcaccaatattctttcacagggaagcaaaatacaaacaagagttggattattaatgttgctttgtacctggctaagcaattgtcccattgcagtaacgcattttcttcacaattcagccaatgttccatttcttacaggacaaattgcagaaaatcttggagaagaagagcagttggtccaaggcttatgtgcccttttgttgggcatttcgatttatttcaatgataactcacttgagagctacatgaaagagaagctaaaacaactgattgagaagaggattggcaaagagaatttcatagagaaactaggatttattagcaaacatgagttgtattccagagcatctcagaaaccccagccaaactttcccagtccagaatacatgatatttgatcatgagtttacgaagctggtaaaagaacttgaaggtgttataactaaggctatttataagtccagtgaagaagataaaaaagaagaagaggtgaaaaaaacattagaacagcatgacaatattgtgactcactacaaaaatatgattcgagagcaggatctccaacttgaggaattaaggcagcaggtttctacattaaaatgtcaaaatgaacagctccagacggcagtcacacagcaagtatcacagatccagcagcacaaagaccagtataatcttcttaaaatacagctaggaaaagacaatcagcatcaaggttcttacagtgagggggctcagatgaatggcattcagccagaagaaattggtagattgcgagaagagatagaagaattaaaacgtaatcaggaacttttacaaagccagctgactgaaaaggactctatgattgaaaatatgaaatcttcccaaacatctggcacaaatgaacagtcttcagcaatagtttcagctagagattctgaacaagttgcagaattaaaacaggaactggcaactttaaagtctcagttaaactcacaatctgtggagatcaccaaactacagacagaaaagcaggaactgttacagaaaacagaagcgtttgcaaaatcagttgaggtacaaggagagaccgagactataatagccaccaaaactactgatgtagaaggaagactgtcagcattattacaagagaccaaagagttaaagaatgaaattaaagctctgtctgaggaaagaactgccattaaagagcagctggattcatctaatagtaccattgccattttacaaactgagaaagacaaactagagttggaaattacagattctaaaaaagaacaagatgatctcttggtgctcttggccgatcaagatcagaaaatactgtcattgaagaataaactcaaggatcttggtcatccagttgaagaagaggatgaacttgaatctggagaccaagaggatgaggatgatgaaagtgaagatcctggcaaggatctagatcatatctag

SEQ ID NO: 140309 - DNA, 3589 bp, Artificial Sequence
  derived and/or modified sequence
agttcagattctgaaataataggttatgctttggacacactatataatataatatctaatgaagaagaagaagaagtagaagaaaattccacaagacagagtgaagatttgggaagccaatttacagaaattttcattaagcagcaggaaaatgtcactcttctgttatctttattggaggagtttgatttccatgtccgctggcctggtgtgaagcttcttacttctcttttaaaacaactagggcctcaggtgcaacaaattattttagtcagtcctatgggtgtttcaagattgatggacttactagcggattccagggaagttatacgtaatgatggcgtcttactactgcaggcactaacaagaagcaatggtgcaatccagaaaattgttgcttttgaaaatgctttcgagagactactggacattatttcagaggaggggaacagtgatggaggtatagtagttgaagattgtttgattttgctccaaaacttattaaaaaacaacaactccaatcaaaatttttttaaagaaggctcatatattcaacgtatgaaaccttggtttgaagttggagatgaaaattctggctggtctgcacagaaagtgaccaatctacatctaatgctacagcttgttcgtgtattggtatctcccaccaaccctcctggtgctaccagtagctgccagaaggctatgttccagtgtgggttattgcagcagctttgtactatcctaatggctactggggttcctgctgatatcctgactgagaccataaatactgtatcagaagttattcgaggctgccaagtaaaccaagactactttgcatctgtaaatgcaccttcaaacccaccaagaccggcaattgtagtacttctcatgtccatggttaatgaaaggcagccatttgttttgcgctgtgctgttctctattgtttccagtgtttcttgtataaaaaccaaaaaggacaaggagaaatcgtgtcaacacttttaccttctaccattgatgcaacaggtaattcagtttcagctggccagttattatgtggaggtttgttttctactgattcactttcaaactggtgtgctgctgtggcccttgcccatgcgttgcaagaaaatgccacccagaaagaacagttgctcagggttcaacttgctacaagtattggcaaccctccagtttctttacttcaacagtgcaccaatattctttcacagggaagcaaaatacaaacaagagttggattattaatgttgctttgtacctggctaagcaattgtcccattgcagtaacgcattttcttcacaattcagccaatgttccatttcttacaggacaaattgcagaaaatcttggagaagaagagcagttggtccaaggcttatgtgcccttttgttgggcatttcgatttatttcaatgataactcacttgagagctacatgaaagagaagctaaaacaactgattgagaagaggattggcaaagagaatttcatagagaaactaggatttattagcaaacatgagttgtattccagagcatctcagaaaccccagccaaactttcccagtccagaatacatgatatttgatcatgagtttacgaagctggtaaaagaacttgaaggtgttataactaaggctatttataagtccagtgaagaagataaaaaagaagaagaggtgaaaaaaacattagaacagcatgacaatattgtgactcactacaaaaatatgattcgagagcaggatctccaacttgaggaattaaggcagcaggtttctacattaaaatgtcaaaatgaacagctccagacggcagtcacacagcaagtatcacagatccagcagcacaaagaccagtataatcttcttaaaatacagctaggaaaagacaatcagcatcaaggttcttacagtgagggggctcagatgaatggcattcagccagaagaaattggtagattgcgagaagagatagaagaattaaaacgtaatcaggaacttttacaaagccagctgactgaaaaggactctatgattgaaaatatgaaatcttcccaaacatctggcacaaatgaacagtcttcagcaatagtttcagctagagattctgaacaagttgcagaattaaaacaggaactggcaactttaaagtctcagttaaactcacaatctgtggagatcaccaaactacagacagaaaagcaggaactgttacagaaaacagaagcgtttgcaaaatcagttgaggtacaaggagagaccgagactataatagccaccaaaactactgatgtagaaggaagactgtcagcattattacaagagaccaaagagttaaagaatgaaattaaagctctgtctgaggaaagaactgccattaaagagcagctggattcatctaatagtaccattgccattttacaaactgagaaagacaaactagagttggaaattacagattctaaaaaagaacaagatgatctcttggtgctcttggccgatcaagatcagaaaatactgtcattgaagaataaactcaaggatcttggtcatccagttgaagaagaggatgaacttgaatctggagaccaagaggatgaggatgatgaaagtgaagatcctggcaaggatctagatcatatctagttttcaaatctctaggaacaatagagattatatcataactctgaagatggactctaaactttggtttacctccatggaaaataaagatttagaaaccaggtggaaaacattcactattaagactattgatatatttttgtaatgttgccacccatgttgaaaaccttaaaactgaatttatgtagaacacacatcttttatttaaatccatctgaactgtcccaaaatgtaatttgcaaagagcttcaaacaccaaaaatataccattttaaggcatgtggtgacaatgctatttgccttagttcattcgttgtttactttgcaaaatttgtgacttttaagtactaacacatttgattgaatgtgtattgaattggaattattatttctaaattcagcatttgagtccttagttgatgattttcttttaaagaaattagtttatttaaaagcaagatagcctgggttgggagttagtgcatatcatcagccctccatctaatgtgattgctaagatgtgcaggataggacagcttagaatgagtgccttgacacctacatatggctgcattccatacctcagtgaagaagccgaaggatgctgacacacagtgatgtggagggcattccggagaaacttttgcaacagtgtattaatgtgattggttttctttttgttttaagctaaacatctaaaacaaatttcaagttaacagttcatacaactcagatttagtagtattgtttatcataaaacatattatgttcctagttttaaaaagacccaaagtatgattaatataatttattggcatttttgctgaataggtttaagtcagataatagattttaaaaaagcaaatgaggcaatgtgtcaaaatttaatgtttcataataaaaatagatacgttgactt

SEQ ID NO: 140310 - DNA, 2673 bp, Artificial Sequence
  derived and/or modified sequence
agcagcgacagcgagatcatcggctacgccctggacaccctgtacaacatcatcagcaacgaggaggaggaggaggtggaggagaacagcaccagacagagcgaggacctgggcagccagttcaccgagatcttcatcaagcagcaggagaacgtgaccctgctgctgagcctgctggaggagttcgacttccacgtgagatggcccggcgtgaagctgctgaccagcctgctgaagcagctgggcccccaggtgcagcagatcatcctggtgagccccatgggcgtgagcagactgatggacctgctggccgacagcagagaggtgatcagaaacgacggcgtgctgctgctgcaggccctgaccagaagcaacggcgccatccagaagatcgtggccttcgagaacgccttcgagagactgctggacatcatcagcgaggagggcaacagcgacggcggcatcgtggtggaggactgcctgatcctgctgcagaacctgctgaagaacaacaacagcaaccagaacttcttcaaggagggcagctacatccagagaatgaagccctggttcgaggtgggcgacgagaacagcggctggagcgcccagaaggtgaccaacctgcacctgatgctgcagctggtgagagtgctggtgagccccaccaacccccccggcgccaccagcagctgccagaaggccatgttccagtgcggcctgctgcagcagctgtgcaccatcctgatggccaccggcgtgcccgccgacatcctgaccgagaccatcaacaccgtgagcgaggtgatcagaggctgccaggtgaaccaggactacttcgccagcgtgaacgcccccagcaacccccccagacccgccatcgtggtgctgctgatgagcatggtgaacgagagacagcccttcgtgctgagatgcgccgtgctgtactgcttccagtgcttcctgtacaagaaccagaagggccagggcgagatcgtgagcaccctgctgcccagcaccatcgacgccaccggcaacagcgtgagcgccggccagctgctgtgcggcggcctgttcagcaccgacagcctgagcaactggtgcgccgccgtggccctggcccacgccctgcaggagaacgccacccagaaggagcagctgctgagagtgcagctggccaccagcatcggcaacccccccgtgagcctgctgcagcagtgcaccaacatcctgagccagggcagcaagatccagaccagagtgggcctgctgatgctgctgtgcacctggctgagcaactgccccatcgccgtgacccacttcctgcacaacagcgccaacgtgcccttcctgaccggccagatcgccgagaacctgggcgaggaggagcagctggtgcagggcctgtgcgccctgctgctgggcatcagcatctacttcaacgacaacagcctggagagctacatgaaggagaagctgaagcagctgatcgagaagagaatcggcaaggagaacttcatcgagaagctgggcttcatcagcaagcacgagctgtacagcagagccagccagaagccccagcccaacttccccagccccgagtacatgatcttcgaccacgagttcaccaagctggtgaaggagctggagggcgtgatcaccaaggccatctacaagagcagcgaggaggacaagaaggaggaggaggtgaagaagaccctggagcagcacgacaacatcgtgacccactacaagaacatgatcagagagcaggacctgcagctggaggagctgagacagcaggtgagcaccctgaagtgccagaacgagcagctgcagaccgccgtgacccagcaggtgagccagatccagcagcacaaggaccagtacaacctgctgaagatccagctgggcaaggacaaccagcaccagggcagctacagcgagggcgcccagatgaacggcatccagcccgaggagatcggcagactgagagaggagatcgaggagctgaagagaaaccaggagctgctgcagagccagctgaccgagaaggacagcatgatcgagaacatgaagagcagccagaccagcggcaccaacgagcagagcagcgccatcgtgagcgccagagacagcgagcaggtggccgagctgaagcaggagctggccaccctgaagagccagctgaacagccagagcgtggagatcaccaagctgcagaccgagaagcaggagctgctgcagaagaccgaggccttcgccaagagcgtggaggtgcagggcgagaccgagaccatcatcgccaccaagaccaccgacgtggagggcagactgagcgccctgctgcaggagaccaaggagctgaagaacgagatcaaggccctgagcgaggagagaaccgccatcaaggagcagctggacagcagcaacagcaccatcgccatcctgcagaccgagaaggacaagctggagctggagatcaccgacagcaagaaggagcaggacgacctgctggtgctgctggccgaccaggaccagaagatcctgagcctgaagaacaagctgaaggacctgggccaccccgtggaggaggaggacgagctggagagcggcgaccaggaggacgaggacgacgagagcgaggaccccggcaaggacctggaccacatctag

SEQ ID NO: 140311 - DNA, 2169 bp, Artificial Sequence
  derived and/or modified sequence
gctttttgcttttcatcacctgcaagatgtacataaaaatcacataagctggaattcaacaaaagacctctgactatgtgaagatacggtgggaagatgactgaccgcaagacaggaagagagccctcaccgaggaaccaaattggccagtatcttgattttggatttctcaacctcaagaaccatgagaaatgaatgtctgctgttcaagccacccagtcaatgaaaaagtttggaaaccttcatctagaaagtggtctagcaaagtgtggtccatggatgagtttgatctgcaaactgcttgttattggttcatgacaaggtgtcagaaggaggctggcaaatttggcactcacagagggaaacctatgtgcttcgtgaggtcattgcttagagtacaactgctaccaagaacattccctgcaaactcttttgtgatcagtttcttcccttctctcatataccctctgcaggtctaccaattgcattttgagagctcagataagcagagagcaatgcaatttgtcacagaaggatgattatgtatatgcactgtcatgtctatttccatgcctaactcaaaggagacacaaggagaaagtgagctcagcctggataaattggagattgtgatgacttctaggaagcctcaggaaagagaaacaaagacaacactggcctgctgctctctgcaatggtgggacccttgtgggataactgttttaggaatgaaggtgtctaccctctctagaaatgaaaatgcaagtttggctgtggttaagtattggatggaggcaaaaagaaactgacatattttcttcttttcaattgtttgattcaccctgaagggcatggctgcttaatttttttctccagagataggtggacagataaagacaggaaagtaacatccacagactgccctctgtgaaggtgacagtgatgaaaggaatgcttgatctgaacactggtaaataaagtgaccgcatatttccctagccaggagagcaatctggctcaaaagaaacgagaacaatgacattactgccaggctgctcctaagcctttggctattctgttcagtgcacaaaaaaaagcagtgaacatagctgtgacctgccttgttggtagtatcacaattctttggggctccactttaagaaattgagacctacctaccttaatccttggggggttaagctttcagactggaatgataactgaactattcatttgcagtaattctgggttttgtgcatattttaaaaaggaataccgggcttgcctatattcattacaacgtcctcccagctttcaaatcttccaatacaatgcctcttctctagtcttttaagcacatcctgtgactggatatgattatgggagatttacatgcatccttgtctattgtatcaaaagatcagggaataaaatgcccatcattaaaaccccaaagtgattggattggcatgaggaatggggatggggctggcatggaagagagggttctgactctgagatttcatgaaatgcaaaacaataggacagctgctcttccataaacagattattattattatttctacctagacagcttgatagcagccattatcttctttctgggtgtcttatcaagttccggctgtgtgcagcatgggtgataaggaaagagaaatgtcacccatgggattgccaaggattatttctatgcactgctgttcagcaacagccaatctctcagaactgagaagaagtcctattgttcacgctgggcagttgctattctgactatcccaagagagcagaaaagggatgtagttgccattgtgcaaaagattgatatttcattactctcagctaaagttctgaaaagcagaatcatcatgaaatatctttgaagagagaaaagacaagggaagaaaagaagaacgaaatgagttcagagctttttagaactgtgagggagtgcgaaaaaagaaaggtgtaatactttcaaacagtggaagttaaaatgccaggcgtgtaagcctcagtgaaattgagcagcatcacgtcaccacgacttgtggtccagctgtttattgcaaagactccatcctgcgttactcatcagaaaatagttaactttgtatctggcattattttaattaaaaaaaaagttaacttact

SEQ ID NO: 140312 - protein, 1359 aa, Artificial Sequence
  derived and/or modified sequence
MLDPSSSEEESDEIVEEESGKEVLGSAPSGARLSPSRTSEGSAGSAGLGGGGAGAGAGVGAGGGGGSGASSGGGAGGLQPSSRAGGGRPSSPSPSVVSEKEKEELERLQKEEEERKKRLQLYVFVMRCIAYPFNAKQPTDMARRQQKISKQQLQTVKDRFQAFLNGETQIMADEAFMNAVQSYYEVFLKSDRVARMVQSGGCSANDSREVFKKHIEKRVRSLPEIDGLSKETVLSSWMAKFDAIYRGEEDPRKQQARMTASAASELILSKEQLYEMFQNILGIKKFEHQLLYNACQLDNPDEQAAQIRRELDGRLQMADQIARERKFPKFVSKEMENMYIEELKSSVNLLMANLESMPVSKGGEFKLQKLKRSHNASIIDMGEESENQLSKSDVVLSFSLEVVIMEVQGLKSLAPNRIVYCTMEVEGGEKLQTDQAEASKPTWGTQGDFSTTHALPAVKVKLFTESTGVLALEDKELGRVILHPTPNSPKQSEWHKMTVSKNCPDQDLKIKLAVRMDKPQNMKHSGYLWAIGKNVWKRWKKRFFVLVQVSQYTFAMCSYREKKAEPQELLQLDGYTVDYTDPQPGLEGGRAFFNAVKEGDTVIFASDDEQDRILWVQAMYRATGQSHKPVPPTQVQKLNAKGGNVPQLDAPISQFYADRAQKHGMDEFISSNPCNFDHASLFEMVQRLTLDHRLNDSYSCLGWFSPGQVFVLDEYCARNGVRGCHRHLCYLRDLLERAENGAMIDPTLLHYSFAFCASHVHGNRPDGIGTVTVEEKERFEEIKERLRVLLENQITHFRYCFPFGRPEGALKATLSLLERVLMKDIVTPVPQEEVKTVIRKCLEQAALVNYSRLSEYAKIEANSCTTENVGRLITPAKKLEDTIRLAELVIEVLQQNEEHHAEPHVDKGEAFAWWSDLMVEHAETFLSLFAVDMDAALEVQPPDTWDSFPLFQLLNDFLRTDYNLCNGKFHKHLQDLFAPLVVRYVDLMESSIAQSIHRGFERESWEPVKSLTSNLPNVNLPNVNLPKVPNLPVNIPLGIPQMPTFSAPSWMAAIYDADNGSGTSEDLFWKLDALQTFIRDLHWPEEEFGKHLEQRLKLMASDMIESCVKRTRIAFEVKLQKTSRSTDFRVPQSICTMFNVMVDAKAQSTKLCSMEMGQEKYKKMRHQYHSKIDELIEETVKEMITLLVAKFVTILEGVLAKLSRYDEGTLFSSFLSFTVKAASKYVDVPKPGMDVADAYVTFVRHSQDVLRDKVNEEMYIERLFDQWYNSSMNVICTWLTDRMDLQLHIYQLKTLIRMVKKTYRDFRLQGVLDSTLNSKTYETIRNRLTVEEATASVSEGGGLQGISMKDSDEEDEEDD

SEQ ID NO: 140313 - protein, 1353 aa, Artificial Sequence
  derived and/or modified sequence
MLDPSSSEEESDEIVEEESGKEVLGSAPSGARLSPSRTSEGSAGSAGLGGGGAGAGAGVGAGGGGGSGASSGGGAGGLQPSSRAGGGRPSSPSPSVVSEKEKEELERLQKEEEERKKRLQLYVFVMRCIAYPFNAKQPTDMARRQQKISKQQLQTVKDRFQAFLNGETQIMADEAFMNAVQSYYEVFLKSDRVARMVQSGGCSANDSREVFKKHIEKRVRSLPEIDGLSKETVLSSWMAKFDAIYRGEEDPRKQQARMTASAASELILSKEQLYEMFQNILGIKKFEHQLLYNACQLDNPDEQAAQIRRELDGRLQMADQIARERKFPKFVSKEMENMYIEELKSSVNLLMANLESMPVSKGGEFKLQKLKRSHNASIIDMGEESENQLSKSDVVLSFSLEVVIMEVQGLKSLAPNRIVYCTMEVEGGEKLQTDQAEASKPTWGTQGDFSTTHALPAVKVKLFTESTGVLALEDKELGRVILHPTPNSPKQSEWHKMTVSKNCPDQDLKIKLAVRMDKPQNMKHSGYLWAIGKNVWKRWKKRFFVLVQVSQYTFAMCSYREKKAEPQELLQLDGYTVDYTDPQPGLEGGRAFFNAVKEGDTVIFASDDEQDRILWVQAMYRATGQSHKPVPPTQVQKLNAKGGNVPQLDAPISQFYADRAQKHGMDEFISSNPCNFDHASLFEMVQRLTLDHRLNDSYSCLGWFSPGQVFVLDEYCARNGVRGCHRHLCYLRDLLERAENGAMIDPTLLHYSFAFCASHVHGNRPDGIGTVTVEEKERFEEIKERLRVLLENQITHFRYCFPFGRPEGALKATLSLLERVLMKDIVTPVPQEEVKTVIRKCLEQAALVNYSRLSEYAKIEENQKDAENVGRLITPAKKLEDTIRLAELVIEVLQQNEEHHAEPHVDKGEAFAWWSDLMVEHAETFLSLFAVDMDAALEVQPPDTWDSFPLFQLLNDFLRTDYNLCNGKFHKHLQDLFAPLVVRYVDLMESSIAQSIHRGFERESWEPVKSLTSNLPNVNLPNVNLPKVPNLPVNIPLGIPQMPTFSAPSWMAAIYDADNGSGTSEDLFWKLDALQTFIRDLHWPEEEFGKHLEQRLKLMASDMIESCVKRTRIAFEVKLQKTSRSTDFRVPQSICTMFNVMVDAKAQSTKLCSMEMGQEHQYHSKIDELIEETVKEMITLLVAKFVTILEGVLAKLSRYDEGTLFSSFLSFTVKAASKYVDVPKPGMDVADAYVTFVRHSQDVLRDKVNEEMYIERLFDQWYNSSMNVICTWLTDRMDLQLHIYQLKTLIRMVKKTYRDFRLQGVLDSTLNSKTYETIRNRLTVEEATASVSEGGGLQGISMKDSDEEDEEDD

SEQ ID NO: 140314 - DNA, 4080 bp, Artificial Sequence
  derived and/or modified sequence
atgctggaccccagtagctctgaggaagaaagtgacgaaattgtcgaggaggagtcaggtaaagaagtgctgggaagcgctcccagcggggcgcgcctgtctcccagtcgcaccagcgaaggatctgcaggttcagcaggcctcggtgggggaggagcgggggccggggccggcgtaggggcgggcggcggtggtggatctggggccagctccggcgggggggctggcggcctccagccatctagcagagcaggagggggcagaccttcaagcccctccccatcagtggtctctgagaaggagaaggaagagttggaacgcctgcagaaagaagaagaggaacgcaagaaaagactacagctgtatgtctttgtgatgcgctgcattgcataccctttcaatgctaaacagccaaccgatatggccaggcgacagcagaaaatcagtaaacagcaactgcagacggtgaaggaccgctttcaggcgttcctcaacggcgagacgcaaatcatggctgatgaggccttcatgaatgctgtgcagagttattacgaggtcttcctgaagtccgatcgtgtagcgcggatggttcaaagtggtggctgctcagccaatgacagcagagaggtttttaaaaaacatatcgagaaaagggttcgctctttgcctgaaatcgacggtctgtcaaaggagacagttctgagttcgtggatggccaaatttgatgctatttatcgcggagaagaggatccacggaagcagcaagctcgcatgaccgcgtcagcagcttctgagcttatcctctcaaaagaacaactgtacgagatgtttcagaatattctgggtatcaagaagtttgagcaccagctcttgtacaatgcctgccagctggataaccccgacgaacaagctgcgcagattcggcgggagctggatgggcgtctgcaaatggcagatcaaattgcacgtgagcgcaagtttcctaaattcgtctccaaggagatggaaaatatgtacatcgaagagctgaagagctcggtcaacttactgatggccaatctggagtctatgcctgtcagcaaagggggggaatttaaactgcagaaacttaaacgaagccataatgctagcatcatcgatatgggcgaggagtcggaaaaccagttgagcaaatcggacgtggtgctgtccttctcccttgaggtcgtgatcatggaggtccagggcctcaagagtcttgccccgaaccgcattgtgtactgtacaatggaggtggaggggggagaaaaactgcagaccgaccaagctgaagcaagcaaacctacctggggaacccagggtgatttctccaccacccatgccctccccgccgtcaaagttaaactgttcactgaatcaaccggcgttctcgcactggaggacaaagagctggggcgtgtgatcttgcaccccaccccaaacagtccgaaacagagcgaatggcacaagatgacagttagcaagaattgtcccgaccaggacctcaaaatcaaacttgctgtgagaatggacaagccccaaaacatgaaacactcaggctatctttgggcgatcggcaagaatgtttggaagcggtggaaaaaacggttttttgtgttagttcaggtgtctcaatatacatttgccatgtgtagttacagggagaagaaagccgagccacaggaactgctgcagctcgacggttatacagtagactatacggatccacagccagggctagaaggtggacgcgctttttttaacgctgtgaaggagggagacaccgtcatttttgcttctgatgacgagcaggaccgaatactttgggtacaggccatgtaccgcgccactggacaaagccataagcctgtgccccccacgcaggttcagaagttgaacgccaaaggcggcaatgtgcctcagctagatgccccgattagccagttttatgctgaccgcgcccagaagcacgggatggacgagtttatttcatctaatccatgcaactttgatcacgctagcctctttgagatggtgcaacgtttgaccctcgatcaccgcctgaacgattcatactcctgcttaggatggttcagccccgggcaagtttttgtgttggacgaatattgtgcacggaatggagttcggggatgccacagacatctctgctatctcagggacctcctagaacgagctgagaatggggcaatgatagatcctaccctgttgcactattccttcgctttttgtgcatcccacgtccacggcaatagacccgacggaattggtactgtcactgttgaagagaaggaacgttttgaggaaatcaaggaacggttgagggtgcttcttgaaaaccagataacccacttcagatactgctttcccttcggccggcccgaaggcgcgcttaaggcaaccctgtccctcctggaacgagtgttaatgaaagacatcgttactcccgttccccaggaagaagttaagactgtaatacgaaagtgccttgagcaggctgccctcgtgaactatagtcgcctctctgaatatgccaagatcgaggctaacagctgtacgacagagaatgtcgggcgcctgatcactcccgctaaaaagctcgaagataccattcggttagctgagctggtcatcgaggtgctgcaacagaacgaagagcatcacgccgagccacatgtggataaaggcgaagccttcgcttggtggtctgacctgatggtcgaacatgctgagacctttctttccctatttgccgttgacatggacgctgccttggaagtacagccccctgatacctgggacagtttccccctttttcagttactcaacgacttcctgaggaccgactataatttgtgcaacggcaagttccataagcacctgcaggatctgttcgcccctttggtcgttaggtacgtcgacctgatggagagcagcatcgcacagtctatccacagaggtttcgaacgcgagtcttgggagcctgttaagtctttgactagcaatcttccaaatgtgaatctccccaacgtaaacctgcccaaagtgcccaatctacctgtcaacataccactgggcataccccagatgcctactttctccgccccctcctggatggcggcaatctacgacgcggataatggctctggcactagcgaagatctgttttggaagctggatgctcttcagacatttatcagggatcttcactggccagaagaagaatttggaaagcacctggagcaacgcctaaagttaatggcctccgacatgatcgaaagctgtgtgaaacggacacggatcgccttcgaggtgaagctgcaaaagacgagccgcagtaccgattttcgggtgcctcagagtatttgcaccatgtttaacgttatggtcgacgccaaggctcaaagcaccaagctgtgctccatggagatgggccaggagaagtacaagaaaatgaggcatcagtaccatagcaaaatagacgagctgattgaagaaaccgtgaaggagatgattacactcttggttgcaaaattcgtgaccatcctcgagggggtactcgcaaaactctctcggtatgacgagggcaccctgttcagcagcttcttaagctttactgtaaaagcagccagtaaatacgtggacgtccctaagcctggtatggatgtcgccgatgcttacgtcacctttgtgaggcacagccaagacgtcctccgagataaagtcaatgaagaaatgtacatcgaaaggctgtttgaccagtggtacaactctagcatgaacgtgatttgcacctggcttactgatcggatggatctccaattgcacatttatcagttaaagacactcatcagaatggtgaaaaagacatatcgcgatttccggcttcagggagtgctagattccacccttaattcgaagacctatgagacaatccgcaaccgtctgactgtggaggaagccactgcctcagtctcggaaggaggcggcctgcagggcatttccatgaaagacagtgatgaagaggatgaggaggatgactag

SEQ ID NO: 140315 - DNA, 4062 bp, Artificial Sequence
  derived and/or modified sequence
atgctggacccctcctcctccgaagaggaaagcgatgaaatcgttgaagaagagtccggaaaggaggtcctgggaagcgctccaagtggagcccggctcagcccctccaggacaagcgagggcagcgcaggttccgctggactagggggagggggggctggagcaggcgccggagtgggcgcgggtggaggcggcggctccggtgcgagctctggagggggggccggcggcttgcagccttcctcccgtgcaggcgggggcaggccctccagcccaagcccgtccgtcgtttctgaaaaggagaaggaagagctggaacggctgcagaaagaagaagaagagagaaagaaacggctacagctgtatgtttttgtgatgcgctgtatcgcttaccctttcaacgccaaacaacctaccgatatggcaagaaggcagcagaaaattagcaaacagcaactgcagactgtgaaggaccggttccaagcgttcttgaacggcgagacacagattatggcggacgaagcttttatgaacgcagtgcagagctattacgaagtctttttaaagtcagaccgagtggcgaggatggtgcaatcaggtggctgcagcgccaacgattcccgggaagtattcaaaaaacatatagagaaacgggtaaggtcactgcccgagatagacggcctgagtaaagagactgtgctgtcgtcctggatggcaaaattcgatgcgatctaccggggggaggaggatcctcgaaagcagcaggccaggatgaccgcatccgccgctagcgaactaatcttatcaaaggagcagctatacgaaatgtttcagaatattctgggcattaaaaaatttgagcaccagttgctctacaatgcatgtcagctcgataatccggatgagcaagcagcacagattcgccgcgagctggatgggcggctgcaaatggcagaccaaatcgcgagggagcggaaatttccaaaatttgtgagtaaagagatggagaatatgtatatcgaggaactcaaatccagcgtcaacctgcttatggctaatctggagtccatgccggtcagtaagggaggcgaatttaagctgcaaaagctgaagagatctcacaatgcctctattatcgacatgggcgaggagagcgagaaccaacttagcaagagcgatgttgtgctgtctttcagtcttgaagtggtgatcatggaggtgcagggacttaagtccctggctccgaacaggattgtctattgtacgatggaagtggagggtggtgaaaagctgcaaacagatcaggccgaggcatcaaagcccacctgggggacacagggagatttctccaccacgcacgccctgcctgccgtgaaggtgaaactgttcactgagtccaccggggtcctcgcactggaggacaaggagttgggacgcgtaattctacaccctaccccaaacagtcctaagcagtctgaatggcataagatgacagttagtaaaaactgtcccgatcaggacctcaaaataaaactggccgtgcgcatggacaaaccccaaaacatgaaacactctggatacctgtgggccatcggaaagaacgtttggaagaggtggaagaaaagattttttgtgctcgtgcaggtgtcacaatatacatttgctatgtgtagttatcgggagaagaaggctgaacctcaggaactcttgcaactagatggctatacagtggactacactgatcctcagccagggctggaaggtggacgggcctttttcaacgctgttaaagaaggcgacactgtgatatttgcaagcgacgatgagcaggatcggattctttgggtgcaagccatgtatcgcgccaccggccaatcacacaaacccgtgcccccaacccaggtgcagaagctgaacgctaaaggaggtaatgtgccgcagctggacgcgccaatatcccagttctacgcggatagagcccagaagcacggaatggatgagttcattagcagcaatccctgcaacttcgatcacgcttcactctttgaaatggtgcagcgtctgaccctagatcacaggctcaatgattcttatagctgtttaggttggtttagccctggccaagtgtttgtgctagacgagtattgcgctaggaatggggtgagagggtgtcatcgacacctttgttatctccgggacctgctggagagagcagagaacggggctatgattgatccaacactcctacactactcttttgcattctgcgcaagtcatgttcatggaaataggcctgacggcattggaacggtgaccgtggaggagaaagagaggttcgaggaaattaaggagcgactgcgcgtgctgctcgagaaccagatcacgcacttcaggtattgttttccattcggacggcctgaaggagctcttaaggctactttgtccttactggaacgcgtgcttatgaaagacatcgtgacacccgtccctcaagaggaggtgaaaactgtgataagaaaatgcctcgaacaggcagccctcgtgaattactcccgcctcagcgaatatgctaagattgaagagaaccagaaagacgccgagaacgtggggaggctcataacacctgcaaaaaaactggaggacactatcagactcgcagaactggttatcgaggtcttgcagcagaacgaggagcaccatgcggagccacacgtggataagggggaggcctttgcctggtggtccgatttaatggtcgagcatgctgagacgttcctctcactgtttgctgtggatatggatgctgcactcgaagtgcagcccccagacacctgggactctttccccttgtttcagctgctaaacgatttcctgcggactgattacaatttgtgcaatggaaagttccacaaacacctccaggatctgttcgcccctctggtcgtgaggtacgtggaccttatggaatcctctatcgcccagtccatacacagagggttcgagagggagtcatgggagcccgtaaagtcccttactagcaacctgcccaatgtaaatttgcctaatgtgaatcttcctaaggtgcccaacctacccgtcaacatccccttgggaattccccagatgcccactttctctgctcccagctggatggcggcgatctatgatgccgataacggctcagggaccagtgaagatctgttctggaaactcgatgcgctgcagacattcatcagggatttacattggcctgaagaggaatttgggaaacacttggagcagaggctcaaactgatggctagcgacatgatagaatcctgtgtgaagcgcacaaggatcgctttcgaggtgaaactccaaaagacttccaggtcaaccgatttcagggtcccccagtcaatttgcacgatgtttaacgttatggtcgacgccaaggctcagtccaccaagctgtgctcaatggaaatgggccaggaacaccagtaccactctaagattgatgaactcatagaggaaaccgtgaaggagatgattaccctgctggttgctaaatttgtcactattttggagggggtgttggccaagctgtctcgatacgatgagggaactctgttctcatctttcctctcctttactgttaaggccgcatccaagtacgtagatgttccaaaaccaggcatggatgtagcggatgcatatgtaacttttgttaggcattcacaggatgtccttagagacaaagtgaatgaggagatgtacatcgaaaggctctttgaccagtggtacaactcctctatgaatgtgatctgtacttggctgactgataggatggacctgcagctgcacatttaccagctcaagaccctgatacggatggttaaaaagacctatagagactttcgcctccagggcgtcttggactctaccttaaactcaaagacatacgagacaattcgcaaccggctgaccgtggaagaagccaccgcctccgtcagcgagggcggaggtctgcaggggatctcaatgaaggattccgatgaggaggacgaagaggacgactag

SEQ ID NO: 140316 - DNA, 4080 bp, Artificial Sequence
  derived and/or modified sequence
atgctggaccccagcagcagcgaggaggagagtgatgagatcgtggaggaggagagcggcaaggaggtgctgggcagcgcccccagcggggcccggctgagccccagcaggaccagcgagggcagcgctggcagcgctggcctgggcggcggcggggccggggccggggccggcgtgggcgccggcggcggcggcggcagcggggccagcagcggcggcggggccggcggcctgcagcccagcagccgggccggcggcggccggcccagcagccccagccccagcgtggtgtctgagaaggagaaggaggagctggagcggctgcagaaggaggaggaggagaggaagaagaggctgcagctgtatgtgtttgtgatgcgctgcatcgcctaccccttcaatgccaagcagcccacagacatggcccggcggcagcagaagatcagcaagcagcagctgcagacagtgaaggaccgcttccaggccttcctgaatggagagacccagatcatggctgatgaggccttcatgaatgctgtgcagagctactatgaggtgttcctgaagagtgacagagtggccaggatggtgcagagcggcggctgcagcgccaatgacagccgggaggtgttcaagaagcacatcgagaagagggtgcgcagcctgcctgagattgatggcctgagcaaggagaccgtgctgagctcctggatggccaagtttgatgccatctacagaggagaggaggaccccaggaagcagcaggccaggatgacagccagcgctgccagcgagctgatcctgagcaaggagcagctgtatgagatgttccagaacatcctgggcatcaagaagtttgagcaccagctgctgtacaatgcctgccagctggacaacccagatgagcaggccgcccagatccggcgggagctggatggccgcctgcagatggctgaccagatcgcccgggagaggaagttccccaagtttgtgtccaaggagatggagaacatgtacatcgaggagctgaagagctctgtgaacctgctgatggccaacctggagagcatgcctgtgtccaaaggaggagagttcaagctgcagaagctgaagaggagccacaatgccagcatcatcgacatgggagaggagagcgagaaccagctgagcaagagtgatgtggtgctgtccttcagcctggaggtggtgatcatggaggtgcagggcctgaagagcctggcccccaaccgcatcgtgtactgcaccatggaggtggagggcggggagaagctgcagacagaccaggccgaggccagcaagcccacctggggcacccagggcgacttcagcaccacccacgccctgcctgctgtgaaggtgaagctgttcacagagagcactggagtgctggccctggaggacaaggagctgggccgggtcatcctgcaccccacccccaacagccccaagcagagcgagtggcacaagatgacagtgtccaagaactgcccagaccaggacctgaagatcaagctggccgtgaggatggacaagccccagaacatgaagcacagcggctacctgtgggccatcggcaagaatgtgtggaagcgctggaagaagcgcttctttgtgctggtgcaggtgtcccagtacacctttgccatgtgcagctaccgggagaagaaggccgagccccaggagctgctgcagctggatggctacacagtggactacacagacccccagcccggcctggagggcggccgggccttcttcaatgctgtgaaggagggggacaccgtcatctttgccagtgatgatgagcaggaccgcatcctgtgggtgcaggccatgtaccgggccaccggccagagccacaagcctgtgccccccacccaggtgcagaagctgaatgccaagggcggcaatgtgccccagctggatgcccccatcagccagttctatgctgaccgggcccagaagcacggcatggatgagttcatcagcagcaacccctgcaactttgaccacgccagcctgtttgagatggtgcagaggctgaccctggaccaccggctgaatgacagctacagctgcctgggctggttcagccctggccaggtgtttgtgctggatgagtactgtgccagaaatggagtgcggggctgccaccgccacctgtgctacctgcgggacctgctggagcgggcagaaaatggagccatgattgaccccaccctgctgcactacagctttgccttctgtgccagccacgtgcacggcaacagaccagatggcatcggcaccgtgacagtggaggagaaggagagatttgaggagatcaaggagcggctgcgggtgctgctggagaaccagatcacccacttccgctactgcttccccttcggccggcctgagggcgccctgaaggccaccctgagcctgctggagcgggtgctgatgaaggacatcgtgacccctgtgccccaggaggaggtgaagacagtcatcaggaagtgcctggagcaggccgccctggtgaactacagccggctgtctgaatatgccaagattgaggccaacagctgcaccacagaaaatgtgggccgcctcatcaccccagccaagaagctggaggacaccatccggctggccgagctggtgattgaggtgctgcagcagaatgaggagcaccacgccgagccccacgtggacaagggggaggcctttgcctggtggagcgacctgatggtggagcacgccgagaccttcctgagcctgtttgctgtggacatggatgctgccctggaggtgcagcccccagacacctgggacagcttccccctcttccagctgctgaatgacttcctgaggacagactacaacctgtgcaatggcaagttccacaagcacctgcaggacctgtttgcccccctggtggtgcgctacgtggacctgatggagagcagcatcgcccagagcatccaccggggctttgagcgggagagctgggagcctgtgaagagcctgaccagcaacctgcccaacgtgaacctgcccaacgtgaacctgcccaaggtgcccaacctgcctgtgaacatccccctgggcatcccccagatgcccaccttcagcgcccccagctggatggccgccatctatgatgctgacaatggaagtggcaccagtgaagatctcttctggaagctggatgccctgcagaccttcatccgggacctgcactggccagaggaggagtttgggaagcacctggagcagaggctgaagctgatggccagtgacatgattgagagctgtgtgaagaggaccagaattgcctttgaggtgaagctgcagaagaccagccgcagcacagacttccgggtgccccagagcatctgcaccatgtttaatgtgatggtggatgccaaggcccagagcaccaagctgtgcagcatggagatgggccaggagaagtacaagaagatgaggcaccagtaccacagcaagattgatgagctgattgaggagaccgtgaaggagatgatcaccctgctggtggccaagtttgtgaccatcctggagggcgtgctggccaagctgagccgctatgatgagggcaccctcttcagcagcttcctgtccttcaccgtgaaggccgccagcaaatatgtggatgtgcccaagccaggcatggatgtggctgatgcctacgtgacctttgtgcgccacagccaggatgtgctgcgggacaaggtgaatgaggagatgtacatcgagcggctgtttgaccagtggtacaacagctccatgaatgtcatctgcacctggctgacagacaggatggacctgcagctgcacatctaccagctgaagaccctcatccgcatggtgaagaagacctacagagacttccggctgcagggcgtgctggacagcaccctgaacagcaagacctatgagaccatccggaaccggctgactgtggaggaggccacagcctctgtgtctgagggcggcggcctgcagggcatctccatgaaggacagtgatgaggaggatgaagaagatgactag

SEQ ID NO: 140317 - DNA, 4062 bp, Artificial Sequence
  derived and/or modified sequence
atgctggaccccagcagcagcgaggaggagagtgatgagatcgtggaggaggagagcggcaaggaggtgctgggcagcgcccccagcggggcccggctgagccccagcaggaccagcgagggcagcgctggcagcgctggcctgggcggcggcggggccggggccggggccggcgtgggcgccggcggcggcggcggcagcggggccagcagcggcggcggggccggcggcctgcagcccagcagccgggccggcggcggccggcccagcagccccagccccagcgtggtgtctgagaaggagaaggaggagctggagcggctgcagaaggaggaggaggagaggaagaagaggctgcagctgtatgtgtttgtgatgcgctgcatcgcctaccccttcaatgccaagcagcccacagacatggcccggcggcagcagaagatcagcaagcagcagctgcagacagtgaaggaccgcttccaggccttcctgaatggagagacccagatcatggctgatgaggccttcatgaatgctgtgcagagctactatgaggtgttcctgaagagtgacagagtggccaggatggtgcagagcggcggctgcagcgccaatgacagccgggaggtgttcaagaagcacatcgagaagagggtgcgcagcctgcctgagattgatggcctgagcaaggagaccgtgctgagctcctggatggccaagtttgatgccatctacagaggagaggaggaccccaggaagcagcaggccaggatgacagccagcgctgccagcgagctgatcctgagcaaggagcagctgtatgagatgttccagaacatcctgggcatcaagaagtttgagcaccagctgctgtacaatgcctgccagctggacaacccagatgagcaggccgcccagatccggcgggagctggatggccgcctgcagatggctgaccagatcgcccgggagaggaagttccccaagtttgtgtccaaggagatggagaacatgtacatcgaggagctgaagagctctgtgaacctgctgatggccaacctggagagcatgcctgtgtccaaaggaggagagttcaagctgcagaagctgaagaggagccacaatgccagcatcatcgacatgggagaggagagcgagaaccagctgagcaagagtgatgtggtgctgtccttcagcctggaggtggtgatcatggaggtgcagggcctgaagagcctggcccccaaccgcatcgtgtactgcaccatggaggtggagggcggggagaagctgcagacagaccaggccgaggccagcaagcccacctggggcacccagggcgacttcagcaccacccacgccctgcctgctgtgaaggtgaagctgttcacagagagcactggagtgctggccctggaggacaaggagctgggccgggtcatcctgcaccccacccccaacagccccaagcagagcgagtggcacaagatgacagtgtccaagaactgcccagaccaggacctgaagatcaagctggccgtgaggatggacaagccccagaacatgaagcacagcggctacctgtgggccatcggcaagaatgtgtggaagcgctggaagaagcgcttctttgtgctggtgcaggtgtcccagtacacctttgccatgtgcagctaccgggagaagaaggccgagccccaggagctgctgcagctggatggctacacagtggactacacagacccccagcccggcctggagggcggccgggccttcttcaatgctgtgaaggagggggacaccgtcatctttgccagtgatgatgagcaggaccgcatcctgtgggtgcaggccatgtaccgggccaccggccagagccacaagcctgtgccccccacccaggtgcagaagctgaatgccaagggcggcaatgtgccccagctggatgcccccatcagccagttctatgctgaccgggcccagaagcacggcatggatgagttcatcagcagcaacccctgcaactttgaccacgccagcctgtttgagatggtgcagaggctgaccctggaccaccggctgaatgacagctacagctgcctgggctggttcagccctggccaggtgtttgtgctggatgagtactgtgccagaaatggagtgcggggctgccaccgccacctgtgctacctgcgggacctgctggagcgggcagaaaatggagccatgattgaccccaccctgctgcactacagctttgccttctgtgccagccacgtgcacggcaacagaccagatggcatcggcaccgtgacagtggaggagaaggagagatttgaggagatcaaggagcggctgcgggtgctgctggagaaccagatcacccacttccgctactgcttccccttcggccggcctgagggcgccctgaaggccaccctgagcctgctggagcgggtgctgatgaaggacatcgtgacccctgtgccccaggaggaggtgaagacagtcatcaggaagtgcctggagcaggccgccctggtgaactacagccggctgtctgaatatgccaagattgaggagaaccagaaggatgctgaaaatgtgggccgcctcatcaccccagccaagaagctggaggacaccatccggctggccgagctggtgattgaggtgctgcagcagaatgaggagcaccacgccgagccccacgtggacaagggggaggcctttgcctggtggagcgacctgatggtggagcacgccgagaccttcctgagcctgtttgctgtggacatggatgctgccctggaggtgcagcccccagacacctgggacagcttccccctcttccagctgctgaatgacttcctgaggacagactacaacctgtgcaatggcaagttccacaagcacctgcaggacctgtttgcccccctggtggtgcgctacgtggacctgatggagagcagcatcgcccagagcatccaccggggctttgagcgggagagctgggagcctgtgaagagcctgaccagcaacctgcccaacgtgaacctgcccaacgtgaacctgcccaaggtgcccaacctgcctgtgaacatccccctgggcatcccccagatgcccaccttcagcgcccccagctggatggccgccatctatgatgctgacaatggaagtggcaccagtgaagatctcttctggaagctggatgccctgcagaccttcatccgggacctgcactggccagaggaggagtttgggaagcacctggagcagaggctgaagctgatggccagtgacatgattgagagctgtgtgaagaggaccagaattgcctttgaggtgaagctgcagaagaccagccgcagcacagacttccgggtgccccagagcatctgcaccatgtttaatgtgatggtggatgccaaggcccagagcaccaagctgtgcagcatggagatgggccaggagcaccagtaccacagcaagattgatgagctgattgaggagaccgtgaaggagatgatcaccctgctggtggccaagtttgtgaccatcctggagggcgtgctggccaagctgagccgctatgatgagggcaccctcttcagcagcttcctgtccttcaccgtgaaggccgccagcaaatatgtggatgtgcccaagccaggcatggatgtggctgatgcctacgtgacctttgtgcgccacagccaggatgtgctgcgggacaaggtgaatgaggagatgtacatcgagcggctgtttgaccagtggtacaacagctccatgaatgtcatctgcacctggctgacagacaggatggacctgcagctgcacatctaccagctgaagaccctcatccgcatggtgaagaagacctacagagacttccggctgcagggcgtgctggacagcaccctgaacagcaagacctatgagaccatccggaaccggctgactgtggaggaggccacagcctctgtgtctgagggcggcggcctgcagggcatctccatgaaggacagtgatgaggaggatgaagaagatgactag

SEQ ID NO: 140318 - DNA, 4080 bp, Artificial Sequence
  derived and/or modified sequence
atgctggaccccagcagcagcgaggaggagagcgacgagatcgtggaggaagagtctggaaaggaagttctggggagcgcaccttccggtgcaaggttgtcccccagtcggacctctgaagggagcgcgggcagtgctggacttggaggaggcggtgctggagcaggcgccggggtcggggcaggcggaggtggcggcagcggcgcgtcctccggcggaggtgccggcgggctgcagccatccagtcgtgcaggcgggggtcgcccttccagcccgtctccgtcggtggtgagtgagaaagaaaaagaagaattagaacgcctgcaaaaagaggaggaggaaagaaagaaacgcttgcaactgtatgtgtttgtaatgagatgtatcgcatatccctttaatgcaaagcaacccacggacatggctcgaaggcagcaaaagatttccaagcagcaactccagacagtcaaggacaggttccaagccttcctgaacggggagactcagataatggccgacgaagcttttatgaacgccgtgcagtcctactacgaagtattccttaagtctgatagggtcgcaaggatggtccagagcgggggctgttccgcaaatgacagcagagaggtgttcaaaaagcacatcgaaaaaagagttcggagcctccccgagattgatgggctctcaaaggaaaccgttctgtcttcttggatggcgaagttcgacgcgatttataggggcgaagaggatcctagaaagcagcaggcgcgaatgacggcatctgccgcgtccgagctcatcctgagcaaagaacagctctacgaaatgttccagaatattctcggtatcaaaaaatttgagcatcaattattatacaatgcctgtcaactcgataacccagacgagcaagctgctcagatacggcgagagcttgatggacgattgcagatggctgaccaaatcgcgagggagcgtaagttcccgaagtttgtgtccaaagaaatggaaaacatgtatatcgaggaattgaagtcttccgtcaacctgctaatggccaacctagagagtatgcccgtgagcaagggaggtgagttcaagctccagaagctgaagcgcagtcacaacgctagcataatcgacatgggcgaggagtcagagaaccagctctccaaatctgatgtcgtgctgtctttttccctagaggtcgttatcatggaggtgcaagggctcaagtctttagctcctaaccggatcgtttactgtaccatggaggtggaaggaggagaaaaactccaaactgatcaggcagaggctagcaagccaacatggggaacccagggggacttcagcacaacccatgcgttgccggctgtcaaagtgaagctcttcacagagtccacgggcgttctggccctcgaagacaaggaactgggtcgtgtgattttgcaccctactcccaactcaccaaagcaaagcgaatggcacaaaatgacagtgagcaagaattgtccagaccaggatctcaagatcaaactggcagtgaggatggataaaccccagaacatgaaacactccggatacctgtgggctattggtaagaatgtctggaagagatggaagaaacggttttttgttcttgtccaggtgtctcagtacacattcgcgatgtgctcatatcgcgaaaagaaggcagaacctcaggaactgttacagctggatgggtatacagtggattatacagatcctcagcctggcctggaagggggccgagccttttttaatgctgtgaaagagggcgacactgttatctttgcttcagatgacgagcaagatagaatactgtgggtgcaggcaatgtatcgggctacagggcagagccataaaccggtacccccaacccaagtgcagaaactaaacgctaaaggcggaaatgtgcctcagctggacgctccgataagtcagttctacgcagatcgggcgcaaaagcacggcatggacgagttcatctcttcaaacccttgcaattttgaccacgcctcccttttcgagatggtacaacgcctgacgttagaccatcggctgaacgactcatactcgtgcctaggatggtttagtcccgggcaggtcttcgttcttgatgagtactgtgcgcggaacggagtcagggggtgccaccgacatctgtgttatctgcgggacttactcgaacgcgctgagaatggcgcaatgatcgatccgaccctgttacattactccttcgccttctgcgccagtcatgtccacggtaaccgcccagacggcatagggaccgtgactgtcgaggaaaaggaacgcttcgaggagatcaaagagaggctgcgcgtgctgctggaaaatcagattacccactttagatattgttttcccttcggccgacccgaaggagccctcaaagccaccctttcgctccttgagcgcgttctcatgaaggatattgttacccctgtgcctcaggaggaggtcaagacagtaataagaaaatgtctggaacaggcagctctagtgaattatagtcgcttgtccgagtatgccaagatcgaggctaactcatgtaccacggaaaacgtcggacgcctgattacaccagcgaaaaaactggaagacaccatccggttagcggagcttgtaatcgaggtgctgcagcagaacgaggagcaccacgccgaacctcacgttgataagggcgaagcatttgcctggtggtccgatctcatggtagaacatgcagaaacatttctgtctttgtttgcagtggatatggacgccgctctcgaagtgcagcctcccgacacatgggattctttcccactgtttcaactcctgaacgattttctcaggactgattacaatttgtgtaatggtaaattccataagcacctgcaggatctgtttgctcccttggtcgtacgttacgtggatctcatggagagtagtatcgctcaatccatacatcgcggatttgaacgagagtcctgggaacctgttaaaagcttaactagtaatctgcccaatgttaacttgccaaacgtgaacctccccaaagtgcctaacctacctgtgaacattccgttagggatcccccagatgcccacgttttctgccccttcctggatggcagccatttatgatgctgacaacgggagcggtacctccgaggatttattctggaagttggatgcactgcagacttttatcagagaccttcactggccagaagaggagttcggaaagcacctggaacagagactaaaactcatggccagcgatatgatcgaatcttgtgtcaaacgtactagaattgcatttgaagtaaagttacaaaaaacttcgcggtccaccgattttagggtgccacagagcatttgcacaatgttcaatgtaatggtcgacgccaaagcccaaagcacgaagctctgtagtatggagatggggcaggaaaaatataagaaaatgcgacaccaatatcacagtaaaatcgatgaacttatagaagaaactgttaaggaaatgattacgcttctggtagcaaagtttgtcacaatcctggagggagtgctagctaaactctctcggtatgatgaagggaccctgttctctagttttctcagctttacagtgaaagccgcatcgaaatacgttgatgtgcccaagccagggatggatgttgccgatgcttatgtgacatttgtgcgccattcccaagatgtattacgggacaaagtgaacgaagagatgtacatcgagaggttattcgaccagtggtacaactccagcatgaacgtgatttgcacatggctgaccgatagaatggacctccagctccacatctaccagcttaagaccttaattcgtatggtgaaaaaaacatatcgtgattttcgactgcagggagttctagactcaaccctcaactcgaaaacttacgaaaccatcagaaatcgactaactgtcgaagaagccaccgcctctgtaagcgagggcggaggtcttcaaggcatatcaatgaaagactccgacgaggaggatgaggaagacgattag

SEQ ID NO: 140319 - DNA, 4062 bp, Artificial Sequence
  derived and/or modified sequence
atgctggaccccagcagcagcgaggaggagagcgacgagatcgtggaggaggaatccggaaaggaggtgctggggtcagccccttccggagctagactctcgcctagcagaacttccgaagggtccgctgggagtgccgggctcggcgggggcggggcaggggcaggagcgggagtgggcgctggaggtggcggaggatcaggggccagtagcggcggtggggctgggggtctgcaacccagttcaagggccggaggtggccgcccgagtagtccttctccctcggttgtgagcgagaaagaaaaggaggagctggagaggctgcaaaaggaggaggaggaacggaaaaaacgcctccagctgtatgtgtttgtaatgagatgcattgcctaccctttcaatgccaaacagccaaccgacatggcaaggaggcagcaaaagatctccaagcaacaacttcagaccgtaaaggaccgctttcaggcctttcttaatggtgagacccagatcatggcagacgaagcctttatgaacgctgtgcagagttattatgaagtgttcctgaaaagcgacagggtggcacgcatggtgcagtccggcggatgcagtgcgaatgattctagggaggtgtttaagaagcacatcgaaaaaagggtgcgtagcctccctgagatcgacggattgagtaaggagaccgtgctctccagctggatggcaaaattcgacgccatttatagaggtgaagaggatccaagaaaacagcaggctcggatgacagcttcagcagcctcggagctgatcttatctaaagaacagctgtatgagatgtttcagaatattctggggattaagaaattcgaacatcagttgttgtacaatgcctgtcagcttgataaccccgatgaacaggcagcccaaatcagacgcgaactggatggccggctgcagatggcggatcagatcgctcgggaaagaaagttcccgaagttcgtgtcaaaggaaatggagaatatgtatatcgaggagctaaagtcctcagttaacctcctaatggctaatcttgaaagcatgcccgttagtaaaggaggcgaattcaagttacagaaactgaaaagatctcacaatgccagcatcatagatatgggcgaagagagcgagaatcagctgtctaagtcagacgtcgttctctcattcagcctggaagtcgtcatcatggaggtgcaggggcttaagtcactggctcctaatagaatcgtctactgtactatggaagtggagggcggagaaaagctccagaccgaccaagcggaggcaagcaagcctacttggggcacacagggtgacttcagtacaacccacgcccttcccgccgtgaaagtcaaactttttacggaaagtacaggcgttttggctctggaggacaaggagcttggtcgggtgatcctacatccgacaccaaatagccccaagcaaagcgagtggcacaagatgaccgtgtccaagaattgcccggaccaggatctcaagattaaacttgccgtccgcatggataagccacaaaatatgaaacattccgggtatctgtgggcaatagggaaaaacgtatggaaacggtggaagaagcggtttttcgtactagtgcaggtctcccaatacacattcgctatgtgctcttacagagagaagaaagccgaacctcaagaactcttacagctggatggctataccgtcgattacacagatccacaacccgggctggagggaggcagagcatttttcaacgccgtcaaggagggagacactgttatcttcgcctccgatgacgagcaggacagaatcctgtgggttcaggcgatgtatcgggccaccggccagagccacaagcccgtcccacctacccaggtgcagaagcttaacgcaaaaggtggcaacgtaccacaattagacgccccgattagtcagttttatgctgaccgtgcacaaaaacacggtatggacgaatttattagttccaacccctgcaattttgaccacgcttctctcttcgaaatggtgcagcggctgacgttggaccaccggctgaatgattcctactcctgtctgggatggttctcacctgggcaggtctttgtcttggacgaatattgcgcacgcaacggagtgcgaggatgccatagacacctctgttatttgcgagacctactagagcgcgctgagaatggcgctatgatcgatcccactctactgcattattcatttgccttctgcgcctcacacgtccatgggaaccgacccgatggcatcggcacagtgaccgtggaggagaaagagagatttgaagagattaaggagcgtctccgggtccttctggagaaccagattacccatttccgctactgtttccccttcggcaggccagagggtgctctaaaggccactctctcactgcttgaacgcgttttgatgaaagacattgtcacccctgttccccaggaggaagtgaagacagtaattaggaagtgcctggagcaggccgccctggttaactactcaagacttagcgagtacgcgaaaattgaagagaatcagaaggatgccgagaatgtgggcagactgatcacccctgccaaaaagctggaagacaccatccgcttggccgaactggtgattgaagtattgcagcagaatgaggaacaccatgctgaaccgcacgtggacaagggagaggccttcgcatggtggtctgatctcatggtggagcatgccgaaacctttctgagcctgttcgccgtggacatggacgcagcccttgaggtgcaaccgccggatacatgggatagctttcctttgtttcaattactgaatgactttctgagaacggactacaatttatgcaacggcaaatttcacaagcatcttcaggatctttttgcccctttggtcgtaaggtacgttgacctgatggaatccagcatcgcccagtctatacatcggggattcgaacgagagtcatgggaacctgtgaaaagcctgacttccaatctgcccaatgtgaacttacccaacgtgaacttacccaaggtgcctaacttgccagtgaatatccctctggggattccacagatgccaaccttctcggcaccttcatggatggccgctatctacgatgcggataatggcagtggaacatcagaggatctgttctggaaacttgatgcgctgcagacatttattagggacctgcattggccagaagaggagttcggcaagcatctggagcagcgtctgaaactgatggcatctgatatgatcgagtcctgcgtaaaacgcactaggatcgccttcgaggtcaagctgcaaaaaactagccgaagtacagattttagagtgccccaatccatctgtacaatgtttaatgtcatggtggatgctaaggctcagtctacaaaactatgcagcatggaaatgggacaggagcaccagtaccactccaaaatcgacgagctgatagaggaaactgtgaaagaaatgatcactctgttggtggcgaaattcgtgactatcctggagggagtgctggctaagctgtccaggtatgatgagggcacattattttcgtctttcctttccttcacagtgaaggccgctagcaagtatgtagatgtgcccaaaccaggtatggatgtggctgacgcctacgtgacctttgtccgccacagtcaagatgtgctgcgcgataaggtcaatgaggaaatgtacatcgagcgcctgttcgaccagtggtacaacagtagcatgaacgtgatctgtacttggctcaccgatcgaatggacctgcagttacacatttatcaattaaaaacactgatacggatggtgaagaaaacttatagggatttccgcttgcaaggtgtcctggacagtacgctcaattctaagacatacgagacgattcgaaatcgtctaacagttgaagaggcgaccgcaagtgtgagtgaaggaggggggcttcagggcattagcatgaaggactctgacgaagaggatgaagaggacgattag

SEQ ID NO: 140320 - DNA, 4080 bp, Artificial Sequence
  derived and/or modified sequence
atgctggacccctcctcgtccgaggaggaatcagatgaaatcgtggaagaggaaagcggcaaggaggtgctggggtctgcaccatctggagcacggctgagcccatcccgtacctctgagggatctgccggaagcgccggtcttggcggagggggagcaggcgctggagctggcgtgggtgcaggcggaggaggcggttccggtgccagcagcgggggtggcgctggagggctgcagccttcctcccgcgctggcggagggaggccgagttcgccatccccttcagttgtttcagaaaaggagaaggaggaacttgaaagattgcagaaggaggaagaggagcgtaagaagcgcctgcaactgtacgtgttcgtcatgaggtgtattgcttacccattcaacgccaaacagcccacagacatggccagaaggcagcagaagattagcaagcagcagctgcagaccgtgaaggatcgattccaggcgttcctcaatggcgaaacccagatcatggcggatgaggctttcatgaatgctgtccaatcgtactacgaggtattcttgaaatccgatagagtggctcggatggtgcagagtggcggatgttcagcgaacgattctagggaggtattcaaaaaacatatcgagaaaagggtacggagcctcccagagatcgacggactcagtaaagaaactgttttgtcaagctggatggcaaagtttgatgccatatataggggagaagaggaccccagaaagcagcaggctcgtatgacagcctccgcagccagcgagctgatcctgagcaaagaacagctgtatgagatgttccagaatattttaggaattaaaaagttcgaacatcagctgctctacaacgcttgccagttggacaaccctgacgaacaggctgcccaaattagaagggagcttgacggcagactgcaaatggcagatcagatcgcacgcgaaaggaagttcccgaagtttgtgtccaaagaaatggagaatatgtacatcgaggaacttaagagcagcgtaaacttactgatggccaatctggagtctatgccagtgagcaagggcggagagtttaaactgcaaaaacttaagcggagccataatgcgtctatcatcgatatgggcgaggagtctgagaaccaactgagtaaaagcgatgtggtactgtctttctccctagaagtggtcattatggaagtgcaggggctgaagagcctggccccaaatcggattgtctactgtactatggaagttgagggcggagaaaaactgcaaaccgaccaggccgaggcgtccaaaccgacatgggggacccagggcgatttctctacaactcatgcattgccggctgtcaaagttaagttgttcacagaatcaactggagtcttggctctagaagataaagagttagggagagtcatcctgcaccctacgcctaatagccccaagcagtcggagtggcataagatgactgtctccaagaactgccctgatcaggatctgaagatcaagttggccgtcagaatggataaaccgcagaacatgaagcacagcggctatctttgggcgattggcaagaacgtttggaaacggtggaagaagcggtttttcgtgctcgtgcaagtcagccagtacactttcgctatgtgttcttatcgggagaaaaaagcagagcctcaggagctgctccagcttgacggatacaccgttgattacacagatcctcaaccgggacttgaagggggtcgtgctttttttaacgcggtcaaagagggcgataccgtcattttcgccagcgacgatgagcaggataggattctgtgggtgcaggccatgtacagggcgaccggccagtctcataagcccgtcccacctacgcaggtgcaaaaactgaatgcgaaaggaggaaacgttcctcagctggatgcaccgatcagtcaattttatgccgaccgggcacagaagcacggcatggacgagtttatcagcagcaacccatgtaatttcgatcacgcttctctcttcgaaatggtgcaaaggctgaccctggatcataggctaaacgactcttactcgtgtcttggttggttcagtcctggccaggtgtttgttctagacgagtactgtgcaagaaatggagtccgaggctgtcatcggcacctgtgctaccttcgcgatcttctagagagggcagaaaacggggcaatgattgatcccacccttcttcactacagttttgccttttgcgcctctcatgtgcatggcaaccgacccgatggcattgggactgtcaccgtcgaagagaaggagagattcgaagagatcaaagagaggctgcgcgtattgttggagaatcagattactcacttccggtactgttttccattcgggcgtcccgaaggagctctcaaagccacactgtcactgctggaacgtgttctgatgaaagatattgtgacaccagttccccaagaagaggtgaaaactgttatccgaaaatgccttgagcaggccgcattggttaattactccaggctatccgaatacgccaaaattgaggcaaactcttgcactacagaaaatgtcggtaggctgatcactcccgctaagaaactggaggacactattagactcgccgagctagtgatcgaggtgctccagcaaaacgaggagcaccatgcagagcctcatgtcgacaaaggagaagcatttgcttggtggagtgacctgatggtcgaacacgccgagacctttctctcactcttcgccgtggatatggacgctgcactggaagtgcaaccacccgatacatgggacagttttcccctgtttcagctacttaatgatttccttcggacagattataatctgtgcaacggcaaatttcataaacacttacaggacttgtttgccccactggttgtgcgctacgtcgatctgatggagagctccatcgcacaatcaattcaccggggattcgagcgcgagtcttgggagccagttaagagtttgacatccaacctgccgaatgttaacttacctaatgtcaatctgccaaaagtgcctaacttacccgtcaacattcccctaggtattccacaaatgccaacattttcagcccctagctggatggctgccatttatgatgcagacaatggtagtggtacctctgaggacttattctggaagttagatgctttgcagacgttcatccgagaccttcattggcctgaggaggagtttggaaagcatctcgaacagcggctaaaacttatggcatccgatatgatcgagtcctgcgtaaaacgcactcgtatcgcattcgaagtgaaactgcagaaaacatcgcggtccactgattttcgggtgcctcagtccatttgcacgatgttcaacgtgatggttgacgcaaaggcccaatctaccaagctttgttctatggagatggggcaggaaaagtacaagaaaatgaggcatcagtaccatagcaagattgacgagctcatcgaggagactgtgaaagagatgatcacattactggttgctaaatttgtaactatattagagggagttttagcaaaactctcaagatatgacgaaggaaccctattctcctccttcctgtcatttactgtgaaggcagccagcaaatatgtggacgtgcctaagccaggcatggatgtggccgacgcttacgttacgttcgttaggcacagccaggatgttctccgggataaagtgaacgaggaaatgtatattgagcggttgttcgaccaatggtacaacagcagtatgaatgtcatctgcacatggctcaccgaccgtatggaccttcaactccacatttatcagttgaagacactaattcggatggtcaagaaaacttaccgcgactttaggctgcagggtgtattagactctacactgaactcaaaaacttacgaaaccattcgtaacaggttgaccgtagaggaagccaccgcttccgtctcggagggcggtggcctccagggcatttcgatgaaagactcagacgaggaggatgaggaagatgactag

SEQ ID NO: 140321 - DNA, 4062 bp, Artificial Sequence
  derived and/or modified sequence
atgttggacccatcatcttcagaagaagaaagcgacgagattgtggaggaagaaagcgggaaggaggttttgggaagtgctccttccggagcaaggttaagtccttcccgcacctccgaaggcagtgcagggtctgctggactgggcggaggaggagcgggtgcgggtgccggtgtgggtgccggtgggggtggaggcagtggtgcaagttcaggaggtggagctggcggtctgcagccttctagtcgggcaggcggtggcagaccgtcatcaccgagtcctagcgtcgtaagcgagaaggagaaggaggaattagagagattacagaaagaagaggaggaaagaaaaaaaaggctgcagctttacgtatttgttatgcgttgtatcgcatatccgttcaacgccaaacagccaacggatatggcacgaaggcagcagaaaatcagtaaacagcagctgcaaaccgttaaagacagattccaggcttttctaaatggagaaacacaaatcatggccgacgaagcttttatgaacgcagttcagagctactacgaagtgtttctgaagtccgaccgagtggctcgcatggtacaatccggcggatgctccgctaatgatagccgggaggtcttcaagaagcacatcgagaagcgtgtgagaagtttaccagagattgacggtctctcgaaagagactgtgcttagctcctggatggccaagtttgatgcaatttacagaggtgaggaagatccccgaaagcagcaggccagaatgacagcttctgctgctagtgagcttatactgtcaaaggaacagctttacgagatgtttcagaacatcctgggcattaaaaagtttgagcatcagttactgtacaacgcttgccagctggacaaccctgacgagcaggccgctcagatccgacgagagctcgacgggaggctccagatggctgatcagattgcccgtgagaggaagtttcctaaatttgttagtaaagagatggaaaacatgtacatcgaggagctgaagagttccgtcaatttactcatggctaatttggaatctatgccagtgtctaaaggtggagaatttaaactccaaaaacttaagcgctcccacaacgcttcaatcattgatatgggggaagaaagcgagaatcagttgagcaagagcgacgtggttctgtcgttttccctggaagtggtgataatggaggtgcagggcctcaagtccttggcaccaaacaggatcgtatactgtacaatggaggtcgaaggtggagagaagctgcagaccgaccaggccgaggcctcaaagcccacctggggtacccaaggtgacttctcaactacccacgctctcccggctgtgaaggttaagttatttactgaatcaacgggagtcctggctctggaagacaaggaactaggcagagtgatcttacaccctaccccaaactctcctaaacaatccgagtggcacaaaatgactgtctcaaaaaactgccctgaccaggatctgaaaatcaagctggctgtgaggatggacaaacctcagaatatgaagcactccggctatctgtgggccatcggaaaaaacgtgtggaaacgatggaagaaacgattcttcgttctcgtccaggtctcccagtatacatttgctatgtgcagttaccgagagaagaaagcagaaccacaggagctgttgcagctggatggatacaccgttgactacacggatcctcagcccggactggagggtggacgtgctttcttcaacgcagtaaaagaaggcgacacagttattttcgcgtcagatgatgagcaggataggatcctatgggtccaagctatgtaccgagccaccgggcagtcccacaaacccgtgcccccaacacaagtccagaagctgaatgctaaaggagggaatgtgccccagctggatgcccctattagtcagttttacgccgaccgtgcccagaagcatggcatggatgaattcatcagtagtaacccttgtaatttcgaccatgcctcactatttgaaatggtccagaggctgaccctcgatcataggctgaatgatagctatagctgccttggatggttcagccctggtcaggtttttgtgctcgatgaatattgcgccaggaacggtgtgcgagggtgccatagacatctgtgttacctccgggatctgttagagcgagcagagaacggggctatgatagatccaactctgctgcattactcattcgctttttgtgcttctcacgtacatgggaatcgcccagacggaatcggaacagtgactgtcgaggagaaagagaggttcgaagagataaaggagcgtctgcgagtgctgttagagaatcagattacccacttccgctactgcttccccttcgggaggccggaaggagctttaaaggctaccctcagtctcctggaacgagttctcatgaaagatatagtgaccccagtgccccaggaggaggtgaaaacggtgatccggaaatgtctggaacaagcagctctcgtgaattattcgcggctgtccgagtacgcaaagatcgaggaaaaccaaaaggatgccgagaatgttggaagactcatcactcctgctaagaaactcgaagatacgatccgactcgctgaactggtaatcgaagtcctgcaacagaacgaagagcaccatgccgaaccacacgtggataagggagaagcattcgcttggtggtccgatctgatggtggagcatgctgagacatttctctccctgttcgccgtggatatggacgccgcactggaggtccaaccccctgatacatgggattcttttcctctgttccagcttctgaatgactttctgaggaccgactacaacctttgtaatggaaaatttcacaagcacctgcaggacctttttgctcctctggttgtgaggtacgtggatctgatggagtcatctatcgcccagagcattcatagggggtttgaacgagaatcctgggagccagtgaaatcacttacctcaaatttgcctaacgtgaatcttcccaatgtgaatctgccgaaggtacccaatcttccagttaacataccgctcggcatcccccagatgccgaccttcagtgccccatcctggatggcagcaatctatgatgccgataatggcagcgggacttccgaagatctcttttggaaactggatgcgctgcagaccttcattcgggacctgcactggccagaagaagaattcggcaagcatctcgagcagcgcctgaaactcatggcatcagacatgatagaatcatgcgtgaagcgaacacgcatcgcatttgaggtgaaattacagaagacaagccggtctaccgactttcgcgtgcctcagtctatctgcactatgtttaatgtgatggttgacgcaaaggcccagtccaccaagttatgcagtatggagatgggacaggaacatcagtaccattcaaaaattgacgagttgattgaggagacagttaaggaaatgattacactgctggtcgcaaaatttgtgacgattttagagggagtgctggctaaactgtctagatatgacgagggaaccttattctcgagttttctgagtttcaccgtcaaggccgcatccaaatatgtggatgtacctaagcccggtatggacgtggctgacgcttatgtaacctttgtgaggcattctcaggacgtcctacgggataaggtcaatgaagagatgtatatcgaacgccttttcgaccaatggtataacagctccatgaacgtcatttgcacttggctgaccgacagaatggacctacagcttcatatctaccaattaaagacgttgatccgcatggtgaaaaaaacttacagggatttcaggcttcagggagtgttggattcaacgttgaattccaaaacctatgagaccatccgaaataggttgaccgtggaagaagctacggcaagcgtgtccgaaggaggcggtctgcagggtatcagcatgaaggacagcgacgaggaagatgaggaagatgactag

SEQ ID NO: 140322 - DNA, 5500 bp, Artificial Sequence
  derived and/or modified sequence
ggctgcatcgacagcttgcaacactcggcatcttttctggaggcgcctccttcagcagccgcagatggcatccggctgcgggctcggggctcgcaattgattctcccccttgcccacctcgagtccacggacgcacctctcccttcccctcctcccttcgcgcttctgggtctgagcccagctcgcgaccgccgggcagaggatcagtcgcggcggccgaggctgagcagcagcgctctcgctccctgacctggggagaagcgcccacccgggagagctgatccccggctgcctccagcgccccccaccttttgcactccaagccgggggctccagagaccccgctccccaggcgccactatgctggacccttcgtccagcgaagaagaatcggatgagatcgtggaggaggagagcggcaaggaggtgctcggctcggccccgtccggcgcgcgcctgtctcccagccgtaccagcgagggctcggccggcagcgccgggctggggggcggcggcgccggcgccggagccggggtgggtgcaggcggcggcgggggcagcggcgcgagcagcggcggcggggccggggggctgcaacccagcagccgcgctggcggcggccggccctccagccccagcccgtcggtggtgagcgagaaggagaaggaagagttggagcggctgcagaaagaggaggaggagaggaagaagaggctgcagctgtatgtgttcgtgatgcgctgcatcgcctacccctttaatgccaagcagcccaccgacatggctcgccggcagcagaagatcagcaaacagcagctgcagacagtcaaggaccggtttcaggctttcctcaatggggaaacccagatcatggctgacgaagccttcatgaacgctgtgcagagttactatgaggtgttcctgaagagcgaccgtgtggcccgcatggttcagagtggaggctgttccgccaacgactcccgggaggtcttcaagaagcacattgagaagagagtgcgcagcctgcctgagattgacggcctcagcaaggagactgtgctgagctcctggatggccaaatttgatgccatctaccgtggagaagaggacccgcggaagcagcaggcccggatgacagccagcgcagcctccgagctgattctgagcaaggagcaactctatgagatgttccagaacattcttgggatcaagaagttcgaacatcagctcctttacaatgcctgccagctggacaatccagatgagcaagcagcccagatcagacgagagctggatggacgtctacaaatggcagaccaaatagccagggaacgcaaatttcccaagtttgtatccaaagaaatggaaaacatgtacattgaggagctgaagtcatctgtcaacctgctcatggccaacttggagagcatgccggtatccaaaggcggggagttcaagctccagaaactcaaacgcagccacaatgcttccatcatcgacatgggcgaggagagtgagaaccagctctccaagtcagatgtcgtgctgtctttctcattggaggtggtaattatggaagtccaaggcctcaaatctttggctccaaatcgcatcgtatattgcacaatggaggtggaaggaggagagaaactacagactgatcaggccgaggcttctaaaccaacctggggcacccagggtgacttctccacaacccatgcactgccagctgtgaaggtgaagctgttcacagagagcacaggcgtcctggcgttggaggacaaggagcttgggcgggttattctccatcccaccccgaacagccccaaacagtcagagtggcacaaaatgacagtctccaaaaactgccccgaccaagatctcaaaatcaaacttgctgtccgaatggataagcctcaaaacatgaagcattctgggtatttatgggccatcggtaagaatgtctggaagagatggaagaaaaggttttttgtattggtgcaggtcagtcagtacacgtttgccatgtgcagttatcgggagaagaaagcggagcctcaggaacttctacaattggatggctacactgtggattacaccgacccccagccaggtttggagggtggccgagccttcttcaatgctgtcaaggagggagacaccgtgatatttgccagtgacgatgaacaagaccgcatcctgtgggtccaggccatgtatcgggccacggggcagtcacacaagcctgtgcccccgacccaagtccagaaactcaacgccaagggaggaaatgtacctcagctggatgcccctatctctcaattttacgcagatagagctcaaaaacatggcatggatgaatttatctcttccaacccctgtaactttgaccacgcttccctctttgagatggtacaacgccttactttggatcacagacttaatgattcctattcttgcctgggctggttcagtcctggccaggtgtttgtactagacgagtattgcgcccgaaatggagtccgggggtgtcaccgacatctctgctacctcagagacttgcttgaacgggcagaaaatggcgccatgatcgaccccacccttcttcactacagctttgccttctgtgcatcccatgtccatgggaacaggcctgatggaattggaactgtgactgttgaagaaaaggaacgttttgaagaaatcaaagagaggctccgagttctgctagaaaatcagattacacattttaggtattgctttccatttggtcgacctgaaggtgctttgaaagctactctctcactcttggaaagggttttgatgaaagatattgttaccccagtgccacaagaggaggtaaaaacagttatccgtaaatgtctggaacaggctgcgttagtcaactattctcggctctcagagtatgccaaaatcgaagcaaactcttgtactacagaaaatgtaggccggttaatcactcctgccaaaaagcttgaagatacaatacgtcttgctgaactagtcattgaagttcttcagcaaaatgaggagcaccacgcagagccacatgttgataaaggagaagcctttgcgtggtggtcagatttaatggtggagcatgcggagacgttcctgtcactctttgcagtagacatggatgcagccttagaggtgcaacctccagacacatgggacagttttccactatttcagctgctgaatgattttctccgtactgactataatttgtgcaatggaaaatttcacaaacacctgcaagacctgtttgccccacttgttgttagatatgtggatctgatggagtcctcaattgcacaatccattcacaggggctttgagcgggagtcatgggaaccagtcaagagtttaaccagtaacctacccaatgtgaacctacccaatgtgaaccttcccaaagtaccaaatctaccagttaacatccctctaggcatcccacaaatgcctactttttcggcaccgtcatggatggctgctatatatgatgcggataatgggtcaggcacctcagaagatctgttttggaaacttgacgcccttcagaccttcattcgggacctgcactggcctgaagaagagtttggaaagcacctggaacaacggctgaagttgatggcaagtgacatgatcgaatcttgtgtcaaaagaaccaggattgcatttgaagttaagctgcaaaaaaccagtcgatcaacagattttcgagtcccacagtcaatatgcaccatgtttaatgttatggttgatgccaaagctcaatcaacaaaactttgcagcatggaaatgggccaagagaaatacaaaaaaatgagacatcaataccattcaaaaatagacgaactaattgaagaaactgttaaagaaatgataacactcttggttgcaaagttcgttactatcttggaaggagtgctggcaaaattatccagatatgacgaagggactttgttttcttcttttctgtcatttaccgtgaaggcagcttccaaatatgtggatgtacctaaacccgggatggacgtggccgacgcctacgtgactttcgtccgccattctcaggatgtcctgcgtgataaggtcaatgaggagatgtacatagaaaggttatttgatcaatggtacaacagctccatgaacgtgatctgcacctggttgacggaccggatggacttacagcttcatatttatcagttgaaaacactaattaggatggtaaagaaaacctacagagatttccgattgcaaggggtcctggactccaccttaaacagcaagacctatgaaacgatccggaaccgtctcactgtggaggaagccacagcatcagtgagtgaaggtgggggactgcagggcatcagcatgaaggacagcgatgaggaagacgaagaagacgattagaccatttggtcctagagtctgctgggacagagtcctgtaatcagtgcatgtccttagtctgttagttaaacccattaggaattttctgtcaactaccatgcccatgagatgtttatcaatacaactgccattttagctatgtggtaccaagattagcaaatgaccttcatatccactgatttcctgatgtccatgtctatatgtttacaagcaatatggagcaccattctttaaatactgttcatggagaatacatagtctaaccactaggcgtgtccctgttatcagcaaagatcaatgatgcttcattcatgtactatgtatgcattggtggtaaatggatgtgagggcaagtacatcaagtacattcactctgtttcacgtatgtggatgccagttaattaaatgagtacgtaaataaattaattaaaacacatagatctgctttgtgtttttatttttattttttgaaaaacaaaaggcaagtctccaacaattaacttttgatgctttctgttcccctaaaaccaaaaaatgaaccccttgtgtcgttgttaacccatcctttcatttactcatataattagccaaaaaaaaaaggatggctacataccaatggattgattctcttaattgccacggcaagggggcgatcctatcatgacttaacatcaagcgcgcagttcaaaactactgtcttctgtcaaagttttctcctcttaaatgttattttgcttttacgtctcaactgtgtatgtaaaaaaaatgaatatttaaattacaaccctagactaaaaatgtgtttataataagatgtggatatttccttcagtagattgtaaccataatttaaattattttgttccacactgttttttatatctgtcatgtacattgcattttgatctgtaactgcacaaccctggggtttgctgcagagctatttctttccatgtaaagtagtggatccatcttgcttttgccttatataaagcctacagttatggaagtgtggaaaactgtggcttctcaataaatattcagatgtcctaagaatata

SEQ ID NO: 140323 - DNA, 5471 bp, Artificial Sequence
  derived and/or modified sequence
acagcttgcaacactcggcatcttttctggaggcgcctccttcagcagccgcagatggcatccggctgcgggctcggggctcgcaattgattctcccccttgcccacctcgagtccacggacgcacctctcccttcccctcctcccttcgcgcttctgggtctgagcccagctcgcgaccgccgggcagaggatcagtcgcggcggccgaggctgagcagcagcgctctcgctccctgacctggggagaagcgcccacccgggagagctgatccccggctgcctccagcgccccccaccttttgcactccaagccgggggctccagagaccccgctccccaggcgccactatgctggacccttcgtccagcgaagaagaatcggatgagatcgtggaggaggagagcggcaaggaggtgctcggctcggccccgtccggcgcgcgcctgtctcccagccgtaccagcgagggctcggccggcagcgccgggctggggggcggcggcgccggcgccggagccggggtgggtgcaggcggcggcgggggcagcggcgcgagcagcggcggcggggccggggggctgcaacccagcagccgcgctggcggcggccggccctccagccccagcccgtcggtggtgagcgagaaggagaaggaagagttggagcggctgcagaaagaggaggaggagaggaagaagaggctgcagctgtatgtgttcgtgatgcgctgcatcgcctacccctttaatgccaagcagcccaccgacatggctcgccggcagcagaagatcagcaaacagcagctgcagacagtcaaggaccggtttcaggctttcctcaatggggaaacccagatcatggctgacgaagccttcatgaacgctgtgcagagttactatgaggtgttcctgaagagcgaccgtgtggcccgcatggttcagagtggaggctgttccgccaacgactcccgggaggtcttcaagaagcacattgagaagagagtgcgcagcctgcctgagattgacggcctcagcaaggagactgtgctgagctcctggatggccaaatttgatgccatctaccgtggagaagaggacccgcggaagcagcaggcccggatgacagccagcgcagcctccgagctgattctgagcaaggagcaactctatgagatgttccagaacattcttgggatcaagaagttcgaacatcagctcctttacaatgcctgccagctggacaatccagatgagcaagcagcccagatcagacgagagctggatggacgtctacaaatggcagaccaaatagccagggaacgcaaatttcccaagtttgtatccaaagaaatggaaaacatgtacattgaggagctgaagtcatctgtcaacctgctcatggccaacttggagagcatgccggtatccaaaggcggggagttcaagctccagaaactcaaacgcagccacaatgcttccatcatcgacatgggcgaggagagtgagaaccagctctccaagtcagatgtcgtgctgtctttctcattggaggtggtaattatggaagtccaaggcctcaaatctttggctccaaatcgcatcgtatattgcacaatggaggtggaaggaggagagaaactacagactgatcaggccgaggcttctaaaccaacctggggcacccagggtgacttctccacaacccatgcactgccagctgtgaaggtgaagctgttcacagagagcacaggcgtcctggcgttggaggacaaggagcttgggcgggttattctccatcccaccccgaacagccccaaacagtcagagtggcacaaaatgacagtctccaaaaactgccccgaccaagatctcaaaatcaaacttgctgtccgaatggataagcctcaaaacatgaagcattctgggtatttatgggccatcggtaagaatgtctggaagagatggaagaaaaggttttttgtattggtgcaggtcagtcagtacacgtttgccatgtgcagttatcgggagaagaaagcggagcctcaggaacttctacaattggatggctacactgtggattacaccgacccccagccaggtttggagggtggccgagccttcttcaatgctgtcaaggagggagacaccgtgatatttgccagtgacgatgaacaagaccgcatcctgtgggtccaggccatgtatcgggccacggggcagtcacacaagcctgtgcccccgacccaagtccagaaactcaacgccaagggaggaaatgtacctcagctggatgcccctatctctcaattttacgcagatagagctcaaaaacatggcatggatgaatttatctcttccaacccctgtaactttgaccacgcttccctctttgagatggtacaacgccttactttggatcacagacttaatgattcctattcttgcctgggctggttcagtcctggccaggtgtttgtactagacgagtattgcgcccgaaatggagtccgggggtgtcaccgacatctctgctacctcagagacttgcttgaacgggcagaaaatggcgccatgatcgaccccacccttcttcactacagctttgccttctgtgcatcccatgtccatgggaacaggcctgatggaattggaactgtgactgttgaagaaaaggaacgttttgaagaaatcaaagagaggctccgagttctgctagaaaatcagattacacattttaggtattgctttccatttggtcgacctgaaggtgctttgaaagctactctctcactcttggaaagggttttgatgaaagatattgttaccccagtgccacaagaggaggtaaaaacagttatccgtaaatgtctggaacaggctgcgttagtcaactattctcggctctcagagtatgccaaaatcgaagagaatcaaaaggatgcagaaaatgtaggccggttaatcactcctgccaaaaagcttgaagatacaatacgtcttgctgaactagtcattgaagttcttcagcaaaatgaggagcaccacgcagagccacatgttgataaaggagaagcctttgcgtggtggtcagatttaatggtggagcatgcggagacgttcctgtcactctttgcagtagacatggatgcagccttagaggtgcaacctccagacacatgggacagttttccactatttcagctgctgaatgattttctccgtactgactataatttgtgcaatggaaaatttcacaaacacctgcaagacctgtttgccccacttgttgttagatatgtggatctgatggagtcctcaattgcacaatccattcacaggggctttgagcgggagtcatgggaaccagtcaagagtttaaccagtaacctacccaatgtgaacctacccaatgtgaaccttcccaaagtaccaaatctaccagttaacatccctctaggcatcccacaaatgcctactttttcggcaccgtcatggatggctgctatatatgatgcggataatgggtcaggcacctcagaagatctgttttggaaacttgacgcccttcagaccttcattcgggacctgcactggcctgaagaagagtttggaaagcacctggaacaacggctgaagttgatggcaagtgacatgatcgaatcttgtgtcaaaagaaccaggattgcatttgaagttaagctgcaaaaaaccagtcgatcaacagattttcgagtcccacagtcaatatgcaccatgtttaatgttatggttgatgccaaagctcaatcaacaaaactttgcagcatggaaatgggccaagagcatcaataccattcaaaaatagacgaactaattgaagaaactgttaaagaaatgataacactcttggttgcaaagttcgttactatcttggaaggagtgctggcaaaattatccagatatgacgaagggactttgttttcttcttttctgtcatttaccgtgaaggcagcttccaaatatgtggatgtacctaaacccgggatggacgtggccgacgcctacgtgactttcgtccgccattctcaggatgtcctgcgtgataaggtcaatgaggagatgtacatagaaaggttatttgatcaatggtacaacagctccatgaacgtgatctgcacctggttgacggaccggatggacttacagcttcatatttatcagttgaaaacactaattaggatggtaaagaaaacctacagagatttccgattgcaaggggtcctggactccaccttaaacagcaagacctatgaaacgatccggaaccgtctcactgtggaggaagccacagcatcagtgagtgaaggtgggggactgcagggcatcagcatgaaggacagcgatgaggaagacgaagaagacgattagaccatttggtcctagagtctgctgggacagagtcctgtaatcagtgcatgtccttagtctgttagttaaacccattaggaattttctgtcaactaccatgcccatgagatgtttatcaatacaactgccattttagctatgtggtaccaagattagcaaatgaccttcatatccactgatttcctgatgtccatgtctatatgtttacaagcaatatggagcaccattctttaaatactgttcatggagaatacatagtctaaccactaggcgtgtccctgttatcagcaaagatcaatgatgcttcattcatgtactatgtatgcattggtggtaaatggatgtgagggcaagtacatcaagtacattcactctgtttcacgtatgtggatgccagttaattaaatgagtacgtaaataaattaattaaaacacatagatctgctttgtgtttttatttttattttttgaaaaacaaaaggcaagtctccaacaattaacttttgatgctttctgttcccctaaaaccaaaaaatgaaccccttgtgtcgttgttaacccatcctttcatttactcatataattagccaaaaaaaaaaggatggctacataccaatggattgattctcttaattgccacggcaagggggcgatcctatcatgacttaacatcaagcgcgcagttcaaaactactgtcttctgtcaaagttttctcctcttaaatgttattttgcttttacgtctcaactgtgtatgtaaaaaaaatgaatatttaaattacaaccctagactaaaaatgtgtttataataagatgtggatatttccttcagtagattgtaaccataatttaaattattttgttccacactgttttttatatctgtcatgtacattgcattttgatctgtaactgcacaaccctggggtttgctgcagagctatttctttccatgtaaagtagtggatccatcttgcttttgccttatataaagcctacagttatggaagtgtggaaaactgtggcttctcaataaatattcagatgtcctaagaatat

SEQ ID NO: 140324 - DNA, 4080 bp, Artificial Sequence
  derived and/or modified sequence
atgctggaccccagcagcagcgaggaggagagcgacgagatcgtggaggaggagagcggcaaggaggtgctgggcagcgcccccagcggcgccagactgagccccagcagaaccagcgagggcagcgccggcagcgccggcctgggcggcggcggcgccggcgccggcgccggcgtgggcgccggcggcggcggcggcagcggcgccagcagcggcggcggcgccggcggcctgcagcccagcagcagagccggcggcggcagacccagcagccccagccccagcgtggtgagcgagaaggagaaggaggagctggagagactgcagaaggaggaggaggagagaaagaagagactgcagctgtacgtgttcgtgatgagatgcatcgcctaccccttcaacgccaagcagcccaccgacatggccagaagacagcagaagatcagcaagcagcagctgcagaccgtgaaggacagattccaggccttcctgaacggcgagacccagatcatggccgacgaggccttcatgaacgccgtgcagagctactacgaggtgttcctgaagagcgacagagtggccagaatggtgcagagcggcggctgcagcgccaacgacagcagagaggtgttcaagaagcacatcgagaagagagtgagaagcctgcccgagatcgacggcctgagcaaggagaccgtgctgagcagctggatggccaagttcgacgccatctacagaggcgaggaggaccccagaaagcagcaggccagaatgaccgccagcgccgccagcgagctgatcctgagcaaggagcagctgtacgagatgttccagaacatcctgggcatcaagaagttcgagcaccagctgctgtacaacgcctgccagctggacaaccccgacgagcaggccgcccagatcagaagagagctggacggcagactgcagatggccgaccagatcgccagagagagaaagttccccaagttcgtgagcaaggagatggagaacatgtacatcgaggagctgaagagcagcgtgaacctgctgatggccaacctggagagcatgcccgtgagcaagggcggcgagttcaagctgcagaagctgaagagaagccacaacgccagcatcatcgacatgggcgaggagagcgagaaccagctgagcaagagcgacgtggtgctgagcttcagcctggaggtggtgatcatggaggtgcagggcctgaagagcctggcccccaacagaatcgtgtactgcaccatggaggtggagggcggcgagaagctgcagaccgaccaggccgaggccagcaagcccacctggggcacccagggcgacttcagcaccacccacgccctgcccgccgtgaaggtgaagctgttcaccgagagcaccggcgtgctggccctggaggacaaggagctgggcagagtgatcctgcaccccacccccaacagccccaagcagagcgagtggcacaagatgaccgtgagcaagaactgccccgaccaggacctgaagatcaagctggccgtgagaatggacaagccccagaacatgaagcacagcggctacctgtgggccatcggcaagaacgtgtggaagagatggaagaagagattcttcgtgctggtgcaggtgagccagtacaccttcgccatgtgcagctacagagagaagaaggccgagccccaggagctgctgcagctggacggctacaccgtggactacaccgacccccagcccggcctggagggcggcagagccttcttcaacgccgtgaaggagggcgacaccgtgatcttcgccagcgacgacgagcaggacagaatcctgtgggtgcaggccatgtacagagccaccggccagagccacaagcccgtgccccccacccaggtgcagaagctgaacgccaagggcggcaacgtgccccagctggacgcccccatcagccagttctacgccgacagagcccagaagcacggcatggacgagttcatcagcagcaacccctgcaacttcgaccacgccagcctgttcgagatggtgcagagactgaccctggaccacagactgaacgacagctacagctgcctgggctggttcagccccggccaggtgttcgtgctggacgagtactgcgccagaaacggcgtgagaggctgccacagacacctgtgctacctgagagacctgctggagagagccgagaacggcgccatgatcgaccccaccctgctgcactacagcttcgccttctgcgccagccacgtgcacggcaacagacccgacggcatcggcaccgtgaccgtggaggagaaggagagattcgaggagatcaaggagagactgagagtgctgctggagaaccagatcacccacttcagatactgcttccccttcggcagacccgagggcgccctgaaggccaccctgagcctgctggagagagtgctgatgaaggacatcgtgacccccgtgccccaggaggaggtgaagaccgtgatcagaaagtgcctggagcaggccgccctggtgaactacagcagactgagcgagtacgccaagatcgaggccaacagctgcaccaccgagaacgtgggcagactgatcacccccgccaagaagctggaggacaccatcagactggccgagctggtgatcgaggtgctgcagcagaacgaggagcaccacgccgagccccacgtggacaagggcgaggccttcgcctggtggagcgacctgatggtggagcacgccgagaccttcctgagcctgttcgccgtggacatggacgccgccctggaggtgcagccccccgacacctgggacagcttccccctgttccagctgctgaacgacttcctgagaaccgactacaacctgtgcaacggcaagttccacaagcacctgcaggacctgttcgcccccctggtggtgagatacgtggacctgatggagagcagcatcgcccagagcatccacagaggcttcgagagagagagctgggagcccgtgaagagcctgaccagcaacctgcccaacgtgaacctgcccaacgtgaacctgcccaaggtgcccaacctgcccgtgaacatccccctgggcatcccccagatgcccaccttcagcgcccccagctggatggccgccatctacgacgccgacaacggcagcggcaccagcgaggacctgttctggaagctggacgccctgcagaccttcatcagagacctgcactggcccgaggaggagttcggcaagcacctggagcagagactgaagctgatggccagcgacatgatcgagagctgcgtgaagagaaccagaatcgccttcgaggtgaagctgcagaagaccagcagaagcaccgacttcagagtgccccagagcatctgcaccatgttcaacgtgatggtggacgccaaggcccagagcaccaagctgtgcagcatggagatgggccaggagaagtacaagaagatgagacaccagtaccacagcaagatcgacgagctgatcgaggagaccgtgaaggagatgatcaccctgctggtggccaagttcgtgaccatcctggagggcgtgctggccaagctgagcagatacgacgagggcaccctgttcagcagcttcctgagcttcaccgtgaaggccgccagcaagtacgtggacgtgcccaagcccggcatggacgtggccgacgcctacgtgaccttcgtgagacacagccaggacgtgctgagagacaaggtgaacgaggagatgtacatcgagagactgttcgaccagtggtacaacagcagcatgaacgtgatctgcacctggctgaccgacagaatggacctgcagctgcacatctaccagctgaagaccctgatcagaatggtgaagaagacctacagagacttcagactgcagggcgtgctggacagcaccctgaacagcaagacctacgagaccatcagaaacagactgaccgtggaggaggccaccgccagcgtgagcgagggcggcggcctgcagggcatcagcatgaaggacagcgacgaggaggacgaggaggacgactag

SEQ ID NO: 140325 - DNA, 4062 bp, Artificial Sequence
  derived and/or modified sequence
atgctggaccccagcagcagcgaggaggagagcgacgagatcgtggaggaggagagcggcaaggaggtgctgggcagcgcccccagcggcgccagactgagccccagcagaaccagcgagggcagcgccggcagcgccggcctgggcggcggcggcgccggcgccggcgccggcgtgggcgccggcggcggcggcggcagcggcgccagcagcggcggcggcgccggcggcctgcagcccagcagcagagccggcggcggcagacccagcagccccagccccagcgtggtgagcgagaaggagaaggaggagctggagagactgcagaaggaggaggaggagagaaagaagagactgcagctgtacgtgttcgtgatgagatgcatcgcctaccccttcaacgccaagcagcccaccgacatggccagaagacagcagaagatcagcaagcagcagctgcagaccgtgaaggacagattccaggccttcctgaacggcgagacccagatcatggccgacgaggccttcatgaacgccgtgcagagctactacgaggtgttcctgaagagcgacagagtggccagaatggtgcagagcggcggctgcagcgccaacgacagcagagaggtgttcaagaagcacatcgagaagagagtgagaagcctgcccgagatcgacggcctgagcaaggagaccgtgctgagcagctggatggccaagttcgacgccatctacagaggcgaggaggaccccagaaagcagcaggccagaatgaccgccagcgccgccagcgagctgatcctgagcaaggagcagctgtacgagatgttccagaacatcctgggcatcaagaagttcgagcaccagctgctgtacaacgcctgccagctggacaaccccgacgagcaggccgcccagatcagaagagagctggacggcagactgcagatggccgaccagatcgccagagagagaaagttccccaagttcgtgagcaaggagatggagaacatgtacatcgaggagctgaagagcagcgtgaacctgctgatggccaacctggagagcatgcccgtgagcaagggcggcgagttcaagctgcagaagctgaagagaagccacaacgccagcatcatcgacatgggcgaggagagcgagaaccagctgagcaagagcgacgtggtgctgagcttcagcctggaggtggtgatcatggaggtgcagggcctgaagagcctggcccccaacagaatcgtgtactgcaccatggaggtggagggcggcgagaagctgcagaccgaccaggccgaggccagcaagcccacctggggcacccagggcgacttcagcaccacccacgccctgcccgccgtgaaggtgaagctgttcaccgagagcaccggcgtgctggccctggaggacaaggagctgggcagagtgatcctgcaccccacccccaacagccccaagcagagcgagtggcacaagatgaccgtgagcaagaactgccccgaccaggacctgaagatcaagctggccgtgagaatggacaagccccagaacatgaagcacagcggctacctgtgggccatcggcaagaacgtgtggaagagatggaagaagagattcttcgtgctggtgcaggtgagccagtacaccttcgccatgtgcagctacagagagaagaaggccgagccccaggagctgctgcagctggacggctacaccgtggactacaccgacccccagcccggcctggagggcggcagagccttcttcaacgccgtgaaggagggcgacaccgtgatcttcgccagcgacgacgagcaggacagaatcctgtgggtgcaggccatgtacagagccaccggccagagccacaagcccgtgccccccacccaggtgcagaagctgaacgccaagggcggcaacgtgccccagctggacgcccccatcagccagttctacgccgacagagcccagaagcacggcatggacgagttcatcagcagcaacccctgcaacttcgaccacgccagcctgttcgagatggtgcagagactgaccctggaccacagactgaacgacagctacagctgcctgggctggttcagccccggccaggtgttcgtgctggacgagtactgcgccagaaacggcgtgagaggctgccacagacacctgtgctacctgagagacctgctggagagagccgagaacggcgccatgatcgaccccaccctgctgcactacagcttcgccttctgcgccagccacgtgcacggcaacagacccgacggcatcggcaccgtgaccgtggaggagaaggagagattcgaggagatcaaggagagactgagagtgctgctggagaaccagatcacccacttcagatactgcttccccttcggcagacccgagggcgccctgaaggccaccctgagcctgctggagagagtgctgatgaaggacatcgtgacccccgtgccccaggaggaggtgaagaccgtgatcagaaagtgcctggagcaggccgccctggtgaactacagcagactgagcgagtacgccaagatcgaggagaaccagaaggacgccgagaacgtgggcagactgatcacccccgccaagaagctggaggacaccatcagactggccgagctggtgatcgaggtgctgcagcagaacgaggagcaccacgccgagccccacgtggacaagggcgaggccttcgcctggtggagcgacctgatggtggagcacgccgagaccttcctgagcctgttcgccgtggacatggacgccgccctggaggtgcagccccccgacacctgggacagcttccccctgttccagctgctgaacgacttcctgagaaccgactacaacctgtgcaacggcaagttccacaagcacctgcaggacctgttcgcccccctggtggtgagatacgtggacctgatggagagcagcatcgcccagagcatccacagaggcttcgagagagagagctgggagcccgtgaagagcctgaccagcaacctgcccaacgtgaacctgcccaacgtgaacctgcccaaggtgcccaacctgcccgtgaacatccccctgggcatcccccagatgcccaccttcagcgcccccagctggatggccgccatctacgacgccgacaacggcagcggcaccagcgaggacctgttctggaagctggacgccctgcagaccttcatcagagacctgcactggcccgaggaggagttcggcaagcacctggagcagagactgaagctgatggccagcgacatgatcgagagctgcgtgaagagaaccagaatcgccttcgaggtgaagctgcagaagaccagcagaagcaccgacttcagagtgccccagagcatctgcaccatgttcaacgtgatggtggacgccaaggcccagagcaccaagctgtgcagcatggagatgggccaggagcaccagtaccacagcaagatcgacgagctgatcgaggagaccgtgaaggagatgatcaccctgctggtggccaagttcgtgaccatcctggagggcgtgctggccaagctgagcagatacgacgagggcaccctgttcagcagcttcctgagcttcaccgtgaaggccgccagcaagtacgtggacgtgcccaagcccggcatggacgtggccgacgcctacgtgaccttcgtgagacacagccaggacgtgctgagagacaaggtgaacgaggagatgtacatcgagagactgttcgaccagtggtacaacagcagcatgaacgtgatctgcacctggctgaccgacagaatggacctgcagctgcacatctaccagctgaagaccctgatcagaatggtgaagaagacctacagagacttcagactgcagggcgtgctggacagcaccctgaacagcaagacctacgagaccatcagaaacagactgaccgtggaggaggccaccgccagcgtgagcgagggcggcggcctgcagggcatcagcatgaaggacagcgacgaggaggacgaggaggacgactag

SEQ ID NO: 140326 - protein, 113 aa, Artificial Sequence
  derived and/or modified sequence
MDSRQAAALLVLLLLIDGGCAEGPGGQQEDQLSAEEDSEPLPPQDAQTSGSLLHYLLQAMERPGRSQAFLFQPQRFGRNTQGSWRNEWLSPRAGEGLNSQFWSLAAPQRFGKK

SEQ ID NO: 140327 - DNA, 342 bp, Artificial Sequence
  derived and/or modified sequence
atggacagccgacaagctgctgcgctgctggtgctccttttactgattgatgggggatgcgcagaaggcccaggaggacagcaagaggaccagctaagcgccgaagaagattcagagcctcttccaccacaagatgcccagacatctggttccctgctgcattatttacttcaggccatggagcgccctgggaggtctcaagctttcctgtttcaaccccagcggtttgggagaaatactcagggctcatggcgcaacgagtggttgagcccaagggctggggaaggtctgaattcccagttttggtccttggctgccccacaaaggtttggaaagaagtag

SEQ ID NO: 140328 - DNA, 342 bp, Artificial Sequence
  derived and/or modified sequence
atggattccagacaggccgctgcactgttggtgcttctactgctgattgacggagggtgcgcagaaggtccaggtggccagcaagaggatcaactcagcgccgaggaagatagtgagccattaccaccacaggatgcgcagacctcaggttctctactccactaccttcttcaggctatggagcggcctggccgatcacaggcttttttatttcagcctcagcgctttggcagaaacacacaggggtcttggcgaaacgagtggttgtctccccgagctggagaggggcttaactcacagttttggagcctcgcggcaccacagaggttcggcaagaaatag

SEQ ID NO: 140329 - DNA, 342 bp, Artificial Sequence
  derived and/or modified sequence
atggattccagacaggccgctgcactgttggtgcttctactgctgattgacggagggtgcgcagaaggtccaggtggccagcaagaggatcaactcagcgccgaggaagatagtgagccattaccaccacaggatgcgcagacctcaggttctctactccactaccttcttcaggctatggagcggcctggccgatcacaggcttttttatttcagcctcagcgctttggcagaaacacacaggggtcttggcgaaacgagtggttgtctccccgagctggagaggggcttaactcacagttttggtcactggctgcacctcagagattcggtaagaaatag

SEQ ID NO: 140330 - DNA, 592 bp, Artificial Sequence
  derived and/or modified sequence
catgaagtcctgggggcgccatgggaggagatcccaggtggctcctaatgagccctgcatttccatttgcctgctctagattcccctaaggctactgtgaggctgggggtgggggaacagcaggtataagaggttggggtggctgtaggagggtaggtggcagcatggattctaggcaggctgctgcactgctggtgctgctgctgttaatagacgggggctgtgctgaagggccaggaggccagcaggaagaccagctctccgcggaggaagacagcgaacccctcccaccacaggatgcccagacctctgggtcactgttgcactacctgctccaggcaatggagagacctggccggagccaagccttcctgtttcagccccagaggtttggcagaaatacccagggatcctggaggaatgaatggctgagtccccgggctggagaggggctgaattcccagttctggagcctggctgcccctcaacgctttgggaagaagtgacatgtcatcccttgatatgtctgcatgcaaggtccacacccaaaagtgtcaatgtttgccccccaaataaaattgtctggcttctg

SEQ ID NO: 140331 - DNA, 342 bp, Artificial Sequence
  derived and/or modified sequence
atggacagcagacaggccgccgccctgctggtgctgctgctgctgatcgacggcggctgcgccgagggccccggcggccagcaggaggaccagctgagcgccgaggaggacagcgagcccctgcccccccaggacgcccagaccagcggcagcctgctgcactacctgctgcaggccatggagagacccggcagaagccaggccttcctgttccagccccagagattcggcagaaacacccagggcagctggagaaacgagtggctgagccccagagccggcgagggcctgaacagccagttctggagcctggccgccccccagagattcggcaagaagtag

SEQ ID NO: 140332 - DNA, 342 bp, Artificial Sequence
  derived and/or modified sequence
atggacagcaggcaggcagctgctctgttggtgctgttgttactgatcgacggcggatgcgcggagggcccaggtgggcagcaagaagaccagctctctgccgaggaagactccgaaccgcttccaccccaggacgctcagacctctgggtccctgctacactatctgctccaagcaatggagcgcccgggaaggtcacaggccttcctctttcagccgcagagatttggtcgaaacactcagggctcttggcgcaatgagtggctctcgcccagggcaggggagggactcaattctcagttctggagtttggcggccccccagcgcttcggtaagaaatag

SEQ ID NO: 140333 - DNA, 342 bp, Artificial Sequence
  derived and/or modified sequence
atggacagccggcaggccgccgccctgctggtgctgctgctgctgattgatggcggctgtgccgagggccctgggggccagcaggaggaccagctgtctgctgaggaggacagcgagcccctgcccccccaggatgcccagaccagcggcagcctgctgcactacctgctgcaggccatggagaggcctggccgcagccaggccttcctgttccagccccagcgcttcggcaggaacacccagggctcctggagaaatgagtggctgagccccagggctggggagggcctgaacagccagttctggagcctggccgccccccagagatttgggaagaagtag

SEQ ID NO: 140334 - DNA, 342 bp, Artificial Sequence
  derived and/or modified sequence
atggacagccggcaggccgccgccctgctggtgctgctgctgctgatcgatggtgggtgcgccgaagggccgggtggtcagcaggaggatcagctgtctgctgaggaggattcggagcccttgccacctcaggatgcgcagaccagtggaagcctcctacattacttgctacaagccatggagcgtcccggaagatcacaggcgtttctttttcagccgcagaggttcgggcggaatacacaggggagttggaggaacgagtggctgagccccagggctggggagggcctcaattcacaattctggagtctggcagcaccccagcggttcggaaaaaaatag

SEQ ID NO: 140335 - RNA, 342 nt, Artificial Sequence
  derived and/or modified sequence
auggauuccagacaggccgcugcacuguuggugcuucuacugcugauugacggagggugcgcagaagguccagguggccagcaagaggaucaacucagcgccgaggaagauagugagccauuaccaccacaggaugcgcagaccucagguucucuacuccacuaccuucuucaggcuauggagcggccuggccgaucacaggcuuuuuuauuucagccucagcgcuuuggcagaaacacacaggggucuuggcgaaacgagugguugucuccccgagcuggagaggggcuuaacucacaguuuuggagccucgcggcaccacagagguucggcaagaaauag

SEQ ID NO: 140336 - RNA, 342 nt, Artificial Sequence
  derived and/or modified sequence
auggauuccagacaggccgcugcacuguuggugcuucuacugcugauugacggagggugcgcagaagguccagguggccagcaagaggaucaacucagcgccgaggaagauagugagccauuaccaccacaggaugcgcagaccucagguucucuacuccacuaccuucuucaggcuauggagcggccuggccgaucacaggcuuuuuuauuucagccucagcgcuuuggcagaaacacacaggggucuuggcgaaacgagugguugucuccccgagcuggagaggggcuuaacucacaguuuuggucacuggcugcaccucagagauucgguaagaaauag

SEQ ID NO: 140337 - protein, 1512 aa, Artificial Sequence
  derived and/or modified sequence
MPSSSDTALGGGGGLSWAEKKLEERRKRRRFLSPQQPPLLLPLLQPQLLQPPPPPPPLLFLAAPGTAAAAAAAAAASSSCFSPGPPLEVKRLARGKRRAGGRQKRRRGPRAGQEAEKRRVFSLPQPQQDGGGGASSGGGVTPLVEYEDVSSQSEQGLLLGGASAATAATAAGGTGGSGGSPASSSGTQRRGEGSERRPRRDRRSSSGRSKERHREHRRRDGQRGGSEASKSRSRHSHSGEERAEVAKSGSSSSSGGRRKSASATSSSSSSRKDRDSKAHRSRTKSSKEPPSAYKEPPKAYREDKTEPKAYRRRRSLSPLGGRDDSPVSHRASQSLRSRKSPSPAGGGSSPYSRRLPRSPSPYSRRRSPSYSRHSSYERGGDVSPSPYSSSSWRRSRSPYSPVLRRSGKSRSRSPYSSRHSRSRSRHRLSRSRSRHSSISPSTLTLKSSLAAELNKNKKARAAEAARAAEAAKAAEATKAAEAAAKAAKASNTSTPTKGNTETSASASQTNHVKDVKKIKIEHAPSPSSGGTLKNDKAKTKPPLQVTKVENNLIVDKATKKAVIVGKESKSAATKEESVSLKEKTKPLTPSIGAKEKEQHVALVTSTLPPLPLPPMLPEDKEADSLRGNISVKAVKKEVEKKLRCLLADLPLPPELPGGDDLSKSPEEKKTATQLHSKRRPKICGPRYGETKEKDIDWGKRCVDKFDIIGIIGEGTYGQVYKARDKDTGEMVALKKVRLDNEKEGFPITAIREIKILRQLTHQSIINMKEIVTDKEDALDFKKDKGAFYLVFEYMDHDLMGLLESGLVHFNENHIKSFMRQLMEGLDYCHKKNFLHRDIKCSNILLNNRGQIKLADFGLARLYSSEESRPYTNKVITLWYRPPELLLGEERYTPAIDVWSCGCILGELFTKKPIFQANQELAQLELISRICGSPCPAVWPDVIKLPYFNTMKPKKQYRRKLREEFVFIPAAALDLFDYMLALDPSKRCTAEQALQCEFLRDVEPSKMPPPDLPLWQDCHELWSKKRRRQKQMGMTDDVSTIKAPRKDLSLGLDDSRTNTPQGVLPSSQLKSQGSSNVAPVKTGPGQHLNHSELAILLNLLQSKTSVNMADFVQVLNIKVNSETQQQLNKINLPAGILATGEKQTDPSTPQQESSKPLGGIQPSSQTIQPKVETDAAQAAVQSAFAVLLTQLIKAQQSKQKDVLLEERENGSGHEASLQLRPPPEPSTPVSGQDDLIQHQDMRILELTPEPDRPRILPPDQRPPEPPEPPPVTEEDLDYRTENQHVPTTSSSLTDPHAGVKAALLQLLAQHQPQDDPKREGGIDYQAGDTYVSTSDYKDNFGSSSFSSAPYVSNDGLGSSSAPPLERRSFIGNSDIQSLDNYSTASSHSGGPPQPSAFSESFPSSVAGYGDIYLNAGPMLFSGDKDHRFEYSHGPIAVLANSSDPSTGPESTHPLPAKMHNYNYGGNLQENPSGPSLMHGQTWTSPAQGPGYSQGYRGHISTSTGRGRGRGLPY

SEQ ID NO: 140338 - DNA, 4539 bp, Artificial Sequence
  derived and/or modified sequence
atgcctagtagctcggacactgctctcggaggaggggggggactctcctgggccgagaagaagcttgaagaaagaagaaagcgccgacgcttccttagtccgcagcaaccaccactcctgctcccattactgcagccacagctcctgcagccacccccaccgccgccacccctgctgttcctcgctgcccctggtacagctgctgccgccgccgcagcagcagctgcctccagtagctgtttctcccccggcccacccctggaggtcaaacggttagccaggggtaagcgtcgagcggggggacgccagaaaagacgccggggacccagggcgggacaggaagcagaaaaacggcgggtatttagtttgcctcagccccagcaggatgggggcgggggcgcgtcatctggagggggagtgacaccactggtagagtatgaagatgtatccagccaatcagaacagggcctgctactggggggcgcttccgccgctacagccgctacggccgctggcggcaccggtggtagtggcggcagtccggcctcttccagcggcactcagcgtagaggtgaaggctctgagcgaagaccccgcagagatcgccgcagctccagtggtcggtctaaggaacggcatcgcgagcaccggcgacgggacggccaaaggggcgggtctgaggctagcaaatcacggtcaaggcatagccatagtggggaggagcgcgccgaggtggctaagagcggctcttcttcatcatctgggggccggcgcaagtcggccagtgcaacaagcagtagctccagttcccgaaaggaccgagacagcaaggctcacagatcacggaccaaatcatcgaaagagcctccctcagcctataaggaaccccctaaagcctaccgggaagataagacagagccaaaggcctaccggagacggagatccttgagcccactggggggaagggacgatagccccgtcagccaccgagccagtcagagcctgcggagcagaaaatccccctcccccgcgggtggaggcagcagcccttatagtcgcaggctgccacggagcccaagcccctattctcggcgaaggtcaccgtcctatagccgccattcaagttatgaacggggtggtgacgttagtccatcaccttactcgagcagctcatggcgccggtcaagaagcccctatagtcctgtgcttagacgctcaggcaaaagccgtagcaggtctccctacagctcccgccattcaaggtctcgaagtagacacagactgtctcgttcccgcagccgccattcttctatttccccaagcacgctaactctcaaatccagtcttgcagccgaactgaacaaaaataagaaggcccgtgcggcggaagcagcccgcgccgccgaagccgccaaagcagccgaggcaacaaaagctgctgaggccgctgcaaaggcagcaaaagcctcaaacacgtcaaccccaactaaaggaaatactgagacatctgcgagcgcctcccagaccaatcacgtaaaagacgttaagaaaataaaaatcgaacacgctccttccccaagcagtggtggcaccctgaaaaatgataaagccaagactaagccccctctgcaggtgactaaagtcgaaaacaatttgatcgtcgacaaggccaccaagaaggctgttattgtcggaaaagagagcaagtccgccgcaactaaggaagagagtgtgagtttgaaagagaagaccaaaccactgactccatcaatcggcgcaaaggaaaaggaacagcacgtggcccttgtcacaagtacccttcctcctctgcccctaccacctatgctgccagaagataaggaggccgatagccttagaggaaacattagtgtgaaagccgtgaagaaagaagtggagaaaaaactccggtgtcttctggccgatctgcctttgccccctgaacttccaggaggcgacgacctctcaaaatctccggaagagaagaagacagcgacccagcttcactcaaagagacgccccaagatatgtggccctcgctatggcgagacaaaggagaaggatatagattggggcaagaggtgtgttgataagttcgatattatcggaattattggtgaaggcacttatggtcaagtttacaaagcaagggataaagacacaggcgagatggtggcactaaagaaagtcagactggataatgagaaagagggctttccaattacagccattagagaaatcaaaatcttgaggcagctaacacaccaatctatcataaatatgaaagagattgttacagataaagaggatgccctggacttcaaaaaggataaaggtgctttttatttagtttttgagtacatggaccacgacctaatgggtctgcttgagagcgggctcgttcatttcaacgaaaatcacatcaagtccttcatgagacaacttatggagggtctggactactgccacaagaaaaattttctccatcgcgacattaagtgtagcaatatcctgctgaacaaccgcggacagattaagttggctgacttcggcttggcaagactttatagttccgaggaatctcgtccgtataccaacaaagtgatcactttgtggtatcgcccccctgaactgctgctgggggaggagagatacacacctgccattgacgtgtggagctgcggatgcatactcggcgagctgttcaccaaaaagccaatctttcaggctaaccaggagctcgcccagttggagctgattagtcgcatctgcggcagtccctgccctgctgtctggcccgacgtcatcaagctcccctacttcaatacgatgaagcccaagaagcagtatcgtaggaagctccgcgaggagtttgtcttcattcccgccgctgccctcgatttgttcgactatatgctggctctagacccctccaaacgatgcacagcagaacaggctctgcagtgcgagttcctgagggatgtggaacctagcaagatgcctccacctgacctccctttgtggcaggactgccacgaactctggagcaagaagagacgcaggcagaagcagatgggcatgacagacgacgtaagcaccattaaggctccccgaaaggatttatcccttggactggacgatagtaggactaacaccccgcagggagtgctgccaagctcccagttgaaatctcagggatccagcaacgtggctcctgttaaaacaggtccgggtcagcatttaaaccattccgaattagcgattttgttgaatctgctgcaatctaagacctctgttaacatggccgacttcgtccaagttctgaacatcaaggtgaatagcgaaacacagcagcagttaaacaaaattaacttaccagccggaatactggcgaccggagaaaagcagactgatccttccaccccccaacaggagtcctccaagcctcttggcgggatccagccgtcaagtcagacgattcaacccaaggtggaaaccgatgccgcccaggcagctgtacagagtgccttcgcagtgctgctcacacagttgatcaaagctcagcaatccaaacagaaggacgtcctcctggaggagagagagaatgggagtgggcatgaagctagcttacagctgaggcccccacctgagccttcaacacctgtcagcgggcaggatgacctcattcaacaccaggacatgaggatactggagttaaccccggagcctgatcgcccgcggattttgccaccagaccaacgtccccctgaacctccagagccccctccggttacggaggaagacttggattacagaactgagaaccagcacgtgccgactacctcaagttccctgacagatccgcatgctggggtgaaggcggctctgttacaactgcttgctcaacatcagccccaggacgacccaaaaagagagggtgggatcgattaccaagccggggacacatatgtgtcaacctccgactataaggataattttggttctagttcgttcagctcagccccttatgtgagcaatgatgggctgggctcttccagcgcgcccccgcttgagagacgtagcttcattggcaattctgacattcagagcctggacaactacagcaccgcatcatcacactccgggggcccgccccaaccttcagccttttctgaaagctttccttcaagcgtcgccggctacggtgatatttatctaaatgcaggtccaatgttgtttagcggcgacaaagatcatcggttcgaatattctcacgggccgattgccgtactcgccaacagtagcgatccttctacaggacccgaatccacacacccgctaccagccaaaatgcataattacaattacggcggaaacctccaggagaatcccagcggaccatctctcatgcatggtcagacgtggacctccccagcccaggggcctgggtatagccaggggtatagagggcacataagcacgagcacaggccgggggcgaggacgcggcctgccttattag

SEQ ID NO: 140339 - DNA, 4539 bp, Artificial Sequence
  derived and/or modified sequence
atgcccagcagcagtgacacagccctgggcggcggcggcggcctgtcctgggccgagaagaagctggaggagaggaggaagagaagacgcttcctgagcccccagcagccccccctgctgctgcccctgctgcagccccagctgctgcagcccccacctcctcctccacccctgctcttcctggccgcccctggaacagctgctgctgctgctgctgctgctgctgccagcagcagctgcttcagccctggcccccccctggaggtgaagaggctggcccggggcaagagaagagctgggggccggcagaagagaagaagaggccccagggctggccaggaggccgagaagagaagagtcttcagcctgccccagccccagcaggacggcggcggcggggccagcagcggcggcggcgtgacccccctggtggagtatgaagatgtgagcagccagagcgagcagggcctgctgctgggcggggccagcgctgccacagctgccacagctgctgggggcaccggcggcagcggcggcagccctgccagcagcagcggcacccagaggagaggagagggcagcgagcggcggccccggcgggaccggcgcagcagcagcggccgcagcaaggagcggcaccgggagcacagaagaagagatggccagaggggcggcagcgaggccagcaagagccgcagccgccacagccacagcggggaggagagagctgaggtggccaagagcggcagcagcagcagcagcggcggccgcaggaagagcgccagcgccaccagcagcagcagcagcagcaggaaggaccgggacagcaaggcccacaggagcaggaccaagagcagcaaggagcccccatctgcctacaaggagccccccaaggcctaccgggaggacaagacagagcccaaggcctacagaagaagaagaagcctgagccccctgggcggcagagatgacagccctgtgagccaccgggccagccagagcctgcggagcaggaagagccccagccctgctgggggcggcagcagcccctacagccggcggctgcccaggagccccagcccctacagcagaagaagaagccccagctacagccgccacagcagctatgaaagaggaggagatgtgagccccagcccctacagcagcagctcctggaggaggagccgcagcccctacagccctgtgctgcggcgcagcggcaagagccgcagccgcagcccctacagcagccgccacagccgcagccgcagccgccaccggctgagccgcagccgcagccgccacagcagcatcagccccagcaccctgaccctgaagagcagcctggccgctgagctgaacaagaacaagaaggcccgggctgctgaggccgcccgggctgctgaggccgccaaggctgctgaggccaccaaggctgctgaggccgccgccaaggccgccaaggccagcaacaccagcacccccaccaagggcaacacagagaccagcgccagcgccagccagaccaaccacgtgaaggatgtgaagaagatcaagattgagcacgcccccagccccagcagcggcggcaccctgaagaatgacaaggccaagaccaagccacccctgcaggtgaccaaggtggagaacaacctgattgtggacaaggccaccaagaaggctgtgattgtgggcaaggagagcaagtctgctgccaccaaggaggagagcgtgtccctgaaggagaagaccaagcccctgacccccagcattggagccaaggagaaggagcagcacgtggccctggtgaccagcaccctgccccccctgcccctgccccccatgctgcctgaggacaaggaggccgacagcctgcggggcaacatctctgtgaaggctgtgaagaaggaggtggagaagaagctgcgctgcctgctggccgacctgcccctgcccccagagctgcctggaggagatgacctgagcaagagccctgaggagaagaagacagccacccagctgcacagcaagaggcggcccaagatctgtggccccaggtatggagagaccaaggagaaggacatcgactggggcaagagatgtgtggacaagtttgacatcatcggcatcattggagagggcacctacggccaggtgtacaaggcccgggacaaggacacaggagagatggtggccctgaagaaggtgcggctggacaatgagaaggagggcttccccatcacagccatccgggagatcaagatcctgcggcagctgacccaccagagcatcatcaacatgaaggagatcgtgacagacaaggaggatgccctggacttcaagaaggacaagggggccttctacctggtgtttgagtacatggaccatgacctgatgggcctgctggagagcggcctggtgcacttcaatgaaaaccacatcaagagcttcatgaggcagctgatggagggcctggactactgccacaagaagaacttcctgcaccgggacatcaagtgcagcaacatcctgctgaacaacagaggccagatcaagctggccgactttggcctggcccggctgtacagcagcgaggagagccggccctacaccaacaaggtgatcaccctgtggtacagacctcctgagctgctgctgggggaggagcgctacaccccagccattgatgtgtggagctgtggctgcatcctgggggagctgttcaccaagaagcccatcttccaggccaaccaggagctggcccagctggagctgatcagccgcatctgtggcagcccctgcccagctgtgtggccagatgtgatcaagctgccctacttcaacaccatgaagcccaagaagcagtacagaaggaagctgcgggaggagtttgtgttcatcccagctgctgccctggacctgtttgactacatgctggccctggaccccagcaagcgctgcacagctgagcaggccctgcagtgtgagttcctgagagatgtggagcccagcaagatgcctcctccagacctgcccctgtggcaggactgccacgagctgtggagcaagaagagaagacggcagaagcagatgggcatgacagatgatgtgtccaccatcaaggcccccaggaaggacctgagcctgggcctggatgacagcaggaccaacaccccccagggcgtgctgcccagcagccagctgaagagccagggcagcagcaatgtggcccctgtgaagacaggccctggccagcacctgaaccacagcgagctggccatcctgctgaacctgctgcagagcaagacctctgtgaacatggctgactttgtgcaggtgctgaacatcaaggtgaacagcgagacccagcagcagctgaacaagatcaacctgcctgctggcatcctggccaccggggagaagcagacagaccccagcaccccccagcaggagagcagcaagcccctgggcggcatccagcccagcagccagaccatccagcccaaggtggagacagatgctgcccaggccgctgtgcagagcgcctttgctgtgctgctgacccagctgatcaaggcccagcagagcaagcagaaggatgtgctgctggaggagagagaaaatggcagcggccacgaggccagcctgcagctgcggcccccacctgagcccagcacccctgtgtctggccaggatgacctgatccagcaccaggacatgaggatcctggagctgaccccagagccagaccggccccgcatcctgcccccagaccagaggcctcctgagcccccagagcccccacctgtgacagaggaggacctggactacagaacagagaaccagcacgtgcccaccaccagcagcagcctgacagacccccacgccggcgtgaaggccgccctgctgcagctgctggcccagcaccagccccaggatgaccccaagcgggagggcggcatcgactaccaggccggggacacctacgtgtccaccagtgactacaaggacaactttggcagcagcagcttcagcagcgccccctacgtgtccaatgatggcctgggcagcagcagcgccccacccctggagaggaggagcttcatcggcaacagcgacatccagagcctggacaactacagcacagccagcagccacagcggcggccccccccagcccagcgccttcagcgagagcttccccagctctgtggccggctatggagacatctacctgaatgccggccccatgctgttcagcggggacaaggaccacagatttgagtacagccacggccccatcgctgtgctggccaacagcagtgaccccagcactggacctgagagcacccaccccctgcctgccaagatgcacaactacaactacggcggcaacctgcaggagaaccccagcggccccagcctgatgcacggccagacctggaccagccctgcccagggccctggctacagccagggctaccggggccacatcagcaccagcacaggccggggccggggccggggcctgccctactag

SEQ ID NO: 140340 - DNA, 4539 bp, Artificial Sequence
  derived and/or modified sequence
atgcccagcagcagcgacaccgccctgggcggcggcggcggcctgagttgggctgagaagaagctggaagagcgaagaaagcggagacggttcctgtccccacagcaaccgcctcttcttctgccgctgctccaaccccagctgcttcagcccccgccacctccacccccactcctttttctggcggcccctggaacagccgctgcagccgccgcggcagcagcagcatcctcatcttgtttttctccggggccccctctcgaggtaaaacgccttgcccgggggaagagaagggctgggggtcggcagaaaagacgccgcggtccccgggccgggcaggaggccgagaaacggcgtgtcttttcattacctcagccccagcaggatggaggtggtggcgcctctagcggaggcggggtgacacccctagtggagtacgaagacgtgtcatcccaatccgaacagggcctgctccttggtggtgccagcgccgccaccgccgccacagccgcaggtggaacgggcgggagcgggggctcaccagctagctcgtccgggactcaacgcagaggcgaagggagtgagcggagaccacggcgggaccgacgtagcagcagcggtaggagtaaagaaagacaccgggaacataggcgccgcgatggacaacgaggtggaagcgaggcaagtaaaagcagatccagacactcacactcgggagaagaacgtgcagaggtggcaaagagcggatcttcatcgagttccggcggccgccgcaaaagcgcgtctgcaacatcgtcttctagtagcagtcgaaaagacagggactctaaggcccatcgatctcgcactaagagcagcaaggagccaccctctgcatataaggaacccccaaaggcttaccgcgaggataagacggagccaaaagcctaccggcgaagaagatctctgtcccctctcgggggtagagacgattcgccggtctcacaccgtgcctcacagtcactgcggtcacgcaaaagcccttctcccgcagggggcggctcttccccctatagcagacgtttgccgcggtcccccagtccatatagccgtcgcaggtccccatcttacagtcgccattcctcatatgagagggggggggacgtgtctccttcaccctatagctcaagctcatggcgtcgctcgagatccccatactctcctgtgctccgcaggagcggcaaaagccggtcccgttcaccttacagttctagacatagcagatccagatctcgccaccggctctccaggtccagatcacgccactcctccatctcaccttcaacacttacactgaagtccagcctggccgcagagctaaacaagaataagaaagcccgagcagcagaggccgctagggcggccgaagctgctaaggctgcggaagccactaaggccgccgaagcggctgccaaggccgctaaggcctccaacacctcaaccccgaccaaaggcaataccgagacctctgccagtgctagtcagacgaaccacgtcaaggatgtaaagaaaataaaaattgaacacgccccttcccccagcagcggaggcactttgaaaaacgacaaggccaagacaaagcccccattgcaagttaccaaagtggagaacaacttgattgtcgataaagcaaccaagaaagcagtgatcgtaggaaaggaaagcaaaagcgcagctaccaaagaggagagcgtcagcctgaaagaaaagaccaaaccactcacaccaagtatcggtgccaaggaaaaggagcaacatgtggccctagttacaagtactctgcctcccctgcctctgcccccaatgctgcccgaggacaaggaggccgacagcctcaggggaaatataagcgtgaaagctgtaaaaaaagaagtcgagaaaaaactgagatgtctcttggccgatctgccattgccgcccgaactgcccggtggcgatgacctgtccaaatccccagaggaaaaaaagactgccactcagttacatagcaaaaggagaccgaagatctgcggaccaagatatggagagacaaaggagaaagacattgactggggcaagagatgcgtagataaattcgacatcattggtatcattggagaggggacatacggacaggtctataaggcaagagataaggatacaggagagatggtcgcactgaaaaaggtgcgcctggataatgaaaaagagggattccccataacagccattcgtgaaattaaaattctgcgccagctcactcaccagtcaatcattaatatgaaagaaatcgttacggataaagaggacgctttggacttcaagaaggataagggcgccttttacctcgtgtttgaatatatggatcatgacctcatggggctgcttgagtcaggcctcgttcattttaatgaaaaccacatcaaatcttttatgcggcagcttatggaagggctggactattgccataaaaagaatttcctacatcgcgatattaagtgtagcaatattctactcaataacaggggacagataaaattggcagattttggtttagccagattatactcaagcgaagagtcaagaccatacacgaataaagttatcaccctgtggtataggccccccgagctccttttgggagaagagaggtacactcctgccatcgatgtgtggagttgtggctgcatcctaggggaactgttcacaaaaaaacctatatttcaggcaaaccaggagctcgcacagctcgagctgatctctcgcatctgcggtagcccttgcccagccgtatggccagatgtcattaagctcccgtactttaacactatgaagcccaagaaacagtataggcgcaaactgcgcgaggagttcgtatttattccagccgctgcgcttgatctgtttgattatatgcttgcattggatccgtctaagaggtgcacagccgaacaagcactgcagtgtgaattcctaagggatgtagagccaagcaaaatgccccccccagacctgccgctctggcaagattgccacgagctgtggtctaaaaagaggaggcgtcagaagcagatgggtatgactgacgatgtgagcactatcaaggctccaagaaaggatctcagtcttggcctcgacgattccagaacaaacacacctcagggcgtgttaccgagcagccagttgaagagtcaggggagtagcaatgtagcgcctgttaagactggacccggacagcatctgaaccactctgaactggcaatattgctgaacctgctgcagagtaagacttcagtcaacatggctgattttgtccaggtgctcaacattaaggtgaacagcgagactcagcagcagctgaacaaaataaatcttccggcaggtatcctggccacaggggagaagcagacagaccccagtactccccagcaggaatctagtaaacccctgggcggtattcagccctcctcacaaaccatccagcccaaagtggaaactgacgccgcacaggctgcagtacagagcgcatttgcggtactgctcacacagctgatcaaggcacaacaaagcaaacagaaggacgtgctcctagaagaacgcgagaatgggtctggacatgaggcctctcttcagcttcggccacctcccgaaccatcaacacctgtgtctggacaggatgacctaatccaacaccaggatatgcgcatactggagctgactccagagcccgacaggccccggatactgccaccagatcagcggcctcccgagccccctgaaccaccccctgtgacggaggaagacctggattacagaaccgagaatcagcacgtgccaactacatcctctagtctcaccgaccctcacgccggcgtgaaagcggcactgcttcaattattagcccagcaccagccccaggatgatccaaagcgcgaggggggaatcgattaccaagctggtgatacttacgtctcaaccagcgattataaagataactttgggagctcttcgttcagcagtgcaccgtatgtgtcaaacgacggtctgggatcatcgtctgccccacctttagagaggcgcagttttataggtaattcggatatccagagtttggataactattccacggctagctcccattcgggtggccctccccagccctccgccttttccgagagctttcccagttcagttgcagggtacggggatatttatcttaacgcggggcctatgctatttagcggtgacaaggaccacagatttgagtactcgcatgggcctatcgctgtccttgctaattccagtgacccgagcacaggccccgaatctacccacccactgcctgccaaaatgcacaattataactacggcggaaatctacaggagaatccaagtggaccctcgctgatgcacggccagacctggacctcacccgcccagggccccgggtactcacagggataccgggggcacataagtacaagcaccgggcgcggccgtggcagaggcttgccttattag

SEQ ID NO: 140341 - DNA, 4539 bp, Artificial Sequence
  derived and/or modified sequence
atgcctagttcatccgatactgctctgggcggagggggtgggctttcctgggccgagaaaaagctggaggaacgcagaaagcgacggaggttcctaagcccacaacagccaccactgttactgcccttgctgcagccacaactgttgcagcctcccccacccccacctcccctgctgttcttggcagcccctggtactgccgcagccgctgcggctgccgctgcagcatccagctcctgtttcagcccagggccaccactggaggtgaaacgtctagctcgtgggaagaggcgcgcaggtgggagacagaaaagacgcaggggccctagagcgggacaggaggcagaaaaacggcgagtttttagtctgcctcagcctcaacaagatggaggcggaggtgccagctctggtggtggagttacgccccttgtcgaatatgaggatgtctccagccagagtgagcaaggactcctgctgggtggggcatcggccgctaccgctgctacagctgccggaggaacaggcggttcaggtgggagtccagctagcagttctggtacacaacgccgaggggagggttcggaacggcgaccccgacgggatcggaggagctccagcggccgatcaaaagagcggcaccgagagcatagaagacgggatggccaaagggggggttcagaggccagtaaatctagatcacggcattcccattctggcgaagagcgcgctgaagtggccaaatctggcagttccagttcaagtggcggacggcgaaagtcggcctctgcaactagctcttcttcctccagcaggaaagacagagattctaaggcccatcgtagcagaaccaaatcatccaaagaacctccaagcgcatacaaggagccaccaaaggcatatcgggaggataaaaccgagcctaaggcctatcgacggaggagatctctaagccctttgggcggtcgagacgattctcccgtctctcatcgggcttcccagagcttgcggagccggaagagtccatctcctgccggaggcggaagttccccctattcaagacggctgccccgttccccaagtccctattcacggagacggtctccctcatatagccggcattcttcctacgagcggggaggagacgtatcaccctccccttacagttcctcatcctggaggagatcccggagtccttactcccctgtcctgaggcgaagcggcaaatcccggagccggagcccatatagctcgagacactcccggtccagatcaaggcatcgactgtccagaagcagatcccggcactccagcatttcaccctccaccctcactctgaaatcttcactggccgcagaacttaataagaacaaaaaagcacgggcagcagaggcagctagggccgcagaagctgctaaagccgcagaggcaactaaagcggcagaagcagccgctaaggcagccaaagccagtaatactagcactcctaccaaagggaacacagaaacgtcggcctcggcctctcagactaaccatgtgaaagacgttaaaaagattaaaattgaacacgccccttcccccagctcgggaggaactctcaagaatgataaggctaagaccaagcctcccctgcaggtcaccaaggtcgaaaataatctgatagtcgacaaagcgaccaagaaggcagtcatcgtgggcaaggagagcaaaagcgccgctaccaaagaagaatcggtgagtttaaaagagaagacgaagcccctcaccccatcaatcggtgccaaggagaaggagcagcacgtagccctcgtaacaagtactctccctcccctgcccctgcctccaatgctcccagaggataaagaagccgattctttgagagggaatatatcagtgaaagcagtgaagaaggaggtggaaaagaagttgcgatgtcttctggccgacctccccctcccacctgagctacctgggggagatgatctgagtaaatcccctgaagagaagaagacagctacccagctccattcaaaaagacggccaaagatctgcggacctaggtacggggaaaccaaggagaaggacatcgattgggggaagaggtgtgtggataagtttgatattattggcatcataggggaaggcacctatggacaggtgtacaaagccagggataaagataccggggaaatggttgcactcaaaaaggtacggctggataacgagaaagaggggttccccataaccgcaatcagagaaatcaagatactgcgccagctgactcaccaaagcattatcaacatgaaagaaattgtcacagacaaggaggacgcactcgactttaagaaggacaaaggggcattctatctggttttcgagtatatggaccacgacttaatgggactgctggaatctggcctcgttcattttaacgaaaatcacattaaatcctttatgcggcagcttatggaaggactcgactactgccataaaaagaatttcctgcacagggacatcaaatgtagtaacattttgctcaataaccgaggccagataaaactcgcagacttcggattggcaagactgtactcatccgaagagagccgcccatacacaaacaaggttattactctctggtacaggccacccgaactgctcctgggggaagagaggtacacaccagcgatcgacgtctggtcctgtggctgtatcctgggcgagctatttacgaaaaaacctatcttccaggcgaatcaggaactagcccagcttgagctgatcagccgcatatgtggttccccctgcccggctgtctggccggacgttataaaattgccctattttaacacgatgaagccaaaaaaacaatacaggcggaagctccgggaagagttcgtattcattccagccgcagcactggatctgttcgactacatgctcgctctggatccctctaaaaggtgtaccgccgaacaagcgttgcaatgcgagtttctgagagacgtcgagcctagtaagatgcctcccccagatctgcccctgtggcaggactgtcatgagctgtggtctaaaaagcgccgacggcagaaacagatgggcatgacggacgatgtgtctaccatcaaagcacccaggaaggacctctccctgggactggacgactctcggacgaataccccacagggagtcctgcccagcagtcaattgaaaagccagggcagcagcaatgtcgctcccgtgaagaccggcccagggcagcacctgaatcactctgaattagctatattactgaaccttctgcagtccaagactagcgtcaacatggctgattttgtgcaggtcttgaatattaaggtaaattccgagacacagcaacagttaaacaaaatcaacttacctgcagggattctcgctacgggcgagaagcagactgaccctagcacaccccagcaggagtcctctaaaccacttggaggtattcaacccagcagccagacgatacagccgaaagtggagacggacgccgctcaagctgcggtgcaaagcgcctttgccgtgctgttgacccagcttattaaagcacaacagtcaaaacagaaggatgttctgctggaagaacgagaaaatgggtctggccacgaggcttccctgcagctgagaccaccccctgaaccttccactcccgtaagcgggcaggacgacttgatacagcaccaggatatgaggatcctcgaactaactccggaaccggaccggccacggatactgccccctgaccagcgccctcccgagccccctgaaccccctcccgtgacagaggaggaccttgattacagaactgagaatcagcacgtgccaacaacaagctcctcgctcacggacccacacgccggagtaaaggccgcactcctgcaactgctcgcacagcaccaaccacaagatgatccgaaacgcgagggagggatcgattaccaggcaggggatacttacgtatccacatctgattataaggataattttggctcctcatccttttcctctgcaccatacgtgagcaacgacggcttagggagctcctccgcccctcccctggagcgcaggtccttcatcggcaatagtgatatccagagcttagataactattccactgcctccagtcactccggaggcccacctcaaccaagcgccttctcagagagctttccatctagtgtcgccggatatggagatatttacctgaacgccggtcccatgctgttcagtggtgataaggaccaccgctttgaatactctcatggcccaatcgcagtcctggcaaatagttccgacccctccacaggcccagaatctacacaccccctaccagcaaaaatgcataattataactatggcggaaacctccaagagaatccatccggtccatcgctgatgcacggccagacatggacttcgccagcccaaggtcccggatattcacagggttacagggggcacattagtacttctaccgggagggggagaggaagaggcctcccctactag

SEQ ID NO: 140342 - DNA, 7298 bp, Artificial Sequence
  derived and/or modified sequence
gccccgcgggccgcagagtgcgcgaggccctaggccgggagttgttgtcaggcccaggccacttccgaggcgcctgcggtgtgtcgccgccaccacaggaggacgacgtcgacgccgaggaggaggcggtggaggcgtgttgttgtctcgcccactcccctcccctgaacttgcacccaacgtcagggcgcgatggagtgaagcggcgacgaaggtggtacttccgcgttgcgctgcccgagccgagagcgcggccaaggccgctcccccacccccgggggcacttggaggactcgggactcccccgcaggtcagcgcccggcgcatctggtgttttcgctgccgaggataggacgacgagcgcaatcgggagctccgccgcccggattcctgcttccctggggcccggaggctgctgcgtaccccactgtgacctggaacccagggacccgagtcccgacccggattatcgtggcgcttttcccggccggctctggtgctcggtgtccctccgccgccgctcccgtttccggcgggggagatggccaggatctgacccgggaggaggccgcacccgcgccgcgctctgcggctggctctaggcgatgccgagcagctcggacacggcgctggggggaggcgggggcctgagctgggcggagaagaagttggaggaacgccgcaagcggaggcgattcctgtcccctcagcagccgccgctgctgttgccgctcctgcagccgcagctcctgcaaccgccgccgcccccgccgcctctgctcttcctggctgctcccggcacggccgccgccgcagccgccgccgccgcggcctcctcctcttgcttcagcccgggcccccctctggaggtcaagcggctggcgagaggcaagaggcgcgcaggagggcggcagaagcggcgtcgcgggccccgcgccgggcaggaggcggagaagcgtcgggtcttctcgctgccccagccgcagcaggacggcggtggcggtgctagtagcggcgggggtgtgaccccgctggtggaatacgaggatgtgagctcccagtccgagcaggggctgctgctggggggggccagcgcggcaacggcggcgacggctgccgggggaacggggggcagcggcgggagtccggcctcctcctccggcacccagcggcgcggggaggggtcggagcgcaggccccgccgggaccgccgcagcagcagtggccgcagcaaggagcgccaccgcgagcaccggcggcgggatgggcagcgcggtggcagcgaggcctccaagtcccgcagccgccacagccacagcggcgaggaacgggccgaggtcgccaagagcggcagcagcagcagcagcggcggccgccggaaaagcgcttcggccacatccagcagcagtagcagccgcaaggaccgggactcgaaggcccaccgcagccggactaagtcgtccaaggagccgccttcggcctacaaggaaccgcccaaggcctaccgggaggacaagaccgagcctaaggcctacaggcggcggcggtccctcagcccactgggaggccgggacgacagcccggtgtcccacagggcctctcagagcctgaggagccgcaagtcccccagcccggcaggaggtggcagcagcccctattctcggcggctgccgcgctccccgagcccctacagtcgccgccgctcccccagctacagccgccacagctcctacgagcggggcggcgacgtgtcccctagtccctacagcagcagcagctggcgccgctctcgcagtccctacagccctgtgctcagacggtctggaaaatcccgaagcagaagcccgtattcatctaggcattcaagatctcgtagcaggcacagattgtctagatccagaagtcgtcattctagtatttctcctagcacactaactctgaagagtagcctggcagctgaattgaacaagaataaaaaagcacgagcagcagaggcagcaagagccgcagaagcagcgaaagctgcagaagcaactaaggctgctgaggctgctgccaaggctgcaaaagcttcaaacacttctacacctaccaaggggaacacggaaactagtgccagtgcatcacaaacaaaccatgtgaaggatgtgaagaaaattaaaattgaacatgcaccttctccctcaagtggtggaactttaaaaaatgacaaagcaaaaacaaagccacctcttcaggtaacgaaggtggaaaataatttgattgtagataaagccaccaagaaagcagtcatagttggaaaggagagtaaatctgctgctacaaaggaggaatcagtatctcttaaagagaaaaccaaaccacttacaccaagcataggagccaaggagaaggagcaacatgtagctttagtcacctctacattaccaccgttacctttgcctcccatgctgcctgaagataaagaagctgatagcttacgaggaaatatttcagtaaaagcagttaaaaaagaagtagaaaagaaactccgatgtcttcttgctgatttaccgctgccccctgagctaccaggaggagatgatctttcaaagagtccagaggaaaagaaaacagcaacacagttacatagtaaaaggaggcctaaaatatgtgggcctcgctatggtgaaaccaaagaaaaagatattgactggggaaaacgctgcgtggataaatttgatatcatcggaattattggagaaggtacttacggacaagtttacaaagccagggataaagacactggagaaatggtagccttaaaaaaagtacgtctggataatgaaaaggaaggctttccaattacagcaattcgagaaattaaaattctccggcagcttacccatcagagtattatcaatatgaaggaaatagtgactgataaagaagatgctttggatttcaagaaggacaaaggtgcattttatctggtgtttgaatatatggaccatgatctgatgggactactggaatcaggcttggttcattttaatgaaaatcacataaagtcatttatgagacagctcatggagggtctggattattgtcataagaagaactttttgcatagagatattaaatgttccaatatccttctaaataatagagggcagataaaacttgcagactttggacttgctcgattgtatagctcagaagaaagtcggccgtatactaacaaggtaattactttatggtaccgtccacctgaactgctactgggagaagaacgatacacaccagccattgatgtatggagctgtggctgtatccttggcgaactcttcactaaaaaacctatatttcaagcaaatcaggaacttgcacaactagaattaataagccgaatatgtgggagtccatgtcctgcagtgtggcctgatgtaatcaaactaccatatttcaacaccatgaaaccaaagaagcaatatcgtcgaaagttaagagaagaatttgtttttattcctgcagctgcgctagacttatttgattacatgcttgccttggatcctagtaagcgctgcactgctgaacaggctcttcagtgcgagttcctccgagatgtggaaccctcaaaaatgcctccaccagatctccctttatggcaagattgtcatgagttatggagtaaaaagcgaagaagacagaagcagatgggcatgactgatgatgtttccacaattaaagcccccaggaaggacttgtctctgggcttggatgacagcagaaccaacacaccccagggtgtgctgccatcttcacagctgaaatctcagggcagctcaaatgtggcacctgtaaaaacaggccctggacagcacttaaaccacagtgaattggcaattctactaaacctactacaatctaaaacaagtgttaatatggctgattttgtccaagtgttgaacattaaggtaaactctgagactcaacagcagctaaataaaataaaccttcctgctggaattttggcaacaggtgaaaaacagacagatccatcaacaccacaacaggagtcttcgaaaccgttgggaggaattcagccttcttctcagaccatccagcctaaagtggagactgatgctgcccaggcggctgtgcagagtgcatttgcagttctgttgactcagttaataaaggctcagcagtcaaagcagaaagatgtgctactagaagagagggaaaatggatcgggacatgaagcgtcattacaactcaggccacctccagaacctagcactccggtgtcgggacaagatgacctcatccagcatcaagatatgaggatcttggagctaacgccagaaccagaccggcctcgaattctgcctcctgaccaacgacctcccgagcctcctgaaccaccaccagtcactgaggaagatctagattatcggacagaaaaccagcatgtacccaccaccagttcttcattaactgaccctcatgccggagtgaaggcagccctgttacagctgcttgctcagcatcagccccaggatgaccccaaaagagaaggtgggattgattatcaagcaggagacacttacgtgtccacttcagactacaaggacaactttggatcctcttctttctcttctgctccttatgttagcaatgatggtctaggaagcagttctgctccaccactagaacgacgtagtttcattggaaattcagatattcagtctttggataactacagtactgcttcatctcattctggtggtccacctcagccttctgccttttctgagtcatttcccagttcagtagctggatatggagacatttacctcaatgctggtcccatgttgtttagtggagacaaggaccatagatttgaatatagccatggtcctattgcagtcctggcaaacagcagtgacccttccacggggccagagagtactcatcctttgccagcaaagatgcacaactataactatggtggtaacttacaggaaaatccgagtggccccagcctcatgcatggacagacctggacttctcctgcccaaggacctggatattcacaaggatacaggggacatattagcacatcaactggcagaggcagaggcagagggttaccatactgagtatctgtttttcctcaggcacatcatttttatctggaaagacttttctagctgcaatttaaggcagcaatccaagagacttgaataataataattcaacaacagctttatttttatgtggagaagggtcttgcatacaatagtttaaaaaagacaaaaaaaacctttgcttaaattcatgctgttctaaaaactagatcgattgtacatcttcacaaattctagttaacaattttattttgtattcttgcagttttaagtggatgctaattttaggggcataagccttttatggccctcttgcagatcttctgaactatgcacatttgtgctttttttgtaagtttggaccaacttttatgtaacaaacagcccctccccacctccagttttacaacaatcagaaagggcactgatttatttggtatttttctttttacaaagctacctttagtcaaaggtcactgtcagtctttgcacctgctttcagtgttattgtgaaaggtgtactttgtgctcatttcagaaaataaaacacaacctttctcttgatgcaacagttttataaaaaaaaaaatggtcaacgttatttttgttttgttttgcagattatcaaagcctagcaaaatgcatttaaatgaaatagtgggttttatatgaaaactatgggtggggtggggagggaaagtaagtgccttaacaggtaagcttaaggtctgaaaaaaatagttaacttttacccccatttgtcttttaaagggaatcaatgcattaaaaaggcaagaaactctgaagtttcaggggctgcctgttcagttcctgttaggtccattccctctgcttgtcacactttctccttttctgcctgtctttgggctgtgttgcctttcactaccaccttctcttgataggggagtgagagcaaagaaagggagtagaactgcaatcagtacatattgtttgagaagttctacaaagttttgtcatttaaatggttgaaagtaatagctccaggagaattttagagtaccattttctttcaggctgccatattatccctgtttccatttgccatggataattggagggtcatggtatagaagcaagagttaataacagaacttgcctaaatgtgttaaagttcatgggggaggggtggcaaataccgtattttaagttatgcaattgcccttttaagaaagtcaattctattcacttgttaactagaaacattgcttagattgaatttattgaagcaaaaagaaaaggcaatgagagagaacttttatcttccttcctgtcacattctgtaaagttgattatgacttctgccagacttagagcaacaactttagttcattttaacatttttttttaatgaagagcatcaaagaatggagtagtccttatttaaactgtaatggtgtcaagtctcactgtgtgcacactctcacacatacacacacaattatactaattctagaaaggaaccaaaggtaaataaccagtgtttccattatcactaaatggaaaaattgactggaagttagagttgtgccaattaatcattttgttcatcaactgttctggtaacttatttttttttattggaatcttaaattggaacaactgttacagaatgtatattgctccagttctaaagccagttaaccctgtgccctctaacttatgaaccttcatttcaaaacagtatgtgggaagtcctgtagtttgataagagtaaaattattttaaagaggataatttaccattttactactataaaataagttgatatcagttgaccattttattttttgatggactctttttgttgggagaaagaaatgaatggaagaaaaaaatatgttgcttttatttgaatattgattactaacaacttataaactacattgcaggaaatgaagaaatattttgaaattagcaaaatagcaacagtattcaagtatctgaaattttaatatggtgagtcttagagctttagactttcctataagtgacagtatctaagttattcttaatagtcacacttgataattctgctgaccataagcagctaacctacagttgaagatatttatgtgacatgaatagcctgtgttttaaaaattaaatattttatataaaattgaa

SEQ ID NO: 140343 - DNA, 4539 bp, Artificial Sequence
  derived and/or modified sequence
atgcccagcagcagcgacaccgccctgggcggcggcggcggcctgagctgggccgagaagaagctggaggagagaagaaagagaagaagattcctgagcccccagcagccccccctgctgctgcccctgctgcagccccagctgctgcagcccccccccccccccccccccctgctgttcctggccgcccccggcaccgccgccgccgccgccgccgccgccgccgccagcagcagctgcttcagccccggcccccccctggaggtgaagagactggccagaggcaagagaagagccggcggcagacagaagagaagaagaggccccagagccggccaggaggccgagaagagaagagtgttcagcctgccccagccccagcaggacggcggcggcggcgccagcagcggcggcggcgtgacccccctggtggagtacgaggacgtgagcagccagagcgagcagggcctgctgctgggcggcgccagcgccgccaccgccgccaccgccgccggcggcaccggcggcagcggcggcagccccgccagcagcagcggcacccagagaagaggcgagggcagcgagagaagacccagaagagacagaagaagcagcagcggcagaagcaaggagagacacagagagcacagaagaagagacggccagagaggcggcagcgaggccagcaagagcagaagcagacacagccacagcggcgaggagagagccgaggtggccaagagcggcagcagcagcagcagcggcggcagaagaaagagcgccagcgccaccagcagcagcagcagcagcagaaaggacagagacagcaaggcccacagaagcagaaccaagagcagcaaggagccccccagcgcctacaaggagccccccaaggcctacagagaggacaagaccgagcccaaggcctacagaagaagaagaagcctgagccccctgggcggcagagacgacagccccgtgagccacagagccagccagagcctgagaagcagaaagagccccagccccgccggcggcggcagcagcccctacagcagaagactgcccagaagccccagcccctacagcagaagaagaagccccagctacagcagacacagcagctacgagagaggcggcgacgtgagccccagcccctacagcagcagcagctggagaagaagcagaagcccctacagccccgtgctgagaagaagcggcaagagcagaagcagaagcccctacagcagcagacacagcagaagcagaagcagacacagactgagcagaagcagaagcagacacagcagcatcagccccagcaccctgaccctgaagagcagcctggccgccgagctgaacaagaacaagaaggccagagccgccgaggccgccagagccgccgaggccgccaaggccgccgaggccaccaaggccgccgaggccgccgccaaggccgccaaggccagcaacaccagcacccccaccaagggcaacaccgagaccagcgccagcgccagccagaccaaccacgtgaaggacgtgaagaagatcaagatcgagcacgcccccagccccagcagcggcggcaccctgaagaacgacaaggccaagaccaagccccccctgcaggtgaccaaggtggagaacaacctgatcgtggacaaggccaccaagaaggccgtgatcgtgggcaaggagagcaagagcgccgccaccaaggaggagagcgtgagcctgaaggagaagaccaagcccctgacccccagcatcggcgccaaggagaaggagcagcacgtggccctggtgaccagcaccctgccccccctgcccctgccccccatgctgcccgaggacaaggaggccgacagcctgagaggcaacatcagcgtgaaggccgtgaagaaggaggtggagaagaagctgagatgcctgctggccgacctgcccctgccccccgagctgcccggcggcgacgacctgagcaagagccccgaggagaagaagaccgccacccagctgcacagcaagagaagacccaagatctgcggccccagatacggcgagaccaaggagaaggacatcgactggggcaagagatgcgtggacaagttcgacatcatcggcatcatcggcgagggcacctacggccaggtgtacaaggccagagacaaggacaccggcgagatggtggccctgaagaaggtgagactggacaacgagaaggagggcttccccatcaccgccatcagagagatcaagatcctgagacagctgacccaccagagcatcatcaacatgaaggagatcgtgaccgacaaggaggacgccctggacttcaagaaggacaagggcgccttctacctggtgttcgagtacatggaccacgacctgatgggcctgctggagagcggcctggtgcacttcaacgagaaccacatcaagagcttcatgagacagctgatggagggcctggactactgccacaagaagaacttcctgcacagagacatcaagtgcagcaacatcctgctgaacaacagaggccagatcaagctggccgacttcggcctggccagactgtacagcagcgaggagagcagaccctacaccaacaaggtgatcaccctgtggtacagaccccccgagctgctgctgggcgaggagagatacacccccgccatcgacgtgtggagctgcggctgcatcctgggcgagctgttcaccaagaagcccatcttccaggccaaccaggagctggcccagctggagctgatcagcagaatctgcggcagcccctgccccgccgtgtggcccgacgtgatcaagctgccctacttcaacaccatgaagcccaagaagcagtacagaagaaagctgagagaggagttcgtgttcatccccgccgccgccctggacctgttcgactacatgctggccctggaccccagcaagagatgcaccgccgagcaggccctgcagtgcgagttcctgagagacgtggagcccagcaagatgcccccccccgacctgcccctgtggcaggactgccacgagctgtggagcaagaagagaagaagacagaagcagatgggcatgaccgacgacgtgagcaccatcaaggcccccagaaaggacctgagcctgggcctggacgacagcagaaccaacaccccccagggcgtgctgcccagcagccagctgaagagccagggcagcagcaacgtggcccccgtgaagaccggccccggccagcacctgaaccacagcgagctggccatcctgctgaacctgctgcagagcaagaccagcgtgaacatggccgacttcgtgcaggtgctgaacatcaaggtgaacagcgagacccagcagcagctgaacaagatcaacctgcccgccggcatcctggccaccggcgagaagcagaccgaccccagcaccccccagcaggagagcagcaagcccctgggcggcatccagcccagcagccagaccatccagcccaaggtggagaccgacgccgcccaggccgccgtgcagagcgccttcgccgtgctgctgacccagctgatcaaggcccagcagagcaagcagaaggacgtgctgctggaggagagagagaacggcagcggccacgaggccagcctgcagctgagacccccccccgagcccagcacccccgtgagcggccaggacgacctgatccagcaccaggacatgagaatcctggagctgacccccgagcccgacagacccagaatcctgccccccgaccagagaccccccgagccccccgagcccccccccgtgaccgaggaggacctggactacagaaccgagaaccagcacgtgcccaccaccagcagcagcctgaccgacccccacgccggcgtgaaggccgccctgctgcagctgctggcccagcaccagccccaggacgaccccaagagagagggcggcatcgactaccaggccggcgacacctacgtgagcaccagcgactacaaggacaacttcggcagcagcagcttcagcagcgccccctacgtgagcaacgacggcctgggcagcagcagcgccccccccctggagagaagaagcttcatcggcaacagcgacatccagagcctggacaactacagcaccgccagcagccacagcggcggccccccccagcccagcgccttcagcgagagcttccccagcagcgtggccggctacggcgacatctacctgaacgccggccccatgctgttcagcggcgacaaggaccacagattcgagtacagccacggccccatcgccgtgctggccaacagcagcgaccccagcaccggccccgagagcacccaccccctgcccgccaagatgcacaactacaactacggcggcaacctgcaggagaaccccagcggccccagcctgatgcacggccagacctggaccagccccgcccagggccccggctacagccagggctacagaggccacatcagcaccagcaccggcagaggcagaggcagaggcctgccctactag

SEQ ID NO: 140344 - protein, 885 aa, Artificial Sequence
  derived and/or modified sequence
MGCAPSIHVSQSGVIYCRDSDESSSPRQTTSVSQGPAAPLPGLFVQTDAADAIPPSRASGPPSVARVRRARTELGSGSSAGSAAPAATTSRGRRRHCCSSAEAETQTCYTSVKQVSSAEVRIGPMRLTQDPIQVLLIFAKEDSQSDGFWWACDRAGYRCNIARTPESALECFLDKHHEIIVIDHRQTQNFDAEAVCRSIRATNPSEHTVILAVVSRVSDDHEEASVLPLLHAGFNRRFMENSSIIACYNELIQIEHGEVRSQFKLRACNSVFTALDHCHEAIEITSDDHVIQYVNPAFERMMGYHKGELLGKELADLPKSDKNRADLLDTINTCIKKGKEWQGVYYARRKSGDSIQQHVKITPVIGQGGKIRHFVSLKKLCCTTDNNKQIHKIHRDSGDNSQTEPHSFRYKNRRKESIDVKSISSRGSDAPSLQNRRYPSMARIHSMTIEAPITKVINIINAAQENSPVTVAEALDRVLEILRTTELYSPQLGTKDEDPHTSDLVGGLMTDGLRRLSGNEYVFTKNVHQSHSHLAMPITINDVPPCISQLLDNEESWDFNIFELEAITHKRPLVYLGLKVFSRFGVCEFLNCSETTLRAWFQVIEANYHSSNAYHNSTHAADVLHATAFFLGKERVKGSLDQLDEVAALIAATVHDVDHPGRTNSFLCNAGSELAVLYNDTAVLESHHTALAFQLTVKDTKCNIFKNIDRNHYRTLRQAIIDMVLATEMTKHFEHVNKFVNSINKPMAAEIEGSDCECNPAGKNFPENQILIKRMMIKCADVANPCRPLDLCIEWAGRISEEYFAQTDEEKRQGLPVVMPVFDRNTCSIPKSQISFIDYFITDMFDAWDAFAHLPALMQHLADNYKHWKTLDDLKCKSLRLPSDS

SEQ ID NO: 140345 - DNA, 2658 bp, Artificial Sequence
  derived and/or modified sequence
atggggtgtgccccctctatccatgtgtcacagtccggtgtgatttactgcagggattctgatgagagcagctctcctcgccagaccacctcggtctcgcagggaccagcagccccactgcccgggttgtttgtgcaaacagatgccgccgacgctattcccccctcccgggcttccggcccaccatccgttgcccgcgtacgccgagccagaacggaactgggctctggtagtagcgctggcagtgctgctcccgcagcgacaacttccagaggcaggcgccgccattgttgctcatctgccgaggctgagacacaaacatgctacacttcagtcaaacaggtgtcaagcgctgaagttcggattggaccaatgaggctgactcaagatccaattcaggtactcctcatttttgccaaagaagacagccagtccgatggtttctggtgggcttgcgacagggctggatatcgttgcaatatcgccaggacccccgaatccgcacttgaatgctttctggataagcaccacgaaatcattgtgatcgatcacagacaaacacaaaattttgacgctgaggcagtctgccggagcatccgtgccactaatccatcggaacacactgtgatcttagcggtggtgtccagggtatccgatgatcacgaggaggcaagtgttctccccctgctgcatgcggggtttaacagacgatttatggagaattcatccattattgcttgctacaacgaattgatccaaatcgagcacggtgaagtgcgaagccagtttaagctgcgggcatgcaattcagttttcactgccctggatcattgccatgaggccatcgagatcacctccgacgatcacgtgattcagtatgtgaatcccgcatttgaaaggatgatggggtaccacaagggcgagctgctcggcaaagaactcgctgacctgcccaagtccgataaaaatcgcgccgacctactggacacaattaacacgtgtataaaaaaagggaaagagtggcagggcgtctactacgctaggcgtaaatccggcgactccatacaacagcacgtaaaaataacaccggtcattgggcaaggaggcaaaattcgccattttgtcagcctgaaaaaactgtgttgcacgacagataacaataagcagatccacaagattcaccgcgactctggagacaactctcagaccgaaccccactcttttcgctataaaaaccggcgcaaagaaagcatcgatgtgaagtcaatcagttcccggggatctgatgccccatctctccagaaccggcgttatcccagcatggcccgcattcattcaatgacaattgaagcaccaatcacaaaagtgattaatatcattaacgctgcccaggagaatagcccggttaccgttgcagaagcactggaccgcgtgctggagatcctgcgcaccactgagttgtactcaccccagctgggcactaaggatgaggatccccacacaagtgacctggtgggcggactgatgacagacgggctgaggagactgagtggcaacgaatacgtgttcaccaagaacgtccaccaatctcactcgcacctggcgatgccgattactattaacgacgtgcccccctgcatttcccagctactagacaatgaggagtcctgggatttcaacatcttcgagttggaggccatcacgcataagagaccccttgtatatcttgggcttaaagttttctctcgcttcggtgtctgcgagttcctgaactgctctgaaacgactcttcgggcatggtttcaagttatcgaagcaaactatcatagctctaacgcataccataactccacccacgcagccgacgtgctccacgctaccgccttctttctggggaaggagagagtaaaagggagcctggatcagctggacgaagtggcagccctcattgccgcaaccgtgcatgatgtggaccacccaggccgaactaactccttcctctgtaacgcggggagcgaacttgccgtgttatacaacgatactgccgttctggaaagtcatcacacagctctggcgtttcaacttaccgtcaaggataccaaatgcaatattttcaagaatattgataggaaccattaccgtacccttcggcaggcaataattgatatggttttagccactgaaatgaccaagcatttcgagcatgtgaataagttcgtcaatagcataaataagcccatggctgctgaaattgagggctccgattgtgaatgcaatcctgctggaaagaatttcccagagaatcaaatactgataaagcggatgatgataaaatgtgcagacgtggctaatccatgccggccccttgatctatgcattgagtgggctggcaggatctctgaggaatatttcgctcagacggatgaggaaaaaaggcagggactgccagttgtaatgccagtgtttgaccgaaacacctgctctattcccaaaagccagatcagtttcattgactactttattactgatatgttcgatgcctgggatgccttcgcacacctgccagctctgatgcaacacttagccgacaactacaagcattggaagaccctggacgatttgaagtgtaaatccctcagactgccctcagattcatag

SEQ ID NO: 140346 - DNA, 2658 bp, Artificial Sequence
  derived and/or modified sequence
atgggctgtgcccccagcatccacgtgtcccagagcggggtcatctactgccgggacagtgatgagagcagcagcccccggcagaccacctctgtgtcccagggccctgctgcccccctgcccggcctgtttgtgcagacagatgctgctgatgccatcccccccagccgggccagcggccccccatctgtggcccgggtgcggcgggccaggacagagctgggcagcggcagcagcgctggcagcgctgccccagctgccaccaccagccggggcagaagaagacactgctgcagcagcgctgaggccgagacccagacctgctacacctctgtgaagcaggtgtcctctgctgaggtgcgcatcggccccatgaggctgacccaggaccccatccaggtgctgctgatctttgccaaggaggacagccagagtgatggcttctggtgggcctgtgacagagctggctaccgctgcaacatcgcccggaccccagagagcgccctggagtgcttcctggacaagcaccacgagatcatcgtcatcgaccaccggcagacccagaactttgatgctgaggccgtgtgccgcagcatccgggccaccaaccccagcgagcacacagtcatcctggccgtggtgtcccgggtgtctgatgaccacgaggaggcctctgtgctgcccctgctgcacgccggcttcaacagacgcttcatggagaacagcagcatcatcgcctgctacaatgaactcatccagatcgagcacggggaggtgcgcagccagttcaagctgcgggcctgcaacagcgtcttcaccgccctggaccactgccacgaggccatcgagatcaccagtgatgaccacgtgatccagtatgtgaacccagcctttgagaggatgatgggctaccacaagggggagctgctgggcaaggagctggccgacctgcccaagagtgacaagaacagagctgacctgctggacaccatcaacacctgcatcaagaagggcaaggagtggcagggcgtgtactatgcccggaggaagagcggggacagcatccagcagcacgtgaagatcacccctgtgattggccagggcggcaagatccgccactttgtgtccctgaagaagctgtgctgcaccacagacaacaacaagcagatccacaagatccaccgggacagcggggacaacagccagacagagccccacagcttccgctacaagaacagaaggaaggagagcattgatgtgaagagcatcagcagccggggcagtgatgcccccagcctgcagaacagacgctaccccagcatggcccgcatccacagcatgaccatcgaggcccccatcaccaaggtgatcaacatcatcaatgctgcccaggagaacagccctgtgacagtggccgaggccctggacagagtgctggagatcctgcggaccacagagctgtacagcccccagctgggcaccaaggatgaggacccccacaccagtgacctggtgggcggcctgatgacagatggcctgcggcggctgtctggaaatgaatatgtgttcaccaagaatgtgcaccagagccacagccacctggccatgcccatcaccatcaatgatgtgcccccctgcatcagccagctgctggacaatgaggagagctgggacttcaacatctttgagctggaggccatcacccacaagaggcccctggtgtacctgggcctgaaggtgttcagccgcttcggcgtgtgtgagttcctgaactgcagcgagaccaccctgcgggcctggttccaggtgattgaggccaactaccacagcagcaatgcctaccacaacagcacccacgccgcagatgtgctgcacgccacagccttcttcctgggcaaggagcgggtgaagggcagcctggaccagctggatgaggtggccgccctgattgctgccaccgtgcatgatgtggaccaccctggccgcaccaacagcttcctgtgcaatgccggcagcgagctggccgtgctgtacaatgacacagctgtgctggagagccaccacacagccctggccttccagctgactgtgaaggacaccaagtgcaacatcttcaagaacatcgacaggaaccactaccgcaccctgcggcaggccatcatcgacatggtgctggccacagagatgaccaagcactttgaacatgtgaacaagtttgtgaacagcatcaacaagcccatggctgctgagattgagggcagtgactgtgagtgcaacccagctgggaagaacttccctgagaaccagatcctgatcaagaggatgatgatcaagtgtgctgatgtggccaacccctgccggcccctggacctgtgcatcgagtgggccggccgcatcagcgaggagtactttgcccagacagatgaggagaagaggcagggcctgcctgtggtgatgcctgtgtttgacaggaacacctgcagcatccccaagagccagatctccttcatcgactacttcatcacagacatgtttgatgcctgggatgcctttgcccacctgcctgccctgatgcagcacctggccgacaactacaagcactggaagaccctggatgacctgaagtgcaagagcctgcggctgcccagcgacagctag

SEQ ID NO: 140347 - DNA, 2658 bp, Artificial Sequence
  derived and/or modified sequence
atgggctgcgcccccagcatccacgtgagccagagcggcgtgatctactgtagggacagcgatgaaagttcaagccctcggcagactacaagcgtaagtcagggccctgcagcccccttacccggactgtttgtgcagaccgatgctgcagatgctatcccaccgagtcgagctagtggccccccgagtgttgcgagagttcggcgggcaagaactgagttggggtcgggttcaagcgccggctctgccgcccccgcagcaactacgagccgtggccgcaggcgccactgctgctctagcgcggaggctgagacccagacctgttatacaagcgtgaaacaggtttcctcagctgaggtgcggattggccccatgagactgacccaggatccaattcaggtacttctgatttttgctaaggaggattctcagtccgacgggttttggtgggcttgcgatcgggcgggctataggtgtaatattgctcggacccctgagtccgctctggaatgtttcctggacaaacaccacgaaattatcgtcatcgaccatagacagactcagaacttcgacgccgaagccgtgtgtaggtctattcgggctaccaatccttccgaacacacggtcattttagccgtggttagtcgcgtgtctgacgaccacgaagaggcgtccgtgttacccttgctgcatgccggctttaatcggcgatttatggaaaacagttccataattgcatgctacaatgaactaattcagattgaacatggagaggtgagaagccaatttaagttaagagcctgtaattcagtgtttaccgcgctggaccactgtcacgaggccatagagatcacatctgacgatcacgtaattcagtacgtcaacccagcattcgagcggatgatgggttaccacaagggcgagctcctcgggaaggaactcgccgaccttcctaagtcagacaagaacagagccgatctcctagacactatcaatacatgcatcaaaaagggtaaagagtggcaaggagtttattacgctcggaggaaaagcggggattctatacagcagcacgtcaagataaccccagttattggccaaggcggaaagatccgccatttcgtgtctctgaaaaagctgtgttgtactaccgacaataacaagcagatccacaagattcaccgcgactcaggggataatagtcagacagaaccccattcattccgctataaaaaccgacggaaggagtcaatagatgtgaaaagcatcagttctagagggagcgacgcgccttcattacagaatcgtcgatacccgagtatggctaggatccatagcatgaccatagaggccccaattactaaagtgatcaatatcattaatgctgcacaggagaacagtcctgtgacggtagccgaggccctggaccgggtgctggagatccttcgcaccacagaactgtattcaccacagctggggacgaaggatgaggacccgcatacttcagacctggtgggtggactgatgacagacgggttacgcagactgtcaggcaatgagtatgtgttcaccaagaatgtgcaccagagccacagccatttggcaatgcctattaccattaacgatgtgccgccctgcatttcacagctgctggataatgaggaaagttgggatttcaatatctttgagctggaagccattacacataaaagaccattagtgtatctggggctgaaagttttctctagattcggggtttgcgaattcctgaactgctctgaaaccaccttgagggcatggtttcaagtgattgaggcaaactatcatagtagcaacgcataccacaattctactcacgccgctgacgtgctccatgcgaccgcattctttctggggaaagaaagagtaaaaggctcactggatcaattagatgaggtggcggctctgatcgcagctaccgtccatgacgtcgatcatccaggcagaacaaactcatttctgtgtaacgcaggtagcgaattggctgttctgtacaacgacactgctgtcctcgagagccaccacacagccctcgcatttcaactcacagtaaaggatactaagtgcaatatctttaagaatattgaccgaaaccactaccgaactctgcggcaggcgattattgacatggtgttggccacagagatgaccaagcatttcgagcacgtaaacaaattcgttaattcaattaacaagcctatggccgccgagattgagggcagtgactgcgaatgtaatcctgccggcaagaacttccccgagaatcaaatcctgatcaagaggatgatgattaagtgcgccgacgtggctaatccatgcagacctctggatctgtgtatcgaatgggcaggaagaatcagcgaagaatactttgcacagacagatgaagaaaaacggcagggactccccgtagtcatgccagtgttcgatcgcaacacatgtagtatcccaaagagtcagatcagcttcatcgactacttcatcacagacatgtttgacgcctgggacgccttcgctcatctgccagcactgatgcagcacctagcagataactacaagcactggaagacgctggacgatcttaagtgtaagtccctcaggctgccaagcgactcgtag

SEQ ID NO: 140348 - DNA, 5956 bp, Artificial Sequence
  derived and/or modified sequence
gcggccgcgggcgcgggcgggcgcgcgggggagcccggccgagggatgggctgcgcccccagcatccatgtctcgcagagcggcgtgatctactgccgggactcggacgagtccagctcgccccgccagaccaccagcgtgtcgcagggcccggcggcacccctgcccggcctcttcgtccagaccgacgccgccgacgccatccccccgagccgcgcgtcgggaccccccagcgtagcccgcgtccgcagggcccgcaccgagctgggcagcggtagcagcgcgggttccgcagcccccgccgcgaccaccagcaggggccggaggcgccactgctgcagcagcgccgaggccgagactcagacctgctacaccagcgtgaagcaggtgtcttctgcggaggtgcgcatcgggcccatgagactgacgcaggaccctattcaggttttgctgatctttgcaaaggaagatagtcagagcgatggcttctggtgggcctgcgacagagctggttatagatgcaatattgctcggactccagagtcagcccttgaatgctttcttgataagcatcatgaaattattgtaattgatcatagacaaactcagaacttcgatgcagaagcagtgtgcaggtcgatccgggccacaaatccctccgagcacacggtgatcctcgcagtggtttcgcgagtatcggatgaccatgaagaggcgtcagtccttcctcttctccacgcaggcttcaacaggagatttatggagaatagcagcataattgcttgctataatgaactgattcaaatagaacatggggaagttcgctcccagttcaaattacgggcctgtaattcagtgtttacagcattagatcactgtcatgaagccatagaaataacaagcgatgaccacgtgattcagtatgtcaacccagccttcgaaaggatgatgggctaccacaaaggtgagctcctgggaaaagaactcgctgatctgcccaaaagcgataagaaccgggcagaccttctcgacaccatcaatacatgcatcaagaagggaaaggagtggcagggggtttactatgccagacggaaatccggggacagcatccaacagcacgtgaagatcaccccagtgattggccaaggagggaaaattaggcattttgtctcgctcaagaaactgtgttgtaccactgacaataataagcagattcacaagattcatcgtgattcaggagacaattctcagacagagcctcattcattcagatataagaacaggaggaaagagtccattgacgtgaaatcgatatcatctcgaggcagtgatgcaccaagcctgcagaatcgtcgctatccgtccatggcgaggatccactccatgaccatcgaggctcccatcacaaaggttataaatataatcaatgcagcccaagaaaacagcccagtcacagtagcggaagccttggacagagttctagagattttacggaccacagaactgtactcccctcagctgggtaccaaagatgaagatcctcacaccagtgatcttgttggaggcctgatgactgacggcttgagaagactgtcaggaaacgagtatgtgtttactaagaatgtgcaccagagtcacagtcaccttgcaatgccaataaccatcaatgatgttcccccttgtatctctcaattacttgataatgaggagagttgggacttcaacatctttgaattggaagccattacgcataaaaggccattggtttatctgggcttaaaggtcttctctcggtttggagtatgtgaatttttaaactgttctgaaaccactcttcgggcctggttccaagtgatcgaagccaactaccactcttccaatgcctaccacaactccacccatgctgccgacgtcctgcacgccaccgctttctttcttggaaaggaaagagtaaagggaagcctcgatcagttggatgaggtggcagccctcattgctgccacagtccatgacgtggatcacccgggaaggaccaactctttcctctgcaatgcaggcagtgagcttgctgtgctctacaatgacactgctgttctggagagtcaccacaccgccctggccttccagctcacggtcaaggacaccaaatgcaacattttcaagaatattgacaggaaccattatcgaacgctgcgccaggctattattgacatggttttggcaacagagatgacaaaacactttgaacatgtgaataagtttgtgaacagcatcaacaagccaatggcagctgagattgaaggcagcgactgtgaatgcaaccctgctgggaagaacttccctgaaaaccaaatcctgatcaaacgcatgatgattaagtgtgctgacgtggccaacccatgccgccccttggacctgtgcattgaatgggctgggaggatctctgaggagtattttgcacagactgatgaagagaagagacagggactacctgtggtgatgccagtgtttgaccggaatacctgtagcatccccaagtctcagatctctttcattgactacttcataacagacatgtttgatgcttgggatgcctttgcacatctgccagccctgatgcaacatttggctgacaactacaaacactggaagacactagatgacctaaagtgcaaaagtttgaggcttccatctgacagctaaagccaagccacagagggggcctcttgaccgacaaaggacactgtgaatcacagtagcgtaaacgagaggccttcctttctaatgacaatgacaggtattggtgaaggagctaatgtttaatatttgaccttgaatcattcaagtccccaaatttcattcttagaaagttatgttccatgaagaaaaatatatgttcttttgaatacttaatgacagaacaaatacttggcaaactcctttgctctgctgtcatcctgtgtacccttgtcaatccatggagctggttcactgtaactagcaggccacaggaagcaaagccttggtgcctgtgagctcatctcccaggatggtgactaagtagcttagctagtgatcagctcatcctttaccataaaagtcatcattgctgtttagcttgactgttttcctcaagaacatcgatctgaaggattcataaggagcttatctgaacagatttatctaagaaaaaaaaaaaacgacataaaataagtgaaacaactaggaccaaattacagataaactagttagcttcacagcctctatggctacatggttcttctggccgatggtatgacacctaagttagaacacagccttggctggtgggtgccctctctagactggtatcagcagcctgtgtaacccctttcctgtaaaaggggttcatcttaacaaagtcatccatgatgagggaaaaagtggcatttcatttttggggaatccatgagcttcctttatttctggctcacagaggcagccacgaggcactacaccaagtattatataaaagccattaaatttgaatgcccttggacaagcttttcttaaaaaaaaaaaaaaaaagtttatatacatgtttaaaatttttattaaaatccaaattttctgggtgtaagcccatgcagtatgttgtgccatgcaccatctatacgtaatattttgggaggggataggggaagtttcaaggttcagatatttttaaccagtctatatttgaaatcatgccattagctttaacaatgttaaaattgtgtggtgtaaatatatcagaaaataggcatatggggaggcagtaaatactattttaagctattaattgtatgctaaaagcttctaaagcacaagtgcatatttttatactgctcttttcacaactccctgtgatctacataaagtcagactcgagattttcctttctcttttaccagctgatccttcctatgtattataaatattagactccgtaaacaaacttcatttttctttctctgtacttcatgctgcatttttaaaaggtataaacaaacagagactgaattaattgaatcagtaattacttttttccaatacaaattggaatgcagaatacttggaacttgtacatggggaaaaaatgacttatcactacataatgtgccaatgtttttttctatgttttgtaccaaaaatggaaaaatatgacaattccatgcaaagaaatgtatctaaattatttttgttagatgataagagaacttgcttggtcaggacagcagccagctttgtattgtaatgctatattatgtaaatgtgatgaaaatgtttttgtgaagtacttgtaactaaattcctacagccatttttcactcccaacagctgtttttattttacctctttggcctaaagttttcataatttcaaatttggggtttagtgtcctttatttcatgagtcacacactttgttttcagagcacattaaaatcaggatgccagaatcccatattaaggacctagctaacttgcctaggcttcagaagcttgcttgaggcaaggacaatctttttctgatcatctcactttcagttctatttggtaagtaacatttatcaggtgtcagacatcttctatatgaaatatttacagcttactcagttttatgtcaaatttcttgttaacttcaaactttttattagtaatgtgcaaatgtttaaaaatgctttaagacagctaggtactaaagcgtcaacaatttctgctctttaccagtgtaatctacggtataatcttctggcctgcgaactagtctattcttccacatagtcaacttgttagaaatacaggctttcagatgatatgtgtatcagatagtttatattatataaactattataactgcctcttacacagagttgtttacttaaatgtcatgtgctgaggagggccgtattaggaaaatgcaacactctctaataatttccgtgactagtaagagaaggaagccagttataaaacactgctggaccagaatgaccctataatttcctaagatcattctttatttctaatttaagatttttaaatttacttgccctccatgtcaggactggttagcattctgggcaaaaaaaaaacaagcctgtcagttcactcagaacctactcagctttagagagagaaacagaagggatgatcttgtgcccttgcgctatgtgaatatagccagagactgaggtaataaatatattttaaaataaaaatgacaagggatttgtacactgtaacactatgtagtgttacttctgctgttgcaagtatcttaactgttgaaagctaaactcaggaaatggagaaaatgtacataatatacattgacccattattttattctaaattgaaagtccaacttttagcagcagtctacctgcaactactgaacaccatcaggtttgagtccctaccagaatctcccatcatactgttatcccccatctctgtgaccttagggcatgcatgaaaacaaaagcaatctagtccctagggttggagactgccctctagacagtttttcatggcagaaaattagaatacaagtatacctcattttattgcattctgcttcattgtgcttcaaagatactgccttttctacaaattgagggcttgtggccaccctgcatagagcaagtctatcggggcattttcccagcatgggctcactttgtgtaagtgtcacattttggtaactcttagagtatttcaaatgtttttattcttgtatctgtcatggtggtctgtgatcagtgatctttgttactactgtaattgttttagggtactgcaaaccatgcccgtataagacagtgaacttaattgataaatcttgtgtatattctaactgttccaccaactagcggtttccagtctctccctcttcttagacctccctattccctgagacacaacaatatcga

SEQ ID NO: 140349 - DNA, 2658 bp, Artificial Sequence
  derived and/or modified sequence
atgggctgcgctcctagcatccatgtcagccaatcgggggttatttattgtcgggattctgatgaatcgagcagtcctcgccagacaaccagcgtctcccagggacctgcagcaccactgcctggcttgtttgtgcaaaccgacgccgctgatgctatccctccaagcagggcatccggcccacccagcgtcgctagggtccgacgcgctcgaaccgaactgggatctggttctagcgccggtagcgccgcaccagctgcaacgacctccaggggtcggcgtcgtcattgctgctcttccgccgaagcggagacacagacatgttacacatccgtaaagcaggtgagttccgccgaggtccgtatcggaccaatgaggctaacacaggatccaattcaggtcctgctcattttcgcaaaagaagattcacagagcgatggcttctggtgggcctgtgatcgggcaggataccgctgtaacatagctagaactccggaatcggctctggagtgcttcctggacaagcatcatgagatcatagtgatcgatcacaggcagactcagaacttcgatgccgaggctgtctgccgcagcattcgcgcaactaacccttccgaacacactgtgatcctggctgtcgtttcacgggtgagtgacgatcacgaagaggcttcagtgttacctctcctgcacgcgggatttaaccggcgttttatggagaacagcagcatcatcgcatgttataacgaattaatccagatcgagcatggagaagtgcgttcccaatttaagctgcgggcttgtaattccgtgtttacggctttggaccactgccatgaggccatcgaaatcaccagcgacgaccatgtgatccagtatgtcaaccctgccttcgagcggatgatgggataccacaagggagaattgctcggcaaggagcttgccgacctccctaaaagtgataagaaccgggcagacctgcttgacaccatcaacacgtgcattaaaaaaggcaaggagtggcagggcgtgtactatgccagacgcaaatctggcgacagcattcagcagcacgttaagatcactccagtgataggacaaggaggcaaaatcagacacttcgtgagtttaaagaagctgtgctgcaccaccgacaataataagcagattcacaaaatacaccgggacagcggggacaactcacagactgagccccatagtttcaggtacaaaaaccgcagaaaggaatctattgacgtgaagtcaattagcagccgagggtctgatgccccatctctgcaaaacagaagatacccctccatggcgagaattcattcgatgacgatcgaagcccctatcacaaaagtgattaacattataaatgccgcacaggagaattcaccagtgactgtggcggaagcattggatcgggtcttggagattctgcgaacaacagaactctatagccctcaattggggaccaaggatgaggacccccacacctctgatctagttggcggattgatgaccgacgggttgcgcaggttgtccggcaacgagtatgtgtttactaaaaacgtgcaccagtctcattcccatttagccatgcccattacaattaatgacgttcctccatgtatcagccaattgctcgataatgaagagagctgggactttaatatcttcgagctggaggctataacacacaagagacctttagtgtacctggggctgaaggtattctcccggttcggtgtatgcgagttccttaactgtagcgaaacaacccttcgagcgtggttccaagtcatcgaggcaaactaccacagcagcaatgcctatcataactccacgcacgccgctgatgtgctacatgcaaccgcatttttccttggcaaggaacgtgtaaagggctcgctcgaccagctggacgaggttgccgctctgattgctgccacagtgcacgatgtagatcaccccggaagaaccaactcttttctttgtaatgctggcagcgagctggctgtcctctacaatgatacagctgttctcgagagccatcacacagccctggcattccagctgacggtgaaggacaccaaatgtaacattttcaaaaatatcgacagaaaccattatcgcaccttaaggcaagcaattatcgacatggttctcgccaccgagatgaccaagcacttcgagcacgtaaataaattcgttaacagcatcaacaaaccgatggctgccgagattgaaggcagcgactgtgagtgcaatccagcgggaaagaacttccctgagaatcagatactgatcaagagaatgatgattaagtgcgcagatgtggctaacccctgtcggccacttgacctgtgcatcgagtgggcaggcaggatcagcgaggagtactttgcccagactgatgaagagaagagacaggggctgcccgttgtcatgcccgtgtttgatcgcaatacatgtagtatacccaagagccagatttctttcatagattactttattaccgacatgttcgacgcctgggatgccttcgcccacctgcccgcactgatgcaacacctggctgacaactacaagcactggaaaaccctcgacgatctcaaatgtaagtcgctccggctgccctctgattcttag

SEQ ID NO: 140350 - DNA, 2658 bp, Artificial Sequence
  derived and/or modified sequence
atgggctgcgcccccagcatccacgtgagccagagcggcgtgatctactgcagagacagcgacgagagcagcagccccagacagaccaccagcgtgagccagggccccgccgcccccctgcccggcctgttcgtgcagaccgacgccgccgacgccatcccccccagcagagccagcggcccccccagcgtggccagagtgagaagagccagaaccgagctgggcagcggcagcagcgccggcagcgccgcccccgccgccaccaccagcagaggcagaagaagacactgctgcagcagcgccgaggccgagacccagacctgctacaccagcgtgaagcaggtgagcagcgccgaggtgagaatcggccccatgagactgacccaggaccccatccaggtgctgctgatcttcgccaaggaggacagccagagcgacggcttctggtgggcctgcgacagagccggctacagatgcaacatcgccagaacccccgagagcgccctggagtgcttcctggacaagcaccacgagatcatcgtgatcgaccacagacagacccagaacttcgacgccgaggccgtgtgcagaagcatcagagccaccaaccccagcgagcacaccgtgatcctggccgtggtgagcagagtgagcgacgaccacgaggaggccagcgtgctgcccctgctgcacgccggcttcaacagaagattcatggagaacagcagcatcatcgcctgctacaacgagctgatccagatcgagcacggcgaggtgagaagccagttcaagctgagagcctgcaacagcgtgttcaccgccctggaccactgccacgaggccatcgagatcaccagcgacgaccacgtgatccagtacgtgaaccccgccttcgagagaatgatgggctaccacaagggcgagctgctgggcaaggagctggccgacctgcccaagagcgacaagaacagagccgacctgctggacaccatcaacacctgcatcaagaagggcaaggagtggcagggcgtgtactacgccagaagaaagagcggcgacagcatccagcagcacgtgaagatcacccccgtgatcggccagggcggcaagatcagacacttcgtgagcctgaagaagctgtgctgcaccaccgacaacaacaagcagatccacaagatccacagagacagcggcgacaacagccagaccgagccccacagcttcagatacaagaacagaagaaaggagagcatcgacgtgaagagcatcagcagcagaggcagcgacgcccccagcctgcagaacagaagataccccagcatggccagaatccacagcatgaccatcgaggcccccatcaccaaggtgatcaacatcatcaacgccgcccaggagaacagccccgtgaccgtggccgaggccctggacagagtgctggagatcctgagaaccaccgagctgtacagcccccagctgggcaccaaggacgaggacccccacaccagcgacctggtgggcggcctgatgaccgacggcctgagaagactgagcggcaacgagtacgtgttcaccaagaacgtgcaccagagccacagccacctggccatgcccatcaccatcaacgacgtgcccccctgcatcagccagctgctggacaacgaggagagctgggacttcaacatcttcgagctggaggccatcacccacaagagacccctggtgtacctgggcctgaaggtgttcagcagattcggcgtgtgcgagttcctgaactgcagcgagaccaccctgagagcctggttccaggtgatcgaggccaactaccacagcagcaacgcctaccacaacagcacccacgccgccgacgtgctgcacgccaccgccttcttcctgggcaaggagagagtgaagggcagcctggaccagctggacgaggtggccgccctgatcgccgccaccgtgcacgacgtggaccaccccggcagaaccaacagcttcctgtgcaacgccggcagcgagctggccgtgctgtacaacgacaccgccgtgctggagagccaccacaccgccctggccttccagctgaccgtgaaggacaccaagtgcaacatcttcaagaacatcgacagaaaccactacagaaccctgagacaggccatcatcgacatggtgctggccaccgagatgaccaagcacttcgagcacgtgaacaagttcgtgaacagcatcaacaagcccatggccgccgagatcgagggcagcgactgcgagtgcaaccccgccggcaagaacttccccgagaaccagatcctgatcaagagaatgatgatcaagtgcgccgacgtggccaacccctgcagacccctggacctgtgcatcgagtgggccggcagaatcagcgaggagtacttcgcccagaccgacgaggagaagagacagggcctgcccgtggtgatgcccgtgttcgacagaaacacctgcagcatccccaagagccagatcagcttcatcgactacttcatcaccgacatgttcgacgcctgggacgccttcgcccacctgcccgccctgatgcagcacctggccgacaactacaagcactggaagaccctggacgacctgaagtgcaagagcctgagactgcccagcgacagctag

SEQ ID NO: 140351 - protein, 288 aa, Artificial Sequence
  derived and/or modified sequence
MAATFFGEVVKAPCRAGTEDEEEEEEGRRETPEDREVRLQLARKREVRLLRRQTKTSLEVSLLEKYPCSKFIIAIGNNAVAFLSSFVMNSGVWEEVGCAKLWNEWCRTTDTTHLSSTEAFCVFYHLKSNPSVFLCQCSCYVAEDQQYQWLEKVFGSCPRKNMQITILTCRHVTDYKTSESTGSLPSPFLRALKTQNFKDSACCPLLEQPNIVHDLPAAVLSYCQVWKIPAILYLCYTDVMKLDLITVEAFKPILSTRSLKGLVKNIPQSTEILKKLMTTNEIQSNIYT

SEQ ID NO: 140352 - DNA, 867 bp, Artificial Sequence
  derived and/or modified sequence
atggcagcaaccttctttggcgaggttgtgaaagccccgtgcagagctggaacggaggatgaagaagaggaggaggaagggcgccgagagaccccagaggaccgtgaagtgcggctgcaactcgctagaaaacgcgaggtccgtctacttaggaggcagacgaaaacttccctcgaggtgtctctgctggagaaatacccctgcagcaagttcattatcgccattggcaacaacgctgtggcatttctgagcagcttcgtgatgaattcaggagtgtgggaggaagtaggttgcgccaaactctggaacgagtggtgtagaactacagataccacgcacctgtcctctacagaagccttctgtgtcttctaccatctgaagagtaatccttcagtgtttctgtgccaatgttcatgttacgtggccgaggaccagcagtatcagtggttagagaaggtttttggaagttgtccgagaaagaacatgcaaatcaccattctgacatgccggcacgtcacagattataaaacctcggaaagcacagggtctctgccaagccccttcctgcgtgccctgaagacccaaaattttaaggactctgcctgctgtccattgcttgaacagcccaacatcgtgcacgacctgcccgccgccgtactgtcatattgtcaagtgtggaaaatccccgctattctctacctatgctacaccgacgttatgaaattagacctcataactgtggaagcgtttaagcctattctctcaacgcgctcactgaaaggactagtaaagaacattccccagagcacggaaatcctcaaaaagctgatgactacgaatgagattcagagcaacatctacacttag

SEQ ID NO: 140353 - DNA, 867 bp, Artificial Sequence
  derived and/or modified sequence
atggccgccaccttcttcggggaggtggtgaaggccccctgccgggccggcacagaagatgaggaggaggaggaggagggccggcgggagaccccagaagatcgggaggtgcggctgcagctggccaggaagcgggaggtgcggctgctgcggcggcagaccaagaccagcctggaggtgtccctgctggagaagtacccctgcagcaagttcatcatcgccatcggcaacaatgctgtggccttcctgagcagctttgtgatgaacagcggcgtgtgggaggaggtgggctgtgccaagctgtggaatgagtggtgcaggaccacagacaccacccacctgagcagcacagaggccttctgtgtgttctaccacctgaagagcaaccccagcgtcttcctgtgccagtgcagctgctacgtggccgaggaccagcagtaccagtggctggagaaggtgtttggcagctgccccaggaagaacatgcagatcaccatcctgacctgcagacatgtgacagactacaagaccagcgagagcacaggcagcctgcccagccccttcctgcgggccctgaagacccagaacttcaaggacagcgcctgctgccccctgctggagcagcccaacatcgtgcatgacctgcctgctgctgtgctgagctactgccaggtgtggaagatcccagccatcctgtacctgtgctacacagatgtgatgaagctggacctgatcaccgtggaggccttcaagcccatcctgagcaccaggagcctgaagggcctggtgaagaacatcccccagagcacagagatcctgaagaagctgatgaccaccaatgagatccagagcaacatctacacctag

SEQ ID NO: 140354 - DNA, 867 bp, Artificial Sequence
  derived and/or modified sequence
atggccgccaccttcttcggcgaggtggtgaaggccccctgccgggctggaaccgaggacgaagaggaagaggaagaggggaggcgagagacccccgaagaccgcgaggtgagattgcaacttgccagaaagcgagaggttcggctgctcaggagacagaccaagactagcctagaagtgtctcttctcgaaaagtatccatgcagcaagtttataattgcaataggcaacaatgctgtagccttcttgtcatccttcgtaatgaactcaggcgtttgggaagaggtcggttgcgccaaactctggaacgaatggtgtcgcaccaccgatacgacccacctgagcagcaccgaagctttttgtgtgttttatcacctgaagtcaaacccctctgtgttcttatgtcagtgctcctgctacgtggccgaagatcagcagtaccaatggctggagaaggttttcggctcttgcccgcggaagaatatgcagataaccattttgacttgtcgtcatgtgaccgattacaagacttccgagagtaccggatcactgcccagtccattcctgagggccctcaaaactcagaacttcaaggatagcgcctgctgtccgctgttggagcaaccaaacatcgttcacgacttacccgcagccgtcttaagctactgtcaagtttggaaaatacccgccattctttatctctgttatacggacgttatgaaattagacctgatcacagtcgaggcatttaagcctatactgtccacccgaagtttaaagggcctggttaagaatataccgcagtccaccgagatattgaagaaactgatgaccacaaacgagatccaatcaaacatctacacttag

SEQ ID NO: 140355 - DNA, 867 bp, Artificial Sequence
  derived and/or modified sequence
atggctgccacgttttttggggaggtcgtcaaagccccttgcagggccggtacagaagacgaggaggaggaagaagaaggccgacgtgaaacgcccgaggaccgtgaagtgaggttgcagctcgccagaaagcgtgaagtacgcctgctgcggagacagacgaagacatcactggaagtaagcttgctcgagaaatatccatgctccaagttcataatagcaattgggaataatgccgtggcttttttatccagttttgtcatgaactctggtgtgtgggaggaggtaggatgtgccaaattgtggaatgagtggtgtagaactacagacacgacccacttatctagcactgaagctttctgcgtcttctaccatctgaagtcaaaccctagtgtcttcctgtgccagtgctcttgctacgtcgccgaggatcagcagtaccaatggctcgagaaggtgttcggtagctgcccacgcaaaaacatgcagataacaatcttgacttgccgccacgtgacagattataagacgtctgagtctacaggatccctccctagccccttcctaagggcccttaaaacacaaaactttaaggatagtgcttgctgtccactgcttgagcaaccaaacatcgtacacgaccttcccgcagccgtgttgtcctattgtcaggtctggaagatacctgccattttatacctctgctacaccgacgtcatgaaactggatctcattactgtggaagcattcaagccgatattgtcgacaaggtctctgaagggtctggtgaagaatattccacagtctacagagattttaaaaaagctgatgacgaccaatgaaatccaaagcaatatttacacatag

SEQ ID NO: 140356 - DNA, 2154 bp, Artificial Sequence
  derived and/or modified sequence
ccacctcctggcgcccgcagggctcaagctgcgaatgaaagcctttgggggccggacgcggtggctgaggcctgtaatccaagcactttgggaggtctaaggaggacgatcgctagagtcctggagttcgagaccagtctgggcaacatagcgagaccccctcccccaatctgtaatttaaaaacaaaaaagctgcggggactgctggcccagggcatgacagcgcgggcgggcggtgtagagggcgtggccgcgagctcagggtgtgcctgggagcgagccctgtgcggggcgggacgtagcgcccgcgcggtgggggtgtggccgcgagcttgggctgtgcgcggagggcgtggcctgtgcggggcgggacttattgcccgcgcggtgagggagcgtggtctcgcgcaagccggcgtgcggtcccgcggcgctgcagttgtgtccagccggtcacggggcggctatggcggccacgttcttcggagaggtggtgaaggcgccgtgccgagctgggactgaggacgaagaggaggaggaggaggggcggagggagacgcccgaggacagggaggtgcgtctgcagctggcgcggaagagggaagtgcggctccttcgaagacaaacaaaaacatctttggaagtttctttgctagaaaaatatccgtgctccaagtttataattgctataggaaataatgcagtagcatttctgtcatcatttgttatgaattcaggagtctgggaggaagttggttgtgctaaactctggaatgaatggtgtagaacaacagacactacacatctgtcctccacagaggctttttgtgtgttttatcatctaaaatccaatccctcggtttttctctgtcagtgcagttgctatgttgcagaagatcaacagtatcagtggctggaaaaggtttttggctcttgtccaaggaagaacatgcagataactattctcacatgtcgacatgttaccgattataaaacctcagaatccaccggcagccttccttctcctttcctgagagccctaaaaacacagaatttcaaagactcggcgtgttgtccattgctagaacaaccgaatatagtacacgaccttcctgcagcagttctaagctactgtcaagtatggaaaatcccagcaattctgtacttgtgttatactgatgtgatgaaattagacctaatcacagtggaagcttttaagcctatactttctaccagaagcttgaagggtttggttaagaatattccccaaagcactgagatactaaagaaattgatgacaacaaatgagattcagagtaacatttatacatgatcttaaacattgttttgtagtgtatattacttgtccattcctttaaggggagcagcctgcactcttttgtagattacttttgggggatatattttgagaatgatgaaacggaataaaattgtaaaaaattaattgtagttttaattccttatttatggtggtattattcacaaccaaaataagccaagcattttccttttatccactaggtgggagtattgttgtatttgaatattttaaggtactatagttaaatttttatcttatttatttatttatttattttttgaggctgggtcttgctctgttgcccaggctgaagtgcagtgtgctatcatggttcactgcatcctcgacctcctgggctcaagcatttcccccgcctcggcctcccaaaatgctgggattacaggtgtgagccactgtgcccaactttagttaaatttttcaaagctacagatatcagcagatggtattcatgtggcaaagtgtagttaattaggtgtaactattcattgacctgttggtgattcttaatatgtggaaagtttctggatattttaggagtcctgcagttttttttatcttgtgggtaaaaattgatgacaaagtaacaaaattatatatttactaaaaatgaaacagaaatgtgtatgtcctcactttttagtaatatctgacagatagcctcttcacccagactttcccagggctctctttcaaggctggctctgcgcgtgtcagcagttctcttacagtcatgtgttatcattaggagtgtgaatggaatcatgaacccggagtagccacacaacttcaca

SEQ ID NO: 140357 - DNA, 867 bp, Artificial Sequence
  derived and/or modified sequence
atggccgccaccttcttcggcgaggtggtgaaggccccctgcagagccggcaccgaggacgaggaggaggaggaggagggcagaagagagacccccgaggacagagaggtgagactgcagctggccagaaagagagaggtgagactgctgagaagacagaccaagaccagcctggaggtgagcctgctggagaagtacccctgcagcaagttcatcatcgccatcggcaacaacgccgtggccttcctgagcagcttcgtgatgaacagcggcgtgtgggaggaggtgggctgcgccaagctgtggaacgagtggtgcagaaccaccgacaccacccacctgagcagcaccgaggccttctgcgtgttctaccacctgaagagcaaccccagcgtgttcctgtgccagtgcagctgctacgtggccgaggaccagcagtaccagtggctggagaaggtgttcggcagctgccccagaaagaacatgcagatcaccatcctgacctgcagacacgtgaccgactacaagaccagcgagagcaccggcagcctgcccagccccttcctgagagccctgaagacccagaacttcaaggacagcgcctgctgccccctgctggagcagcccaacatcgtgcacgacctgcccgccgccgtgctgagctactgccaggtgtggaagatccccgccatcctgtacctgtgctacaccgacgtgatgaagctggacctgatcaccgtggaggccttcaagcccatcctgagcaccagaagcctgaagggcctggtgaagaacatcccccagagcaccgagatcctgaagaagctgatgaccaccaacgagatccagagcaacatctacacctag

SEQ ID NO: 140358 - protein, 260 aa, Artificial Sequence
  derived and/or modified sequence
MELTQPAEDLIQTQQTPASELGDPEDPGEEAADGSDTVVLSLFPCTPEPVNPEPDASVSSPQAGSSLKHSTTLTNRQRGNEVSALPATLDSLSIHQLAAQGELDQLKEHLRKGDNLVNKPDERGFTPLIWASAFGEIETVRFLLEWGADPHILAKERESALSLASTGGYTDIVGLLLERDVDINIYDWNGGTPLLYAVRGNHVKCVEALLARGADLTTEADSGYTPMDLAVALGYRKVQQVIENHILKLFQSNLVPADPE

SEQ ID NO: 140359 - protein, 63 aa, Artificial Sequence
  derived and/or modified sequence
MELTQPAEDLIQTQQTPASELGDPEDPGEEAADGSDTVVLSLFPCTPEPVNPEPDASVSSPQA

SEQ ID NO: 140360 - DNA, 1438 bp, Artificial Sequence
  derived and/or modified sequence
ccggacgccgcacggctcctgttccggtgtcagagggcccgccctccccgctcctcagtctttgcggacaagaaaggggctgtgtgagacgcagggaaggaggcacacccgggggtggcgcagtgaggagggggcgcgacggccaggaggctggtggagcgacacccaggcaggagagggggaagaactctctccctttctgaacccccttttccttgagagacgagttgggggagtcctccacgcattacccactcgggccgcaaaaactcccttctttagccctctgcccccgcccttgcttataagcctttgagaccgcagaagggaccttgttgtggaacgggacggccaagaggaagccagatcgctgagggtccggtctccagtttgcctcctgctatatccattggaagagaaaagtttgtgacttgggcccccaagttttgagagaactgggctttcggcgcggggggacagaggaggctcgtggggagctttccccatggagcttacccagcctgcagaagacctcatccagacccagcagacccctgcctcagaacttggggaccctgaagaccccggagaggaggctgcagatggctcagacactgtggtcctcagtctctttccctgcacccctgagcctgtgaatcctgaaccggatgccagtgtttcctctccacaggcaggcagctccctgaagcactccaccactctcaccaaccggcagcgagggaacgaggtgtcagctctgccggccaccctagactccctgtccatccaccagctcgcagcacagggggagctggaccagctgaaggagcatttgcggaaaggtgacaacctcgtcaacaagccagacgagcgcggcttcacccccctcatctgggcctccgcctttggagagattgagaccgttcgcttcctgctggagtggggtgccgacccccacatcctggcaaaagagcgagagagcgccctgtcgctggccagcacaggcggctacacagacattgtggggctgctgctggagcgtgacgtggacatcaacatctatgattggaatggagggacgccactgctgtacgctgtgcgcgggaaccacgtgaaatgcgttgaggccttgctggcccgaggcgctgacctcaccaccgaagccgactctggctacaccccgatggaccttgccgtggccctgggataccggaaagtgcaacaggtgatcgagaaccacatcctcaagctcttccagagcaacctggtgcccgctgaccctgagtgaaggccgcctgccggggactcagacactcagggaacaaaatggtcagccagagctggggaaacccagaactgacttcaaaggcagcttctggacaggtggtgggaggggacccttcccaagaggaaccaataaaccttctgtgcagaatga

SEQ ID NO: 140361 - DNA, 783 bp, Artificial Sequence
  derived and/or modified sequence
atggagttgacgcagcccgcggaagacctaatccagacccagcagacacctgcttccgagttaggcgatcctgaggatccaggggaggaagctgccgatggttccgataccgtggtgctctccctctttccctgtactccagagccagtgaatcctgagcccgatgcgtccgtgagtagtccacaagctggatccagtctgaagcatagcaccacactcaccaacagacagaggggtaacgaggtgagtgccctcccggccaccctggatagtctgtctatccaccagcttgcagcgcagggggagcttgatcagttaaaggagcatttgcgcaagggagataatctcgtgaataaaccagacgagcgcggcttcactcccctgatttgggcctccgcctttggagaaatcgaaactgtacgcttcctcctcgagtggggtgccgatccgcacatactcgccaaggagcgtgaatctgcattgagcttggcctctactggaggttacacagacatcgtcggcctgctattagaaagagatgtggatattaatatctacgactggaacgggggaacgccactcctgtacgctgttcgcggcaatcacgtcaaatgtgtggaggctctgttggcacggggcgctgacctgacgactgaagccgacagtggctatacccccatggatttagcagttgctctggggtataggaaggtgcagcaggtgattgagaaccacattctaaagcttttccagagcaacctggttccggccgatccggagtag

SEQ ID NO: 140362 - DNA, 783 bp, Artificial Sequence
  derived and/or modified sequence
atggagctgacccagcctgctgaggacctgatccagacccagcagaccccagccagcgagctgggggaccctgaagatcctggagaggaggccgcagatggcagtgacacagtggtgctgagcctcttcccctgcaccccagagcctgtgaaccctgagccagatgcctctgtgagcagcccccaggccggcagcagcctgaagcacagcaccaccctgaccaaccggcagagaggaaatgaggtgtctgccctgcctgccaccctggacagcctgagcatccaccagctggccgcccagggcgagctggaccagctgaaggagcacctgaggaagggggacaacctggtgaacaagccagatgagcggggcttcacccccctcatctgggccagcgccttcggggagattgaaacagtgcgcttcctgctggagtggggcgctgacccccacatcctggccaaggagcgggagagcgccctgagcctggccagcactggaggctacacagacatcgtgggcctgctgctggagagagatgtggacatcaacatctatgactggaatggaggcacccccctgctgtatgctgtgcggggcaaccacgtgaagtgtgtggaggccctgctggcccggggagctgacctgaccacagaggccgacagcggctacacccccatggacctggccgtggccctgggctacaggaaggtgcagcaggtgattgagaaccacatcctgaagctgttccagagcaacctggtgcctgctgaccctgagtag

SEQ ID NO: 140363 - DNA, 783 bp, Artificial Sequence
  derived and/or modified sequence
atggagctgacccagcccgccgaggacctgatccagacccagcagacgccagcatcagaactgggagacccagaggatcccggcgaagaagcagcagacggctcagataccgtggtcctgtctctgttcccatgcacacctgaaccggtgaatccagagccagatgcctctgtttcaagcccccaggccggatcttctcttaagcactcaacaaccctgactaacaggcagcgaggaaacgaagtgtccgcactccctgctactctggactctctgtcaatccatcagctagcggcgcagggtgaactggatcagctcaaggagcatttaagaaaaggagacaatttggtgaataagcccgacgaacgcggcttcactccgttaatttgggcttcggccttcggggagatcgagacagttcggttccttctggagtggggtgccgatcctcatattttggctaaggagcgggagtctgcactctccctggcctctaccgggggttacactgacatagtggggctgcttctcgagcgcgacgtggatatcaatatttatgactggaatggcgggactccactgctttatgcagttcggggaaaccacgtcaagtgtgttgaagccctccttgcccgcggcgcagatctgacaacggaggcggacagcggttacactcccatggacctcgccgtggcattaggctatcgcaaggtgcagcaagtcatagaaaaccacatcctgaaactcttccagtccaacctggtgccagccgatccggaatag

SEQ ID NO: 140364 - DNA, 783 bp, Artificial Sequence
  derived and/or modified sequence
atggagctcactcagcccgctgaagatctgatacaaacccagcagactcccgcttccgaactgggcgacccagaagacccaggtgaggaggctgccgacggcagtgacacagtcgtgctttcgctattcccttgcacccctgaacccgttaaccccgagccggacgcgagcgtctcatcaccacaagccggaagttctcttaagcattccactaccctgacaaataggcagaggggcaacgaggtgtcagccctaccagctacactagactcgctgtccatccaccagctggctgctcagggggagcttgaccaattgaaagagcacctccggaagggagacaacttggtgaacaagcctgacgagagaggatttactcctttgatttgggcttccgctttcggtgagatcgagaccgtgcgatttttgctggagtggggggcagacccccatattcttgcgaaagaacgcgaaagcgctctgagcctggcaagtacaggaggctacactgacatcgtcgggctccttctggagcgcgatgtggatataaatatatatgactggaacggcggaacccctctgctgtacgccgtccgaggaaaccatgtaaagtgcgtggaagccctcctggctagaggagctgatctgacaaccgaagccgattctggctataccccgatggacttggcggtggcattgggctaccgaaaggtgcagcaagttattgagaatcacattcttaagctcttccagtctaatctggtacctgcggatcctgagtag

SEQ ID NO: 140365 - DNA, 1389 bp, Artificial Sequence
  derived and/or modified sequence
tccccgctcctcagtctttgcggacaagaaaggggctgtgtgagacgcagggaaggaggcacacccgggggtggcgcagtgaggagggggcgcgacggccaggaggctggtggagcgacacccaggcaggagagggggaagaactctctccctttctgaacccccttttccttgagagacgagttgggggagtcctccacgcattacccactcgggccgcaaaaactcccttctttagccctctgcccccgcccttgcttataagcctttgagaccgcagaagggaccttgttgtggaacgggacggccaagaggaagccagatcgctgagggtccggtctccagtttgcctcctgctatatccattggaagagaaaagtttgtgacttgggcccccaagttttgagagaactgggctttcggcgcggggggacagaggaggctcgtggggagctttccccatggagcttacccagcctgcagaagacctcatccagacccagcagacccctgcctcagaacttggggaccctgaagaccccggagaggaggctgcagatggctcagacactgtggtcctcagtctctttccctgcacccctgagcctgtgaatcctgaaccggatgccagtgtttcctctccacaggcaggcagctccctgaagcactccaccactctcaccaaccggcagcgagggaacgaggtgtcagctctgccggccaccctagactccctgtccatccaccagctcgcagcacagggggagctggaccagctgaaggagcatttgcggaaaggtgacaacctcgtcaacaagccagacgagcgcggcttcacccccctcatctgggcctccgcctttggagagattgagaccgttcgcttcctgctggagtggggtgccgacccccacatcctggcaaaagagcgagagagcgccctgtcgctggccagcacaggcggctacacagacattgtggggctgctgctggagcgtgacgtggacatcaacatctatgattggaatggagggacgccactgctgtacgctgtgcgcgggaaccacgtgaaatgcgttgaggccttgctggcccgaggcgctgacctcaccaccgaagccgactctggctacaccccgatggaccttgccgtggccctgggataccggaaagtgcaacaggtgatcgagaaccacatcctcaagctcttccagagcaacctggtgcccgctgaccctgagtgaaggccgcctgccggggactcagacactcagggaacaaaatggtcagccagagctggggaaacccagaactgacttcaaaggcagcttctggacaggtggtgggaggggacccttcccaagaggaaccaataaaccttctgtgcag

SEQ ID NO: 140366 - DNA, 783 bp, Artificial Sequence
  derived and/or modified sequence
atggagctgacccagcccgccgaggacctgatccagacccagcagacccccgccagcgagctgggcgaccccgaggaccccggcgaggaggccgccgacggcagcgacaccgtggtgctgagcctgttcccctgcacccccgagcccgtgaaccccgagcccgacgccagcgtgagcagcccccaggccggcagcagcctgaagcacagcaccaccctgaccaacagacagagaggcaacgaggtgagcgccctgcccgccaccctggacagcctgagcatccaccagctggccgcccagggcgagctggaccagctgaaggagcacctgagaaagggcgacaacctggtgaacaagcccgacgagagaggcttcacccccctgatctgggccagcgccttcggcgagatcgagaccgtgagattcctgctggagtggggcgccgacccccacatcctggccaaggagagagagagcgccctgagcctggccagcaccggcggctacaccgacatcgtgggcctgctgctggagagagacgtggacatcaacatctacgactggaacggcggcacccccctgctgtacgccgtgagaggcaaccacgtgaagtgcgtggaggccctgctggccagaggcgccgacctgaccaccgaggccgacagcggctacacccccatggacctggccgtggccctgggctacagaaaggtgcagcaggtgatcgagaaccacatcctgaagctgttccagagcaacctggtgcccgccgaccccgagtag

SEQ ID NO: 140367 - protein, 680 aa, Artificial Sequence
  derived and/or modified sequence
MNFETSRCATLQYCPDPYIQRFVETPAHFSWKESYYRSTMSQSTQTNEFLSPEVFQHIWDFLEQPICSVQPIDLNFVDEPSEDGATNKIEISMDCIRMQDSDLSDPMWPQYTNLGLLNSMDQQIQNGSSSTSPYNTDHAQNSVTAPSPYAQPSSTFDALSPSPAIPSNTDYPGPHSFDVSFQQSSTAKSATWTYSTELKKLYCQIAKTCPIQIKVMTPPPQGAVIRAMPVYKKAEHVTEVVKRCPNHELSREFNEGQIAPPSHLIRVEGNSHAQYVEDPITGRQSVLVPYEPPQVGTEFTTVLYNFMCNSSCVGGMNRRPILIIVTLETRDGQVLGRRCFEARICACPGRDRKADEDSIRKQQVSDSTKNGDGTKRPFRQNTHGIQMTSIKKRRSPDDELLYLPVRGRETYEMLLKIKESLELMQYLPQHTIETYRQQQQQQHQHLLQKQTSIQSPSSYGNSSPPLNKMNSMNKLPSVSQLINPQQRNALTPTTIPDGMGANIPMMGTHMPMAGDMNGLSPTQALPPPLSMPSTSHCTPPPPYPTDCSIVSFLARLGCSSCLDYFTTQGLTTIYQIEHYSMDDLASLKIPEQFRHAIWKGILDHRQLHEFSSPSHLLRTPSSASTVSVGSSETRGERVIDAVRFTLRQTISFPPRDEWNDFNFDMDARRNKQQRIKEEGE

SEQ ID NO: 140368 - protein, 510 aa, Artificial Sequence
  derived and/or modified sequence
MNFETSRCATLQYCPDPYIQRFVETPAHFSWKESYYRSTMSQSTQTNEFLSPEVFQHIWDFLEQPICSVQPIDLNFVDEPSEDGATNKIEISMDCIRMQDSDLSDPMWPQYTNLGLLNSMDQQIQNGSSSTSPYNTDHAQNSVTAPSPYAQPSSTFDALSPSPAIPSNTDYPGPHSFDVSFQQSSTAKSATWTYSTELKKLYCQIAKTCPIQIKVMTPPPQGAVIRAMPVYKKAEHVTEVVKRCPNHELSREFNEGQIAPPSHLIRVEGNSHAQYVEDPITGRQSVLVPYEPPQVGTEFTTVLYNFMCNSSCVGGMNRRPILIIVTLETRDGQVLGRRCFEARICACPGRDRKADEDSIRKQQVSDSTKNGDGTKRPFRQNTHGIQMTSIKKRRSPDDELLYLPVRGRETYEMLLKIKESLELMQYLPQHTIETYRQQQQQQHQHLLQKQTSIQSPSSYGNSSPPLNKMNSMNKLPSVSQLINPQQRNALTPTTIPDGMGANRSGKSENP

SEQ ID NO: 140369 - DNA, 4927 bp, Artificial Sequence
  derived and/or modified sequence
cccggctttatatctatatatacacaggtatatgtgtatattttatataattgttctccgttcgttgatatcaaagacagttgaaggaaatgaattttgaaacttcacggtgtgccaccctacagtactgccctgacccttacatccagcgtttcgtagaaaccccagctcatttctcttggaaagaaagttattaccgatccaccatgtcccagagcacacagacaaatgaattcctcagtccagaggttttccagcatatctgggattttctggaacagcctatatgttcagttcagcccattgacttgaactttgtggatgaaccatcagaagatggtgcgacaaacaagattgagattagcatggactgtatccgcatgcaggactcggacctgagtgaccccatgtggccacagtacacgaacctggggctcctgaacagcatggaccagcagattcagaacggctcctcgtccaccagtccctataacacagaccacgcgcagaacagcgtcacggcgccctcgccctacgcacagcccagctccaccttcgatgctctctctccatcacccgccatcccctccaacaccgactacccaggcccgcacagtttcgacgtgtccttccagcagtcgagcaccgccaagtcggccacctggacgtattccactgaactgaagaaactctactgccaaattgcaaagacatgccccatccagatcaaggtgatgaccccacctcctcagggagctgttatccgcgccatgcctgtctacaaaaaagctgagcacgtcacggaggtggtgaagcggtgccccaaccatgagctgagccgtgaattcaacgagggacagattgcccctcctagtcatttgattcgagtagaggggaacagccatgcccagtatgtagaagatcccatcacaggaagacagagtgtgctggtaccttatgagccaccccaggttggcactgaattcacgacagtcttgtacaatttcatgtgtaacagcagttgtgttggagggatgaaccgccgtccaattttaatcattgttactctggaaaccagagatgggcaagtcctgggccgacgctgctttgaggcccggatctgtgcttgcccaggaagagacaggaaggcggatgaagatagcatcagaaagcagcaagtttcggacagtacaaagaacggtgatggtacgaagcgcccgtttcgtcagaacacacatggtatccagatgacatccatcaagaaacgaagatccccagatgatgaactgttatacttaccagtgaggggccgtgagacttatgaaatgctgttgaagatcaaagagtccctggaactcatgcagtaccttcctcagcacacaattgaaacgtacaggcaacagcaacagcagcagcaccagcacttacttcagaaacagacctcaatacagtctccatcttcatatggtaacagctccccacctctgaacaaaatgaacagcatgaacaagctgccttctgtgagccagcttatcaaccctcagcagcgcaacgccctcactcctacaaccattcctgatggcatgggagccaacattcccatgatgggcacccacatgccaatggctggagacatgaatggactcagccccacccaggcactccctcccccactctccatgccatccacctcccactgcacacccccacctccgtatcccacagattgcagcattgtcagtttcttagcgaggttgggctgttcatcatgtctggactatttcacgacccaggggctgaccaccatctatcagattgagcattactccatggatgatctggcaagtctgaaaatccctgagcaatttcgacatgcgatctggaagggcatcctggaccaccggcagctccacgaattctcctccccttctcatctcctgcggaccccaagcagtgcctctacagtcagtgtgggctccagtgagacccggggtgagcgtgttattgatgctgtgcgattcaccctccgccagaccatctctttcccaccccgagatgagtggaatgacttcaactttgacatggatgctcgccgcaataagcaacagcgcatcaaagaggagggggagtgagcctcaccatgtgagctcttcctatccctctcctaactgccagccccctaaaagcactcctgcttaatcttcaaagccttctccctagctcctccccttcctcttgtctgatttcttaggggaaggagaagtaagaggctacctcttacctaacatctgacctggcatctaattctgattctggctttaagccttcaaaactatagcttgcagaactgtagctgccatggctaggtagaagtgagcaaaaaagagttgggtgtctccttaagctgcagagatttctcattgacttttataaagcatgttcacccttatagtctaagactatatatataaatgtataaatatacagtatagatttttgggtggggggcattgagtattgtttaaaatgtaatttaaatgaaagaaaattgagttgcacttattgaccattttttaatttacttgttttggatggcttgtctatactccttcccttaaggggtatcatgtatggtgataggtatctagagcttaatgctacatgtgagtgacgatgatgtacagattctttcagttctttggattctaaatacatgccacatcaaacctttgagtagatccatttccattgcttattatgtaggtaagactgtagatatgtattcttttctcagtgttggtatattttatattactgacatttcttctagtgatgatggttcacgttggggtgatttaatccagttataagaagaagttcatgtccaaacgtcctctttagtttttggttgggaatgaggaaaattcttaaaaggcccatagcagccagttcaaaaacacccgacgtcatgtatttgagcatatcagtaacccccttaaatttaataccagataccttatcttacaatattgattgggaaaacatttgctgccattacagaggtattaaaactaaatttcactactagattgactaactcaaatacacatttgctactgttgtaagaattctgattgatttgattgggatgaatgccatctatctagttctaacagtgaagttttactgtctattaatattcagggtaaataggaatcattcagaaatgttgagtctgtactaaacagtaagatatctcaatgaaccataaattcaactttgtaaaaatcttttgaagcatagataatattgtttggtaaatgtttcttttgtttggtaaatgtttcttttaaagaccctcctattctataaaactctgcatgtagaggcttgtttacctttctctctctaaggtttacaataggagtggtgatttgaaaaatataaaattatgagattggttttcctgtggcataaattgcatcactgtatcattttcttttttaaccggtaagagtttcagtttgttggaaagtaactgtgagaacccagtttcccgtccatctcccttagggactacccatagacatgaaaggtccccacagagcaagagataagtctttcatggctgctgttgcttaaaccacttaaacgaagagttcccttgaaactttgggaaaacatgttaatgacaatattccagatctttcagaaatataacacatttttttgcatgcatgcaaatgagctctgaaatcttcccatgcattctggtcaagggctgtcattgcacataagcttccattttaattttaaagtgcaaaagggccagcgtggctctaaaaggtaatgtgtggattgcctctgaaaagtgtgtatatattttgtgtgaaattgcatactttgtattttgattattttttttttcttcttgggatagtgggatttccagaaccacacttgaaacctttttttatcgtttttgtattttcatgaaaataccatttagtaagaataccacatcaaataagaaataatgctacaattttaagaggggagggaagggaaagtttttttttattatttttttaaaattttgtatgttaaagagaatgagtccttgatttcaaagttttgttgtacttaaatggtaataagcactgtaaacttctgcaacaagcatgcagctttgcaaacccattaaggggaagaatgaaagctgttccttggtcctagtaagaagacaaactgcttcccttactttgctgagggtttgaataaacctaggacttccgagctatgtcagtactattcaggtaacactagggccttggaaattcctgtactgtgtctcatggatttggcactagccaaagcgaggcacccttactggcttacctcctcatggcagcctactctccttgagtgtatgagtagccagggtaaggggtaaaaggatagtaagcatagaaaccactagaaagtgggcttaatggagttcttgtggcctcagctcaatgcagttagctgaagaattgaaaagtttttgtttggagacgtttataaacagaaatggaaagcagagttttcattaaatccttttaccttttttttttcttggtaatcccctaaaataacagtatgtgggatattgaatgttaaagggatatttttttctattatttttataattgtacaaaattaagcaaatgttaaaagttttatatgctttattaatgttttcaaaaggtattatacatgtgatacattttttaagcttcagttgcttgtcttctggtactttctgttatgggcttttggggagccagaagccaatctacaatctctttttgtttgccaggacatgcaataaaatttaaaaaataaataaaaactaattaagaaattgaaaaaaaaaaaaaaaaaa

SEQ ID NO: 140370 - DNA, 2043 bp, Artificial Sequence
  derived and/or modified sequence
atgaacttcgagaccagcagatgcgccaccctgcagtactgccccgacccctacatccagagattcgtggagacccccgcccacttcagctggaaggagagctactacagaagcaccatgagccagagcacccagaccaacgagttcctgagccccgaggtgttccagcacatctgggacttcctggagcagcccatctgcagcgtgcagcccatcgacctgaacttcgtggacgagcccagcgaggacggcgccaccaacaagatcgagatcagcatggactgcatcagaatgcaggacagcgacctgagcgaccccatgtggccccagtacaccaacctgggcctgctgaacagcatggaccagcagatccagaacggcagcagcagcaccagcccctacaacaccgaccacgcccagaacagcgtgaccgcccccagcccctacgcccagcccagcagcaccttcgacgccctgagccccagccccgccatccccagcaacaccgactaccccggcccccacagcttcgacgtgagcttccagcagagcagcaccgccaagagcgccacctggacctacagcaccgagctgaagaagctgtactgccagatcgccaagacctgccccatccagatcaaggtgatgaccccccccccccagggcgccgtgatcagagccatgcccgtgtacaagaaggccgagcacgtgaccgaggtggtgaagagatgccccaaccacgagctgagcagagagttcaacgagggccagatcgccccccccagccacctgatcagagtggagggcaacagccacgcccagtacgtggaggaccccatcaccggcagacagagcgtgctggtgccctacgagcccccccaggtgggcaccgagttcaccaccgtgctgtacaacttcatgtgcaacagcagctgcgtgggcggcatgaacagaagacccatcctgatcatcgtgaccctggagaccagagacggccaggtgctgggcagaagatgcttcgaggccagaatctgcgcctgccccggcagagacagaaaggccgacgaggacagcatcagaaagcagcaggtgagcgacagcaccaagaacggcgacggcaccaagagacccttcagacagaacacccacggcatccagatgaccagcatcaagaagagaagaagccccgacgacgagctgctgtacctgcccgtgagaggcagagagacctacgagatgctgctgaagatcaaggagagcctggagctgatgcagtacctgccccagcacaccatcgagacctacagacagcagcagcagcagcagcaccagcacctgctgcagaagcagaccagcatccagagccccagcagctacggcaacagcagcccccccctgaacaagatgaacagcatgaacaagctgcccagcgtgagccagctgatcaacccccagcagagaaacgccctgacccccaccaccatccccgacggcatgggcgccaacatccccatgatgggcacccacatgcccatggccggcgacatgaacggcctgagccccacccaggccctgcccccccccctgagcatgcccagcaccagccactgcacccccccccccccctaccccaccgactgcagcatcgtgagcttcctggccagactgggctgcagcagctgcctggactacttcaccacccagggcctgaccaccatctaccagatcgagcactacagcatggacgacctggccagcctgaagatccccgagcagttcagacacgccatctggaagggcatcctggaccacagacagctgcacgagttcagcagccccagccacctgctgagaacccccagcagcgccagcaccgtgagcgtgggcagcagcgagaccagaggcgagagagtgatcgacgccgtgagattcaccctgagacagaccatcagcttcccccccagagacgagtggaacgacttcaacttcgacatggacgccagaagaaacaagcagcagagaatcaaggaggagggcgagtag

SEQ ID NO: 140371 - DNA, 2043 bp, Artificial Sequence
  derived and/or modified sequence
atgaatttcgaaacatctcggtgtgcaactctgcagtattgtcctgatccttacattcagcgctttgtggagacccctgcacacttttcctggaaggagtcatactataggagcaccatgagccaatccacccaaacaaatgagtttctttcccctgaagttttccagcacatttgggactttcttgagcagccgatatgttcagtgcagccaatcgatctcaacttcgtggatgagcccagcgaggacggggctaccaataagatcgaaatatctatggattgtatacgtatgcaggattccgacttgagcgaccctatgtggccccagtatacaaacctcggcctgctgaattcaatggatcagcagatccaaaacggcagcagttccacgagtccctataacaccgatcacgcccagaattcggtgaccgctccatccccatacgcacagccttcctccacctttgatgcactgtcacctagccccgccattcctagtaatacagattaccctgggcctcatagctttgacgtgtccttccagcagtcatctacggcaaagagcgcgacctggacctactcaacagagctgaagaaactctattgccaaatcgctaagacttgtcctattcagatcaaagtaatgacacccccaccacagggcgcagttatcagggctatgccagtttataaaaaggccgaacacgtcaccgaggtggttaaacgctgcccaaatcacgaactcagtagagagttcaacgagggacagattgctccaccctcccacctgattcgtgtggaaggaaacagccatgcccagtatgtggaagacccaatcaccggccgccagtctgtgcttgtgccttatgaacccccccaagtaggcactgaattcacaaccgtcctgtacaatttcatgtgtaatagcagttgcgtgggggggatgaacagaaggccaatattgataattgtcacactggaaactcgcgacgggcaggtactaggtcgaaggtgttttgaggctaggatctgcgcctgccccggcagagacagaaaggcggatgaagactctatccggaaacagcaggtcagtgactccaccaaaaatggggacgggaccaagcggcccttcagacagaacacacacgggattcagatgacatctataaagaagcgaaggtcaccggacgacgagttgctgtatcttccggtgcgcggccgcgagacttacgaaatgttactcaaaataaaggagagcctggaattgatgcagtacctcccccagcacaccatagagacctatagacagcagcagcagcagcaacaccagcatctgctccagaagcagaccagtattcagagcccatcgtcctacggcaattccagcccgcccctgaacaaaatgaatagcatgaataagctaccatccgtcagtcagttaattaacccgcaacagcggaacgcattgacgccgacaaccatcccggacgggatgggcgccaacatccctatgatggggacacacatgcctatggcaggggacatgaacggcctgtccccaactcaggcgcttcccccacctctgagcatgccatccacctctcactgcacacctccacccccttacccaacagactgttctatcgtctcattcttggccagattaggctgtagctcctgcctagactactttaccacacagggactcaccaccatataccagattgagcattattctatggatgatttagcctccctgaagatccccgaacagttccggcatgctatttggaagggcattcttgaccataggcaactccacgagttctcctcaccatcccatctattgcgaactccttcttccgcttctaccgtgagcgtaggatcatcggagactagaggggagcgcgtcatagacgctgtacggttcactttgagacagacgatcagcttccctccacgtgatgaatggaacgatttcaatttcgacatggatgccaggcgcaataagcagcagcggatcaaggaagagggcgaatag

SEQ ID NO: 140372 - DNA, 2043 bp, Artificial Sequence
  derived and/or modified sequence
atgaactttgagaccagccgctgtgccaccctgcagtactgcccagacccctacatccagagatttgtggagaccccagcccacttctcctggaaggagagctactaccgcagcaccatgagccagagcacccagaccaatgagttcctgagccctgaggtgttccagcacatctgggacttcctggagcagcccatctgcagcgtgcagcccatcgacctgaactttgtggatgagcccagtgaagatggagccaccaacaagattgagatctccatggactgcatccgcatgcaggacagcgacctgagtgaccccatgtggccccagtacaccaacctgggcctgctgaacagcatggaccagcagatccagaatggcagcagcagcaccagcccctacaacacagaccacgcccagaacagcgtgacagcccccagcccctatgcccagcccagcagcacctttgatgccctgagccccagccctgccatccccagcaacacagactacccaggcccccacagctttgatgtgtccttccagcagagcagcacagccaagagcgccacctggacctacagcacagagctgaagaagctgtactgccagatcgccaagacctgccccatccagatcaaggtgatgaccccaccaccccagggcgctgtgatccgggccatgcctgtgtacaagaaggccgagcacgtgacagaggtggtgaagcgctgccccaaccacgagctgagccgggagttcaatgaaggccagatcgccccacccagccacctgatccgggtggagggcaacagccacgcccagtatgtggaggaccccatcaccggccggcagagcgtgctggtgccctatgagcccccccaggtgggcacagagttcaccaccgtgctgtacaacttcatgtgcaacagcagctgtgtgggcggcatgaacagaagacccatcctgatcatcgtgaccctggagaccagagatggccaggtgctgggccgccgctgctttgaggcccgcatctgtgcctgccccggccgggacaggaaggcagatgaggacagcatcaggaagcagcaggtgtctgacagcaccaagaatggagatggcaccaagaggcccttccggcagaacacccacggcatccagatgaccagcatcaagaagagaagaagcccagatgatgagctgctgtacctgcctgtgcggggccgggagacctatgagatgctgctgaagatcaaggagagcctggagctgatgcagtacctgccccagcacaccatcgagacctaccggcagcagcagcagcagcagcaccagcacctgctgcagaagcagaccagcatccagagccccagcagctatggcaacagcagcccccccctgaacaagatgaacagcatgaacaagctgcccagcgtgtcccagctgatcaacccccagcagagaaatgccctgacccccaccaccatcccagatggcatgggcgccaacatccccatgatgggcacccacatgcccatggccggggacatgaatggcctgagccccacccaggccctgcccccacccctgtccatgcccagcaccagccactgcaccccacctccaccctaccccacagactgcagcatcgtgtccttcctggcccggctgggctgcagcagctgcctggactacttcaccacccagggcctgaccaccatctaccagatcgagcactacagcatggatgacctggccagcctgaagatccctgagcagttcagacatgccatctggaagggcatcctggaccaccggcagctgcacgagttcagcagccccagccacctgctgcggacccccagcagcgccagcacagtgtctgtgggcagcagcgagaccagaggagagcgggtgattgatgctgtgcgcttcaccctgcggcagaccatctccttccccccaagagatgagtggaatgacttcaactttgacatggatgcccggaggaacaagcagcagaggatcaaggaggagggggagtag

SEQ ID NO: 140373 - DNA, 2043 bp, Artificial Sequence
  derived and/or modified sequence
atgaacttcgagaccagccggtgcgccaccctgcagtactgccccgacccttacattcagcgtttcgtggaaactccggcccacttctcttggaaggagtcctattatcgctcgacaatgagtcagtcgacacagacaaacgagttcttatccccagaagtcttccagcacatttgggattttctggagcagcctatatgttccgtccagcccatagacctgaacttcgtagacgaaccctcggaagatggggccacaaataagatagaaatctcaatggactgtatcaggatgcaggacagcgacctcagtgacccaatgtggcctcagtacacaaatttggggctgctcaactctatggatcagcagatccagaacggctccagttcaacatccccatataataccgaccacgcccaaaactcagtcaccgcgccgtctccttatgcccagccaagctcaactttcgacgctctttcacccagtcccgctattcccagtaacacagactatcccgggccacattccttcgatgtcagcttccaacagagctctacggccaagagcgcaacctggacttactctactgagttgaagaaactctattgtcagatcgcaaaaacatgtcctatccagattaaggtgatgacacctccaccacaaggggccgtaatcagggccatgcccgtgtacaagaaggctgaacacgtgaccgaagtggttaagcgctgtcctaaccatgagctgagtcgagagttcaacgagggacaaatcgcccctccatcccacttgatcagagtcgagggcaattcccatgcacagtacgtcgaagatcccatcactggtagacagagtgttcttgtcccgtacgagccaccacaggtcggcactgaattcaccacagtcttgtacaatttcatgtgcaattccagctgcgttggcgggatgaatcgccgacctattttaatcatcgtgacactggagaccagagatggccaagtcctggggcgaaggtgcttcgaagcacgcatttgcgcgtgtcctggaagagatcgcaaggcagacgaggactcgatacgcaaacagcaggtaagcgactcgacaaagaacggggatgggaccaaaaggccgttccgacagaacactcacggaattcagatgacctcaataaaaaagcggagatccccggacgatgaactgttgtatttgccagttagaggccgcgagacttatgagatgttactgaagataaaagagagcctggagctgatgcagtatttgccacagcataccatcgagacatatcgccagcagcagcaacagcagcaccaacacctgttgcaaaagcaaacctccattcaatcaccttccagctacggaaactcaagtcctcccttgaacaaaatgaattcgatgaacaagttacccagcgtctctcagcttattaaccctcagcagcgaaacgcgctgacaccaacaacaatacctgacggcatgggcgctaatattcccatgatggggactcacatgccaatggccggtgacatgaatggtctgtccccaacacaagccttgccaccacctttgtcgatgccatctacttcccactgcactccccctcccccgtaccccactgattgtagtattgtgtcttttttggccagactgggatgcagtagctgtttggactacttcacaacacagggattgaccaccatctaccagattgagcactatagcatggatgaccttgcgtcactgaagattcccgagcagtttagacacgccatctggaagggtattctcgatcaccgacaactgcatgagttttcatcaccttcgcatctgctgaggaccccttcatctgctagcaccgtgtccgtgggatcaagcgagaccaggggcgagcgcgtgattgacgctgtgagatttactttgcgccagacaatctctttccccccaagggacgaatggaacgatttcaactttgacatggacgcccggagaaataaacaacagaggatcaaagaggaaggtgaatag

SEQ ID NO: 140374 - DNA, 2043 bp, Artificial Sequence
  derived and/or modified sequence
atgaacttcgagacatcaagatgtgctacgcttcaatactgccccgacccgtacatccagagattcgtagagaccccagcccattttagctggaaggagtcctactatcggtccacaatgagccagtctactcaaacaaatgagttcttaagtccagaagtattccaacatatttgggactttctcgaacagcccatttgcagcgtgcagccaatcgaccttaatttcgtcgacgagccatctgaagatggggctactaataagatcgaaatttctatggactgcatcaggatgcaggacagcgacctgtctgatccaatgtggccccagtacactaaccttgggctgctgaattctatggaccaacaaatacagaacggcagcagcagcaccagcccctataataccgatcacgcacagaatagcgtgaccgctccaagtccctacgcacagccctcgagcactttcgatgccctcagccccagccccgctataccctctaacactgattacccaggaccgcatagtttcgatgtttcttttcagcagagcagcaccgcaaagtcagccacctggacatactccaccgagttaaaaaagctgtactgtcagatcgctaaaacttgccctatccagatcaaagtaatgactccgccaccccagggcgcagtaattagagccatgcctgtgtacaagaaggcagagcacgtgactgaggtggttaagaggtgtccgaaccacgagctcagccgggaatttaatgagggacagattgctccgccaagccatcttattcgggttgagggtaactcacacgctcagtacgttgaagatcccataaccggtcgccagtccgtcctggttccatacgagcccccacaagtgggcaccgagttcaccaccgtactgtataattttatgtgcaactcttcctgcgttggtggtatgaatcgcagacccatcctcataattgtcaccctggagacgcgagacgggcaggtgctggggagaaggtgtttcgaagctcgcatctgcgcctgcccgggtcgggatagaaaggccgatgaagacagcatacggaagcaacaggtctccgactctacgaagaacggagacggcacaaagagaccctttcgccaaaatactcacggcatccagatgacatccatcaagaaacgcagatcgcccgatgacgaattgctctacctgccggtcagaggccgtgagacctacgaaatgcttttgaagattaaagagtcactagaactgatgcaatatctacctcagcacacaattgagacctacaggcagcagcagcaacagcagcatcagcacctgctgcagaaacagacatctattcagtcaccctcatcgtacgggaacagttcacctcccctcaataaaatgaattccatgaacaaactaccctccgtttcccagttaattaacccacagcaacggaatgctctcacgcctaccaccatccctgacggaatgggcgctaatattcccatgatggggacacacatgccaatggcaggcgatatgaatggcctgtcccctacgcaagccctccctccaccgctgagcatgccgagcacttcccattgtacaccacctcccccttacccgactgattgtagtatagttagcttcctcgccagactgggctgtagcagttgcctagactatttcaccacccaaggtctgaccacgatctaccagatcgagcactattccatggatgatctggcttccctgaaaattcctgaacagttcaggcacgctatatggaaaggtattctcgatcacagacaactgcacgaattttctagcccctctcacctgctgcgaacgccctcatcagccagcactgtaagcgtaggttcctcggagacgcgcggagaacgggtaattgacgctgtccggttcacactgcgacagacaatctcctttccaccgagagatgaatggaatgatttcaacttcgatatggacgctcgaagaaataaacagcagagaatcaaagaggaaggcgaatag

SEQ ID NO: 140375 - DNA, 4909 bp, Artificial Sequence
  derived and/or modified sequence
cccggctttatatctatatatacacaggtatatgtgtatattttatataattgttctccgttcgttgatatcaaagacagttgaaggaaatgaattttgaaacttcacggtgtgccaccctacagtactgccctgacccttacatccagcgtttcgtagaaaccccagctcatttctcttggaaagaaagttattaccgatccaccatgtcccagagcacacagacaaatgaattcctcagtccagaggttttccagcatatctgggattttctggaacagcctatatgttcagttcagcccattgacttgaactttgtggatgaaccatcagaagatggtgcgacaaacaagattgagattagcatggactgtatccgcatgcaggactcggacctgagtgaccccatgtggccacagtacacgaacctggggctcctgaacagcatggaccagcagattcagaacggctcctcgtccaccagtccctataacacagaccacgcgcagaacagcgtcacggcgccctcgccctacgcacagcccagctccaccttcgatgctctctctccatcacccgccatcccctccaacaccgactacccaggcccgcacagtttcgacgtgtccttccagcagtcgagcaccgccaagtcggccacctggacgtattccactgaactgaagaaactctactgccaaattgcaaagacatgccccatccagatcaaggtgatgaccccacctcctcagggagctgttatccgcgccatgcctgtctacaaaaaagctgagcacgtcacggaggtggtgaagcggtgccccaaccatgagctgagccgtgaattcaacgagggacagattgcccctcctagtcatttgattcgagtagaggggaacagccatgcccagtatgtagaagatcccatcacaggaagacagagtgtgctggtaccttatgagccaccccaggttggcactgaattcacgacagtcttgtacaatttcatgtgtaacagcagttgtgttggagggatgaaccgccgtccaattttaatcattgttactctggaaaccagagatgggcaagtcctgggccgacgctgctttgaggcccggatctgtgcttgcccaggaagagacaggaaggcggatgaagatagcatcagaaagcagcaagtttcggacagtacaaagaacggtgatggtacgaagcgcccgtttcgtcagaacacacatggtatccagatgacatccatcaagaaacgaagatccccagatgatgaactgttatacttaccagtgaggggccgtgagacttatgaaatgctgttgaagatcaaagagtccctggaactcatgcagtaccttcctcagcacacaattgaaacgtacaggcaacagcaacagcagcagcaccagcacttacttcagaaacagacctcaatacagtctccatcttcatatggtaacagctccccacctctgaacaaaatgaacagcatgaacaagctgccttctgtgagccagcttatcaaccctcagcagcgcaacgccctcactcctacaaccattcctgatggcatgggagccaacattcccatgatgggcacccacatgccaatggctggagacatgaatggactcagccccacccaggcactccctcccccactctccatgccatccacctcccactgcacacccccacctccgtatcccacagattgcagcattgtcagtttcttagcgaggttgggctgttcatcatgtctggactatttcacgacccaggggctgaccaccatctatcagattgagcattactccatggatgatctggcaagtctgaaaatccctgagcaatttcgacatgcgatctggaagggcatcctggaccaccggcagctccacgaattctcctccccttctcatctcctgcggaccccaagcagtgcctctacagtcagtgtgggctccagtgagacccggggtgagcgtgttattgatgctgtgcgattcaccctccgccagaccatctctttcccaccccgagatgagtggaatgacttcaactttgacatggatgctcgccgcaataagcaacagcgcatcaaagaggagggggagtgagcctcaccatgtgagctcttcctatccctctcctaactgccagccccctaaaagcactcctgcttaatcttcaaagccttctccctagctcctccccttcctcttgtctgatttcttaggggaaggagaagtaagaggctacctcttacctaacatctgacctggcatctaattctgattctggctttaagccttcaaaactatagcttgcagaactgtagctgccatggctaggtagaagtgagcaaaaaagagttgggtgtctccttaagctgcagagatttctcattgacttttataaagcatgttcacccttatagtctaagactatatatataaatgtataaatatacagtatagatttttgggtggggggcattgagtattgtttaaaatgtaatttaaatgaaagaaaattgagttgcacttattgaccattttttaatttacttgttttggatggcttgtctatactccttcccttaaggggtatcatgtatggtgataggtatctagagcttaatgctacatgtgagtgacgatgatgtacagattctttcagttctttggattctaaatacatgccacatcaaacctttgagtagatccatttccattgcttattatgtaggtaagactgtagatatgtattcttttctcagtgttggtatattttatattactgacatttcttctagtgatgatggttcacgttggggtgatttaatccagttataagaagaagttcatgtccaaacgtcctctttagtttttggttgggaatgaggaaaattcttaaaaggcccatagcagccagttcaaaaacacccgacgtcatgtatttgagcatatcagtaacccccttaaatttaataccagataccttatcttacaatattgattgggaaaacatttgctgccattacagaggtattaaaactaaatttcactactagattgactaactcaaatacacatttgctactgttgtaagaattctgattgatttgattgggatgaatgccatctatctagttctaacagtgaagttttactgtctattaatattcagggtaaataggaatcattcagaaatgttgagtctgtactaaacagtaagatatctcaatgaaccataaattcaactttgtaaaaatcttttgaagcatagataatattgtttggtaaatgtttcttttgtttggtaaatgtttcttttaaagaccctcctattctataaaactctgcatgtagaggcttgtttacctttctctctctaaggtttacaataggagtggtgatttgaaaaatataaaattatgagattggttttcctgtggcataaattgcatcactgtatcattttcttttttaaccggtaagagtttcagtttgttggaaagtaactgtgagaacccagtttcccgtccatctcccttagggactacccatagacatgaaaggtccccacagagcaagagataagtctttcatggctgctgttgcttaaaccacttaaacgaagagttcccttgaaactttgggaaaacatgttaatgacaatattccagatctttcagaaatataacacatttttttgcatgcatgcaaatgagctctgaaatcttcccatgcattctggtcaagggctgtcattgcacataagcttccattttaattttaaagtgcaaaagggccagcgtggctctaaaaggtaatgtgtggattgcctctgaaaagtgtgtatatattttgtgtgaaattgcatactttgtattttgattattttttttttcttcttgggatagtgggatttccagaaccacacttgaaacctttttttatcgtttttgtattttcatgaaaataccatttagtaagaataccacatcaaataagaaataatgctacaattttaagaggggagggaagggaaagtttttttttattatttttttaaaattttgtatgttaaagagaatgagtccttgatttcaaagttttgttgtacttaaatggtaataagcactgtaaacttctgcaacaagcatgcagctttgcaaacccattaaggggaagaatgaaagctgttccttggtcctagtaagaagacaaactgcttcccttactttgctgagggtttgaataaacctaggacttccgagctatgtcagtactattcaggtaacactagggccttggaaattcctgtactgtgtctcatggatttggcactagccaaagcgaggcacccttactggcttacctcctcatggcagcctactctccttgagtgtatgagtagccagggtaaggggtaaaaggatagtaagcatagaaaccactagaaagtgggcttaatggagttcttgtggcctcagctcaatgcagttagctgaagaattgaaaagtttttgtttggagacgtttataaacagaaatggaaagcagagttttcattaaatccttttaccttttttttttcttggtaatcccctaaaataacagtatgtgggatattgaatgttaaagggatatttttttctattatttttataattgtacaaaattaagcaaatgttaaaagttttatatgctttattaatgttttcaaaaggtattatacatgtgatacattttttaagcttcagttgcttgtcttctggtactttctgttatgggcttttggggagccagaagccaatctacaatctctttttgtttgccaggacatgcaataaaatttaaaaaataaataaaaactaattaagaaattg

SEQ ID NO: 140376 - protein, 568 aa, Artificial Sequence
  derived and/or modified sequence
MASKPAAGKSRGEKRKRVVLTLKEKIDICTRLEKGESRKALMQEYNVGMSTLYDIRAHKAQLLRFFASSDSNKALEQRRTLHTPKLEHLDRVLYEWFLGKRSEGVPVSGPMLIEKAKDFYEQMQLTEPCVFSGGWLWRFKARHGIKKLDASSEKQSADHQAAEQFCAFFRSLAAEHGLSAEQVYNADETGLFWRCLPNPTPEGGAVPGPKQGKDRLTVLMCANATGSHRLKPLAIGKCSGPRAFKGIQHLPVAYKAQGNAWVDKEIFSDWFHHIFVPSVREHFRTIGLPEDSKAVLLLDSSRAHPQEAELVSSNVFTIFLPASVASLVQPMEQGIRRDFMRNFINPPVPLQGPHARYNMNDAIFSVACAWNAVPSHVFRRAWRKLWPSVAFAEGSSSEEELEAECFPVKPHNKSFAHILELVKEGSSCPGQLRQRQAASWGVAGREAEGGRPPAATSPAEVVWSSEKTPKADQDGRGDPGEGEEVAWEQAAVAFDAVLRFAERQPCFSAQEVGQLRALRAVFRSQQQVRRRRGALGAVVKVEALQEGPGGCGATAQSPLPCSSTAGDN

SEQ ID NO: 140377 - DNA, 1707 bp, Artificial Sequence
  derived and/or modified sequence
atggccagcaagcccgccgccggcaagagcagaggcgagaagagaaagagagtggtgctgaccctgaaggagaagatcgacatctgcaccagactggagaagggcgagagcagaaaggccctgatgcaggagtacaacgtgggcatgagcaccctgtacgacatcagagcccacaaggcccagctgctgagattcttcgccagcagcgacagcaacaaggccctggagcagagaagaaccctgcacacccccaagctggagcacctggacagagtgctgtacgagtggttcctgggcaagagaagcgagggcgtgcccgtgagcggccccatgctgatcgagaaggccaaggacttctacgagcagatgcagctgaccgagccctgcgtgttcagcggcggctggctgtggagattcaaggccagacacggcatcaagaagctggacgccagcagcgagaagcagagcgccgaccaccaggccgccgagcagttctgcgccttcttcagaagcctggccgccgagcacggcctgagcgccgagcaggtgtacaacgccgacgagaccggcctgttctggagatgcctgcccaaccccacccccgagggcggcgccgtgcccggccccaagcagggcaaggacagactgaccgtgctgatgtgcgccaacgccaccggcagccacagactgaagcccctggccatcggcaagtgcagcggccccagagccttcaagggcatccagcacctgcccgtggcctacaaggcccagggcaacgcctgggtggacaaggagatcttcagcgactggttccaccacatcttcgtgcccagcgtgagagagcacttcagaaccatcggcctgcccgaggacagcaaggccgtgctgctgctggacagcagcagagcccacccccaggaggccgagctggtgagcagcaacgtgttcaccatcttcctgcccgccagcgtggccagcctggtgcagcccatggagcagggcatcagaagagacttcatgagaaacttcatcaacccccccgtgcccctgcagggcccccacgccagatacaacatgaacgacgccatcttcagcgtggcctgcgcctggaacgccgtgcccagccacgtgttcagaagagcctggagaaagctgtggcccagcgtggccttcgccgagggcagcagcagcgaggaggagctggaggccgagtgcttccccgtgaagccccacaacaagagcttcgcccacatcctggagctggtgaaggagggcagcagctgccccggccagctgagacagagacaggccgccagctggggcgtggccggcagagaggccgagggcggcagaccccccgccgccaccagccccgccgaggtggtgtggagcagcgagaagacccccaaggccgaccaggacggcagaggcgaccccggcgagggcgaggaggtggcctgggagcaggccgccgtggccttcgacgccgtgctgagattcgccgagagacagccctgcttcagcgcccaggaggtgggccagctgagagccctgagagccgtgttcagaagccagcagcaggtgagaagaagaagaggcgccctgggcgccgtggtgaaggtggaggccctgcaggagggccccggcggctgcggcgccaccgcccagagccccctgccctgcagcagcaccgccggcgacaactag

SEQ ID NO: 140378 - DNA, 1707 bp, Artificial Sequence
  derived and/or modified sequence
atggccagtaagccagccgccggcaaaagtaggggggaaaagcggaaaagagtcgtccttactcttaaggaaaaaattgacatatgtactaggctggaaaagggggaatcgcggaaagcactcatgcaggaatacaacgtggggatgagcactctatacgacatccgcgcccacaaggctcagctactgaggttctttgcatcctcggatagtaacaaggcactcgaacaaagacgcaccttgcacacccccaaactagagcatctagatagagtgctgtacgagtggttcttgggcaaaagaagcgagggcgtgcctgtgagtgggcccatgcttatcgagaaagccaaggatttttacgaacagatgcagttaactgagccttgcgtgttttccggaggatggctatggcgcttcaaggccaggcatgggattaagaagctcgacgcttcatccgagaaacagtccgctgatcatcaggctgccgaacagttttgcgccttcttcagatccttagccgccgagcatggcctgagcgcagagcaggtctacaatgccgatgagacaggtctcttctggaggtgtctcccaaaccctacgccggaaggaggtgcagttcctgggcccaagcagggaaaggatcggctgactgtccttatgtgtgccaatgcaacgggcagccacaggctgaaacccctggccattgggaaatgcagcggcccaagggcgttcaaaggaattcagcatctccccgtagcatataaggcacaggggaatgcatgggtggataaagagatcttttctgactggtttcaccacatctttgttccatctgtgcgagagcactttcggactatcggtcttcccgaggatagcaaagctgttctcctacttgattcatccagggctcacccccaggaggctgaactcgtgtcgagtaatgtgtttaccatttttcttcccgcgtcggtggcatcattggttcagcctatggaacaggggatacgacgcgattttatgagaaatttcattaaccctccagttccactccaggggccccacgcaagatataacatgaacgatgcgatttttagtgtagcatgtgcgtggaatgcagtgccatcacacgtattccgcagagcatggcggaaattgtggcctagcgtcgcctttgccgaggggtcatcctctgaggaagaacttgaggcggagtgttttccagttaagccccataacaaatcgttcgctcacattctggaacttgtgaaggagggctcgtcctgtcctggtcagctccgacagcgccaagcagcctcctggggagtggcgggccgcgaggccgaaggggggcgacctcctgctgcaacaagtcccgcagaagtcgtgtggagcagtgagaaaacaccgaaggctgatcaggatggtagaggcgaccccggcgaaggcgaggaggtcgcctgggaacaggccgccgtcgcgttcgacgctgttcttcgctttgccgaaagacagccctgtttctccgctcaggaggtgggccagttaagggccctccgcgctgtgttcaggtctcaacagcaggtcaggcggcgtcgcggtgctctgggtgctgttgtcaaagtcgaggcactacaggagggccctggtggatgtggcgccaccgctcagtcgcctctaccttgtagcagcaccgccggggataactag

SEQ ID NO: 140379 - DNA, 1707 bp, Artificial Sequence
  derived and/or modified sequence
atggccagcaagccagctgctgggaagagcagaggagagaagaggaagagggtggtgctgaccctgaaggagaagattgacatctgcacccggctggagaagggggagagcaggaaggccctgatgcaggagtacaacgtgggcatgagcaccctgtatgacatccgggcccacaaggcccagctgctgcgcttctttgccagcagtgacagcaacaaggccctggagcagaggaggaccctgcacacccccaagctggagcacctggacagagtgctgtatgagtggttcctgggcaagaggtctgagggcgtgcctgtgtctggccccatgctgattgagaaggccaaggacttctatgagcagatgcagctgacagagccctgtgtgttcagcggcggctggctgtggaggttcaaggcccggcacggcatcaagaagctggatgccagcagcgagaagcagagcgctgaccaccaggccgctgagcagttctgtgccttcttccgcagcctggccgctgagcacggcctgtctgctgagcaggtgtacaatgctgatgaaacaggcctcttctggcgctgcctgcccaaccccaccccagagggcggcgctgtgcccggccccaagcagggcaaggaccggctgactgtgctgatgtgtgccaatgccaccggcagccaccggctgaagcccctggccatcggcaaatgttctggcccccgggccttcaagggcatccagcacctgcctgtggcctacaaggcccagggcaatgcctgggtggacaaggagatcttcagtgactggttccaccacatctttgtgcccagcgtgcgggagcacttccgcaccatcggcctgcctgaggacagcaaggctgtgctgctgctggacagcagccgggcccacccccaggaggccgagctggtgagcagcaatgtgttcaccatcttcctgcctgcctctgtggccagcctggtgcagcccatggagcagggcatccggcgggacttcatgaggaacttcatcaacccccctgtgcccctgcagggcccccacgcccgctacaacatgaatgatgccatcttctctgtggcctgtgcctggaatgctgtgcccagccacgtgttcagaagagcctggaggaagctgtggcccagcgtggcctttgctgagggcagcagcagcgaggaggagctggaggccgagtgcttccctgtgaagccccacaacaagagctttgcccacatcctggagctggtgaaggagggcagcagctgccccggccagctgcggcagaggcaggccgcctcctggggcgtggccggccgggaggccgagggcggccggcccccagctgccaccagccctgctgaggtggtgtggagcagcgagaagacccccaaggctgaccaggacggccgcggggaccctggagagggggaggaggtggcctgggagcaggccgctgtggcctttgatgctgtgctgcgctttgctgagcggcagccctgcttcagcgcccaggaggtgggccagctgcgggccctgcgggctgtgttccgcagccagcagcaggtgagaagaagaagaggagccctgggcgctgtggtgaaggtggaggccctgcaggagggccctgggggctgtggggccacagcccagagccccctgccctgcagcagcacagctggggacaactag

SEQ ID NO: 140380 - DNA, 8010 bp, Artificial Sequence
  derived and/or modified sequence
cccctgaagtgctgtgcctggagataccattgtggaccctggagaggcacctgctgcttatgcgagagaattggcagctgactgcactgccaggagccaaggcctaggtgtgtggagcctggaagaccagggatacctgaggcaggaggtgcagcgtgtggagtgagaaacccgagagggactggggcctgtgctcaggatcagcagagcaggcaggcagagtggagagggagagacggagccccagaaggggagcaggaggagagggaagtagtggcagcagcccaggccaggcgtgtgtcctgcaagtgctaggaccagccacccctccccatggcctccaagccggctgccgggaagagcagaggggagaagcggaagagggtggtgctgacactgaaggagaagattgacatctgcacgcgcctggagaagggcgagagccggaaggcactgatgcaggagtacaatgtgggcatgtccaccctctacgacatcagggcccacaaggcgcagctgctccggttcttcgccagctccgactccaacaaggcgctggagcagcggcgcacgctgcacacgcccaagctggagcacctggaccgcgtcctgtacgagtggttcctggggaagcgctccgagggcgtccccgtgtcaggccccatgctcatcgagaaggccaaggacttctacgagcagatgcagctcactgagccctgcgtgttctccggagggtggctttggcgctttaaggccagacacggcattaaaaagctagatgcatccagtgaaaagcagtcagccgaccaccaggccgcggagcagttctgtgcgtttttcaggagcttggctgctgagcacgggctgtccgccgagcaggtttacaacgctgatgagaccggccttttctggcggtgcctgccaaatcccactccggaaggcggggctgtgcctggccccaagcagggcaaggaccggctgaccgtgctgatgtgtgccaacgccacgggctcccacaggctcaagcccttggccatcgggaagtgcagcggtcccagggctttcaaaggcatccagcacctgcccgtcgcctataaggcccaggggaacgcctgggtggacaaggagattttttccgattggttccatcatatctttgtgccctcggtgagagagcacttcagaaccataggtttgccggaagacagcaaagccgttctcttgctggacagctcccgggctcacccgcaggaggccgagctggtgtccagtaacgttttcaccatcttcctgcctgccagcgtggcctcattggtgcagcccatggagcagggcattcggagagatttcatgaggaacttcattaaccctccggtccccctgcagggcccccacgcccgctacaacatgaacgatgccatattcagcgtggcctgtgcctggaacgcagtccctagccacgtcttcaggcgggcctggaggaagctgtggccgtcggttgcgtttgccgaaggctcctcctctgaggaggagttggaggcagagtgcttcccagtgaagccccacaacaagtcctttgcacacatcctggagcttgtgaaggaaggctcctcctgcccgggccagcttcgccagcgccaggccgccagctggggggtagcgggaagggaggcagaagggggacggccccctgctgccacgtcgccagcagaggttgtgtggagttcagaaaagactccgaaagctgaccaggacggcagaggagatcctggtgagggcgaggaggtggcctgggagcaggcggccgtggcctttgacgcagtcctgcgctttgcggagcggcagccatgcttcagtgcgcaggaagtggggcagctgcgggcgctgcgtgccgtgttccggagccagcagcaggtgaggaggcggcgtggtgccctcggggctgtggtcaaggttgaagccctccaggagggccctggtggctgtggggccacagctcagtctcccttgccctgctcatccacagcaggtgacaactgatggcttctctgccctgccctggccactggccctgtttctccccacaccctggagtggcatggtcctgtgccccgaccccacctgaggcaggagggcatgtgcagacactcaagagcccttccaggagtgggtcgcccacgggtgtggctcgggtgcccaggacggtctgtgcccgaggttcctgtcaatacaggttttattttatcacttgccgtgtcatccgaaagtgaggaaatgttttggaagggtccaccctagcctagaacaagccagagccgcaccctggctggaatgggggccaggctgagccgatctggtctcgtgttcgctggctgatcattgcagtatcagagggtggagatgtcagtctgtccacgtggagagaagttgccctccaggccgacaggaggccatgcccaccgcccctggacaggcttcgtctcagaaggctctatctgctgggctggcggccatccccgtgttgggtggaccccgagcacggttgcctgaggtccgatggcccgagagctgggactcagttcttggcctgctagcggctgaacaggccgcacatctcacttcagttgtggcctcattcagcagaatgactctggaaccatcctctgttacccgcagatcctgtcccatgggctctggccccaagatgttggggggccccacggagagttgacttggtagagttcctttctgggaagaaagtaggagtggctgaccaggccctgctcatcacccggatagaggacacggaccctgtgtggtattttggcattttggctcagagtccaatgtaccatgttgcccagaatttcatacttatggcctttacatgaatacgtcttgatcagacattcagagattagtcttaggtttgcacgtaagtcactgaaaacagtaaaacaggctgcttagatttctagcagtatgtgtgctcttatccccagctgttagcacgttagtaatacttttggggaggagttgtctgtcctggtcagttttcacagaggcggttgtaagaggatgtggttattttctccatgtctgtagttgctttgcggcatctccatttcacgggcaacactcactgcctgcagctgagattccagaacgccctgtgtccacagtgattagcctcgtctttcagcgagcataaaataggtgcattgtccttttcttttcttgaggcagggtctcactctgttgaccaggctggagtgaagtggtgtgatcccagctcactgcagcctcgacctccctggcttgagtgatcctcccgccccagcctcctgagtagctgggactagaggcacgcaccaccgcgcctttttattttttttgtagagacagggtctcactgtgttgcccaggctggtcttgaactcttggcctcaagcgatcctccttcctcatccttctaaagtgctgggattacaggtgtgagccacagcactcggcctaaataggtttttcttgctatgttattttcagtgctttgcccttgaattcttttcctctcttaaattcatatcatttggccgagtcagcacgtagtttgcattccagcgtctgctgttgattccactgaaacctctgttctcatgaaggagaggatttggctcgctgtggtttctcgtactttcacatctctgtagatacaggggcaaaagtcattgctgacagagccctatctatgtcctggaagtgtgtgtttcttgctttgaatgcatgtgtgaagattataaaagccaaatagtttttaaagatctcggtgctgaacgacagtcccagttcccatttgtgtcccattgtctttgtggtgtcacccgcactgtttgcttcattgtctggggaacttctgcacatcatgtactttgtgccatttctgggctcacgtgtcactcctaatagagcctcttaaccaagactgctggattgcagctgcttgaggcaacacaggaggttagaacatgtcccgagggctctgaaacagtaggacatcctgggtgggtggagctggggagggcatgggcaggccagctggccgagctcctggctggctctcctgagtcctctggacatggcttgtccctgtcagactgtagctcttcaggacctgagctcttcccgttcttgatctgctcttgtgctgactgtgctgggctgatgggtaggcgcttgtccccagtgagtggctgtgtcctcagggtgcccctcttccagaccaactgcagcaaggcctggagcctgactctaggtgcagcccttgtggctggaatcccttgtgccacccaggggactcgggccctgctcctcctgcagcccctcctcacctgggctcgctgctggagtgaggtttttagggagcccagagcgtactcatctctgagctgctgggcccagctgcctggtgcatacctcttgcctcggtcctgtcccccagaacgctttatggagactgccgtgtcctccgagcactttgttttcacttcctgacccgtctcagaagctcaagtggttgaatgttttagcctcagaatctttttccccaagccctctcaggtggagccccgctgtaccagacaccacagcacagctctgtgaggctgtgtctcttcactctgtttctggggctgctgaggcccctgggaagccctggagcttgccagagcagagcgagaaagtctctggtcctgtttaaatgcctccgcgttttatctgtgagcaccaggctggagccactccctgtcttctcacagtgcccctgcaagttgcagcctcagttttccagtggctcgtggggtagcaggtgctgcgtcatatggtttgggacctctgtggctgcttccagcctgctaatagaacctctttccaccactgccttcatctttggggtggcacccctgagtgctcaggcctgagggcgctcctgtgtcctcactcgggacaggcagcctccactctgggagctcccatccctcgggatgcccaggagaggccatactttcagggtggcatggtgaattcaggggttaggatgggtaggtggtctttcagccccttctacgttggggttggtttacagaacacctgtcctgcctgtgccagcctggccttctgcgagcaccccaggcacgctgtcctggaagttgtctgtctcctgcataggagggtctagagcagaccttgccctgggcctgtctgtgcgtgacttccatatgcttcattcgtgctcagccatggctgagcatgcgatggagagcacctggactgcccctgacgtcgcaggccactgttcttatccagtgggccaagtgattgattgctagtggtggagttgattggaagaaaggaagtcgcagcccctgcccacggcttccccagctcgctggggttggaggactgtcatcagttgtccccagttaaagtccatttggaggaggttcagggtcccagtggctggatgtgcttgtggagggacacggtttgaggcaggggtttgcagaaggtgtagactgcatccattcttgggaggctgtggcacagggcagcgacaacttgggacaaatcaagacccgtccacactgcacctcagggacctcacctcacgccccacataaatgtgcttattggggatccgggtgtggtggcttctgcctgaaatcccagtactctggaaggccacggcaggaggatcactttagttcaggagtttgaaaccagcctgggcaacatagggagaccccatctctacagaaagtaaaagaaaatgagccaggtgtggtggcatgtgcctgtaaccccagctactcaggaggccgaggcgggaggatccccaagcccaggagtttgaggctgcagtgagttatggcctctgcactccagcctgggtgacagagtgagagacctaatctctaaaaacaaaaaataacaaaatgtgctttggggtcaggtgtggagatcagggtcggggaggtcatgaggtaggtaggggtcaggatgtggacagtcatgggctggtgggtgtggcagccgtgaggggtgggtggtggcctgggaggcagggcctgggcagggcttctgcacttctgctgcttacccagccccctctgggttcgaggactctccttgacaagggctgagctctcgggcactgcgttggactcagctgcctactgggaggctggggagaatggacctgtgagaccttgtttgtcctcttccctgcccagctcttgtagaccccaggcctggctgtccgcagggccaggagctgcagccatggcagccaccagcctcccacatgagccccagctcccagccccacacgcccactcctttgcccatgtggtgtcagctctggcctctgcttctacacatggaccctcagaccttgcacatctgttgtttcccttgcagggcagtgatgatgacatgaaatgaggtggggtcactcctgtttagggatgagactggggcccagggaggggcaggtgtgaagttgctgagggcagagggagacccagggctacctgctcctaatgaccagcctcacgttctccactgctcactccctgctgttcaccagctgcatgaccttgagcagtgcactcaactgtaaacagaggtgaaaacactcctttaccaactgttttaggggccactcttgtttgaggccttgaacctcctttcagttccgtggtggtcctgagcctctgaatctgggtatggcccctgctgggtcctggtctcttaggcagcacgatggcctccctgctcaaggccctgcacccaggggcagattgtgggaggcccactggccatggctgggccctatcgcagagagcctgtcagcacggccatttccacacccaggctggctgggaagcaagctacgaggtgctcaaaggccctctatgtctgcaggtagccccgtcccacacaggcgaggatcgttgggcctccttagtagccaaaggaactgaggtccagagcagggaatgtgttgcccagtgtcagcatggtctgctctggggtcaggcgtcttgccctggtcctaagccaccccaagccaaggcatgtccctgggcccatttcctctctcgaggtcttgggttccctatttctgatgtgtgtgaaaggaaggcctgtcctctggggtgaccatgaggctcagtgggaggagctgccaggcttgagctgggacttggcacctggccagccttttttctatttcattgtaccttgatgggctgtcagttctgaagagaaaaaatacactaggaatccattcttcctccaccattctccctggcagagggaagtgactacacccctatggtgtggacatactgacgctcctccatgaagcagcaaagttctgttgtttcaggagactgtgggccttgaggatgtggtagtgacctcaccagaggagttggcaattcctaagtgctgcctggaggcctctacagagacataatgttggagaacttctgccacatggcagtgctgggtaagacccctctgtccccaccagtgcccttgaggttatgggtgttggtaggtctgtggcctccatctccatgacgatggtgttaaggactgcatgtttgtgtccccccccaaagtttatatgttgaaaccctgacccccaggagggtggtattaggaggtggggcctttgggaggtgactaggcttaggtgagatcgtgagggtggggctcgccgatgagatcgagtccttataagaaaaggaaggaactagagcgaggtcactttgtgctgtgtgagcatacaagaaaactgccatcttcaagctgggtgcagtggctcacgcctgtaatcccagcactggaaggccaaggcattaggattgcatgagtccaggagttcgagaccagcctaggcatgataagaccttattgctaaaaaaaaaaaaaaaggaaataaaa

SEQ ID NO: 140381 - DNA, 1707 bp, Artificial Sequence
  derived and/or modified sequence
atggccagcaagcccgccgccggcaagagccggggcgagaagcggaagcgtgtggttctgacccttaaagagaaaattgatatttgtacccgtctggaaaagggagagtcacggaaagcgctcatgcaggaatataatgtcggcatgtccaccctgtacgacatccgagcacacaaggctcagttactcaggttttttgccagctcagattccaacaaggccctggaacaacggaggacactccatacccctaagctggaacacctggatcgagttctctatgaatggttcttaggcaagcggtctgaaggagtgcctgtgtctgggccaatgctgatagagaaggctaaagatttttatgaacagatgcagctcacagagccatgcgtgtttagcgggggctggctctggcgttttaaagcgcggcacggaatcaaaaagctggacgcctcttccgaaaaacaatccgctgatcaccaggcggcagaacagttttgcgcgtttttcaggtcactagccgctgaacacggactctcagctgagcaggtttacaacgctgacgagactggcctgttttggcggtgcctgcctaatccaaccccggagggaggcgccgtgccggggccaaagcaaggtaaagaccggctgaccgttcttatgtgtgctaacgctaccggtagccatcgtctcaaacctttagccataggaaaatgctccggacctagagcattcaaagggatccagcacctccctgtcgcctacaaagctcaaggaaacgcctgggtggacaaggaaatattcagtgattggtttcaccacattttcgtaccctccgtgcgggagcactttcgcaccattggcctcccagaagattcgaaagccgtcctcctgttggactctagccgagcccatcctcaggaggccgagctggtgagctcaaacgtctttacaatatttctacctgcatccgtggcatccttagttcagccaatggagcaggggatccgcagagatttcatgagaaattttattaatccaccagtgcctctccaaggtccacatgcccgatataacatgaatgatgccattttctccgttgcctgtgcttggaatgcggtaccttcccacgtgttcagaagagcctggcgtaaactgtggccctcggtagcatttgccgagggatcttcctcagaggaagaactggaagcagaatgctttccagtgaagccccataacaagtcatttgcccatatactggaacttgtgaaggagggaagctcatgtcctgggcagctgcgacagcgccaggcagccagctggggcgtcgcgggccgtgaagcggaggggggtcggcccccagctgccacctcccccgccgaagttgtttggagctccgagaaaacccccaaggctgaccaggacggcagaggagatccaggtgagggggaagaggtagcttgggagcaagccgccgtggcttttgacgccgtgctgcgctttgcagagagacagccctgtttctctgcccaagaggtcggccagcttagagcgctgcgagcagtgttccggtcccagcagcaggtgaggcggcgccgaggtgcactcggagccgtggtgaaagtcgaggcactacaggagggtccaggcggctgtggtgcgaccgctcagtcacctttgccatgctctagcactgcaggagacaactag

SEQ ID NO: 140382 - DNA, 1707 bp, Artificial Sequence
  derived and/or modified sequence
atggcatccaagcccgctgccggaaaatctaggggagagaagagaaagcgggtggtcctcacgctgaaagagaaaattgacatttgcacaaggttggagaagggggagtctcgcaaggcgcttatgcaggaatataatgtgggcatgagcaccctgtatgacatccgagcccacaaggcccagctgctgcgattctttgcatccagtgattctaataaagctctagagcaacgaaggactttgcacaccccaaagctggagcatctagatcgagtcctgtatgagtggtttctgggcaagcggtctgagggagtgcctgtgagcggaccaatgctcattgaaaaagctaaagatttttatgaacaaatgcagctcactgagccctgcgttttcagcggcggatggctgtggaggttcaaggctagacacgggattaagaaactcgatgctagcagtgaaaagcagagcgccgaccaccaagccgctgaacagttttgcgcgttctttagaagcctcgctgctgagcatgggctgtcagctgagcaggtttacaacgcagatgagactggactgttctggcggtgtctgccaaatcccacgcctgagggaggtgctgtgcccggtcccaaacagggtaaagatcggctgacagttctcatgtgcgctaatgcaacaggctcacatcggctgaagcctttggctatcggtaagtgcagcggcccaagggccttcaaaggcatccagcacctgcccgtagcctacaaggcgcagggcaatgcctgggtagacaaggagattttctcagactggttccatcacatatttgtgccatccgttcgcgaacattttagaacaatcggactgcctgaagattccaaagctgtcctactcctggacagttctagagcacacccacaggaagctgagttggtgagttcaaacgtgtttacaattttcttgcctgcaagcgtcgcctccctggttcaacctatggagcagggtattaggagggatttcatgcggaacttcattaaccctcccgtgccactgcagggaccccacgctcgttacaacatgaatgacgccatcttcagcgtggcgtgtgcctggaatgctgttccatcacatgtgttcagaagagcctggcgtaaattgtggccctctgtggcttttgctgaaggatcctcttctgaggaggaactggaggcagagtgctttccagttaaaccgcacaataaaagtttcgcgcacattctcgaactcgtaaaagaaggctcatcctgcccagggcaactaaggcaaaggcaggccgcttcatggggagtcgccggtcgagaggccgaaggtggtcgcccaccagccgctacctcgccggctgaagtggtctggtcaagcgaaaaaacgcctaaggccgatcaagacgggagaggcgacccaggcgagggagaagaggttgcctgggaacaggccgcagtagcttttgacgctgtcctgagattcgcggagcgccaaccttgcttttctgctcaggaggtaggacaactccgcgcactgagagccgtttttaggtcccagcagcaggtgaggcgcagacggggagcacttggcgctgtggtaaaggtggaggcgctacaagaaggccctgggggatgtggcgctaccgcccagtctccactcccgtgttcatccactgccggagacaactag

SEQ ID NO: 140383 - protein, 359 aa, Artificial Sequence
  derived and/or modified sequence
MQAAALPEEIRWLLEDAEEFLAEGLRNENLSAVARDHRDHILRGFQQIKARYYWDFQPQGGDIGQDSSDDNHSGTLGLSLTSDAPFLSDYQDEGMEDIVKGAQELDNVIKQGYLEKKSKDHSFFGSEWQKRWCVVSRGLFYYYANEKSKQPKGTFLIKGYGVRMAPHLRRDSKKESCFELTSQDRRSYEFTATSPAEARDWVDQISFLLKDLSSLTIPYEEDEEEEEKEETYDDIDGFDSPSCGSQCRPTILPGSVGIKEPTEEKEEEDIYEVLPDEEHDLEEDESGTRRKGVDYASYYQGLWDCHGDQPDELSFQRGDLIRILSKEYNMYGWWVGELNSLVGIVPKEYLTTAFEVEER

SEQ ID NO: 140384 - DNA, 1080 bp, Artificial Sequence
  derived and/or modified sequence
atgcaggccgccgccctgcccgaggagatcagatggctgctggaggacgccgaggagttcctggccgagggcctgagaaacgagaacctgagcgccgtggccagagaccacagagaccacatcctgagaggcttccagcagatcaaggccagatactactgggacttccagccccagggcggcgacatcggccaggacagcagcgacgacaaccacagcggcaccctgggcctgagcctgaccagcgacgcccccttcctgagcgactaccaggacgagggcatggaggacatcgtgaagggcgcccaggagctggacaacgtgatcaagcagggctacctggagaagaagagcaaggaccacagcttcttcggcagcgagtggcagaagagatggtgcgtggtgagcagaggcctgttctactactacgccaacgagaagagcaagcagcccaagggcaccttcctgatcaagggctacggcgtgagaatggccccccacctgagaagagacagcaagaaggagagctgcttcgagctgaccagccaggacagaagaagctacgagttcaccgccaccagccccgccgaggccagagactgggtggaccagatcagcttcctgctgaaggacctgagcagcctgaccatcccctacgaggaggacgaggaggaggaggagaaggaggagacctacgacgacatcgacggcttcgacagccccagctgcggcagccagtgcagacccaccatcctgcccggcagcgtgggcatcaaggagcccaccgaggagaaggaggaggaggacatctacgaggtgctgcccgacgaggagcacgacctggaggaggacgagagcggcaccagaagaaagggcgtggactacgccagctactaccagggcctgtgggactgccacggcgaccagcccgacgagctgagcttccagagaggcgacctgatcagaatcctgagcaaggagtacaacatgtacggctggtgggtgggcgagctgaacagcctggtgggcatcgtgcccaaggagtacctgaccaccgccttcgaggtggaggagagatag

SEQ ID NO: 140385 - DNA, 1080 bp, Artificial Sequence
  derived and/or modified sequence
atgcaagcggccgccttgccagaggagattagatggctgctggaggacgccgaagagtttctggcggaggggctcagaaatgaaaatcttagcgcagtcgccagagaccatcgagatcatatcctgcgaggatttcaacagataaaggcacggtattattgggactttcagccccagggtggggacatcggccaggactcctcggatgataaccacagtggaaccttggggctgagtctgacgtccgatgcgccgtttctctcggactaccaggatgaagggatggaggatatagttaagggagctcaggagctggataatgttatcaagcaggggtatctcgagaagaaaagcaaagaccatagcttcttcggatccgaatggcagaagaggtggtgcgtggtctcccgcggactgttctattactacgcaaacgagaagtcaaaacagccaaagggtacattcctcattaagggatacggtgtgaggatggccccacacctcagaagggacagcaaaaaggaatcttgctttgaattgacctcccaggataggcgctcctatgagtttacagcgacctcccccgccgaagcacgggactgggtggatcagataagcttcctcctaaaggacctgtcctcgttgaccatcccctacgaggaagacgaggaggaggaggagaaggaggaaacttacgatgacattgatgggttcgatagtccttcctgcggctctcagtgtcggcccaccatcttgccgggttctgtgggtattaaggagcctacagaagagaaggaagaggaagacatttatgaagttctccccgacgaggagcacgatctggaagaagacgagagcggaaccaggcgtaagggggttgactatgcaagctattatcaaggactttgggactgccacggagaccagcccgatgaattatcatttcaaaggggtgaccttatcaggattttgagtaaggagtataacatgtacggttggtgggtgggggaactgaactctctggttgggatcgttcccaaagagtacctgaccacagccttcgaagtcgaggagcgctag

SEQ ID NO: 140386 - DNA, 1080 bp, Artificial Sequence
  derived and/or modified sequence
atgcaggccgccgccctgcctgaggagatccgctggctgctggaggatgctgaggagttcctggccgagggcctgagaaatgaaaacctgtctgctgtggcccgggaccaccgggaccacatcctgcggggcttccagcagatcaaggcccgctactactgggacttccagccccagggcggggacatcggccaggacagcagtgatgacaaccacagcggcaccctgggcctgagcctgaccagtgatgcccccttcctgagtgactaccaggatgagggcatggaggacatcgtgaagggggcccaggagctggacaacgtcatcaagcagggctacctggagaagaagagcaaggaccacagcttcttcggcagcgagtggcagaagcgctggtgtgtggtgtcccggggcctcttctactactatgccaatgagaagagcaagcagcccaagggcaccttcctgatcaagggctacggcgtgaggatggccccccacctgcggcgggacagcaagaaggagagctgctttgagctgaccagccaggacagaagaagctatgagttcaccgccaccagccctgctgaggcccgggactgggtggaccagatctccttcctgctgaaggacctgagcagcctgaccatcccctatgaagaagatgaggaggaggaggagaaggaggagacctatgatgacattgatggctttgacagccccagctgtggcagccagtgccggcccaccatcctgcccggctctgtgggcatcaaggagcccacagaggagaaggaggaggaggacatctatgaggtgctgcctgatgaggagcatgacctggaggaggatgagagcggcaccaggaggaaaggagtggactatgccagctactaccagggcctgtgggactgccacggggaccagccagatgagctgtccttccagagaggagacctgatccgcatcctgagcaaggagtacaacatgtatggctggtgggtgggggagctgaacagcctggtgggcatcgtgcccaaggagtacctgaccacagcctttgaggtggaggagaggtag

SEQ ID NO: 140387 - DNA, 1080 bp, Artificial Sequence
  derived and/or modified sequence
atgcaggccgccgccctgcccgaggagatccggtggctgctggaggacgcagaggagtttctggcagaaggactgaggaatgagaatctgagcgccgttgcccgggatcaccgggaccacattctaagaggttttcagcagattaaagcaagatactattgggattttcagccacaagggggtgacattggtcaggatagctcagacgacaatcattctgggaccctcggactgagccttacgtcggatgccccatttcttagtgattaccaggatgaaggaatggaggacattgtcaagggagctcaagagctggacaacgtcatcaagcaaggctacctcgaaaaaaaaagcaaggaccactcctttttcggatctgagtggcaaaagcgatggtgtgtggtgtcacgggggcttttttactactatgccaacgaaaagtccaaacagccaaaaggtaccttcttgatcaaaggttacggggtgcgaatggctccccatctgcgccgtgacagtaaaaaagagagctgttttgaactgacatctcaggacaggcgatcctacgaatttactgccacttccccagccgaggcacgcgactgggtggatcagatttcattcttgctgaaggatctgtcctcgcttactattccctatgaggaagacgaggaagaagaagaaaaggaggaaacctacgacgacatagacggctttgactctccttcctgtggcagccagtgtaggccaactattctgcccggcagtgtgggcattaaagagcctacggaagagaaagaagaagaggatatctacgaggtcttacccgacgaggaacacgacttggaagaggacgagtcagggacgcgcaggaagggtgtcgactatgctagctattatcaaggattatgggactgccacggggaccagccagatgaactctcattccagcgcggcgacctcatcaggattctgtccaaggagtacaacatgtatggttggtgggtgggtgagctcaatagtttggtgggcattgttcctaaggagtatctgaccaccgcctttgaggtcgaggagagatag

SEQ ID NO: 140388 - DNA, 1080 bp, Artificial Sequence
  derived and/or modified sequence
atgcaggcagctgctctacctgaagaaattcggtggctcctggaagatgccgaagagttcctcgctgagggtctgcgtaatgaaaacctgagtgcagtagcacgtgatcaccgcgaccacattctccgaggctttcaacagatcaaagctcgctactactgggatttccagccccagggcggagatattgggcaagacagtagcgatgacaatcacagtggtacattaggcctcagtttgactagtgatgcccctttccttagtgattatcaggacgaaggcatggaggatattgtcaagggagctcaggaattggataacgtgattaaacagggctacctagagaagaagagcaaggaccattctttttttgggtcagagtggcagaaacgctggtgtgtcgttagcagaggcttgttctattattatgcgaatgaaaagtccaaacagcccaagggcactttcctgattaagggctatggcgtgcgaatggcaccacacctccggagagactcaaagaaggagtcctgtttcgaacttacttctcaagatcggcgtagctacgagttcacggcaacaagccccgctgaggctcgggactgggtggatcaaatttcattcctgctaaaagatctgagctcactgaccattccctacgaggaagatgaggaggaggaagagaaggaggagacgtatgacgatattgacggcttcgatagtccctcttgcggctctcaatgtaggcctacaatcctgcccggatcagtgggcatcaaggagcctacagaggagaaggaggaagaggacatttacgaggtgctgccagacgaggagcacgatctggaggaagacgagtccgggacccgaagaaagggggtggactacgctagctattatcaaggcctatgggactgccatggcgaccagcctgacgaactttcctttcagagaggtgacttgatccggatactatctaaggagtacaacatgtatgggtggtgggtaggtgagctgaactccctggttggcatcgttcctaaagagtaccttactactgcctttgaggtcgaagaacgatag

SEQ ID NO: 140389 - DNA, 1576 bp, Artificial Sequence
  derived and/or modified sequence
ggcgaccgcggctgaggtacaggtgcctcgcggtgcagccgggtcgccttccagcccgtccgcctcccgaccagggcccgcgccccgtcccgcctctctcccgcccagccaaatgcaggccgccgccctccctgaggagatccgttggctcctggaagatgctgaagagtttctggcagaaggtttgcggaatgagaacctcagcgctgttgcaagggatcacagagaccatattctacggggctttcagcaaatcaaagccaggtactattgggattttcagccccaagggggagacattggacaggacagctctgatgataatcacagcgggactcttggcctgtccctcacatccgatgcaccctttttgtcagattatcaggatgagggaatggaagacatcgtaaaaggagctcaagaacttgataacgtaatcaagcaaggatacttggagaagaaaagcaaagatcatagtttctttggatcggagtggcagaagcgatggtgtgttgtcagcagaggtctcttctactactatgctaatgagaagagcaagcagcccaaagggaccttcctcattaagggctacggtgtacggatggccccccacctgcgaagagattccaagaaagaatcctgctttgaactgacctcccaggataggcgcagctatgagtttacagctactagtccagcagaagccagagactgggtggatcaaataagtttcttgttaaaggatctgagctccttaaccattccatatgaagaggatgaggaggaagaagaaaaagaagagacatatgatgatattgatggttttgactccccaagttgtggttcccagtgcagacccactatcttgcctgggagtgtggggataaaagagcctacagaggagaaagaagaagaagatatttatgaagtcttgccagatgaagagcatgatctagaagaggatgagagtggcactcgacgaaaaggagtagactatgccagttactaccagggcctatgggattgccatggtgaccagccagatgaactgtccttccaacggggtgacctcatccgtattctgagcaaggagtataacatgtatggctggtgggtgggagaactgaacagcctcgttgggattgttccaaaggagtatctcaccactgcctttgaagtggaagaaagatgaaacccaggaaatatattcttccctctctcctgcctttatgaggaaactgatcatcaaaagttcccactccctacttctgccaccccaccaacgccttggactcctctctttgctgaagagacccaagtctcttgacacctcagagtgactgtaagctaccagtaagacaagtgggaagaggcacgttcatcaaacctgttactaaaccagcctagtcatagctcatccccatctctaaatgtgtccacacaaccacatctgccttttccacaagcttttcacaaagaaggtgagagagaaggaaaccttgggaggaggacattactggttgttctggctggtttgaaaagcacaaataaacttgggatgtggttccttgccatg

SEQ ID NO: 140390 - protein, 890 aa, Artificial Sequence
  derived and/or modified sequence
DDDFFHELPETFPSDPPEPLPHFLIEPEEAYIVKNKPVNLYCKASPATQIYFKCNSEWVHQKDHIVDERVDETSGLIVREVSIEISRQQVEELFGPEDYWCQCVAWSSAGTTKSRKAYVRIAYLRKTFEQEPLGKEVSLEQEVLLQCRPPEGIPVAEVEWLKNEDIIDPVEDRNFYITIDHNLIIKQARLSDTANYTCVAKNIVAKRKSTTATVIVYVNGGWSTWTEWSVCNSRCGRGYQKRTRTCTNPAPLNGGAFCEGQSVQKIACTTLCPVDGRWTPWSKWSTCGTECTHWRRRECTAPAPKNGGKDCDGLVLQSKNCTDGLCMQTAPDSDDVALYVGIVIAVIVCLAISVVVALFVYRKNHRDFESDIIDSSALNGGFQPVNIKAARQDLLAVPPDLTSAAAMYRGPVYALHDVSDKIPMTNSPILDPLPNLKIKVYNTSGAVTPQDDLSEFTSKLSPQMTQSLLENEALSLKNQSLARQTDPSCTAFGSFNSLGGHLIVPNSGVSLLIPAGAIPQGRVYEMYVTVHRKETMRPPMDDSQTLLTPVVSCGPPGALLTRPVVLTMHHCADPNTEDWKILLKNQAAQGQWEDVVVVGEENFTTPCYIQLDAEACHILTENLSTYALVGHSTTKAAAKRLKLAIFGPLCCSSLEYSIRVYCLDDTQDALKEILHLERQMGGQLLEEPKALHFKGSTHNLRLSIHDIAHSLWKSKLLAKYQEIPFYHVWSGSQRNLHCTFTLERFSLNTVELVCKLCVRQVEGEGQIFQLNCTVSEEPTGIDLPLLDPANTITTVTGPSAFSIPLPIRQKLCSSLDAPQTRGHDWRMLAHKLNLDRYLNYFATKSSPTGVILDLWEAQNFPDGNLSMLAAVLEEMGRHETVVSLAAEGQY

SEQ ID NO: 140391 - protein, 931 aa, Artificial Sequence
  derived and/or modified sequence
MRKGLRATAARCGLGLGYLLQMLVLPALALLSASGTGSAAQDDDFFHELPETFPSDPPEPLPHFLIEPEEAYIVKNKPVNLYCKASPATQIYFKCNSEWVHQKDHIVDERVDETSGLIVREVSIEISRQQVEELFGPEDYWCQCVAWSSAGTTKSRKAYVRIAYLRKTFEQEPLGKEVSLEQEVLLQCRPPEGIPVAEVEWLKNEDIIDPVEDRNFYITIDHNLIIKQARLSDTANYTCVAKNIVAKRKSTTATVIVYVNGGWSTWTEWSVCNSRCGRGYQKRTRTCTNPAPLNGGAFCEGQSVQKIACTTLCPVDGRWTPWSKWSTCGTECTHWRRRECTAPAPKNGGKDCDGLVLQSKNCTDGLCMQTAPDSDDVALYVGIVIAVIVCLAISVVVALFVYRKNHRDFESDIIDSSALNGGFQPVNIKAARQDLLAVPPDLTSAAAMYRGPVYALHDVSDKIPMTNSPILDPLPNLKIKVYNTSGAVTPQDDLSEFTSKLSPQMTQSLLENEALSLKNQSLARQTDPSCTAFGSFNSLGGHLIVPNSGVSLLIPAGAIPQGRVYEMYVTVHRKETMRPPMDDSQTLLTPVVSCGPPGALLTRPVVLTMHHCADPNTEDWKILLKNQAAQGQWEDVVVVGEENFTTPCYIQLDAEACHILTENLSTYALVGHSTTKAAAKRLKLAIFGPLCCSSLEYSIRVYCLDDTQDALKEILHLERQMGGQLLEEPKALHFKGSTHNLRLSIHDIAHSLWKSKLLAKYQEIPFYHVWSGSQRNLHCTFTLERFSLNTVELVCKLCVRQVEGEGQIFQLNCTVSEEPTGIDLPLLDPANTITTVTGPSAFSIPLPIRQKLCSSLDAPQTRGHDWRMLAHKLNLDRYLNYFATKSSPTGVILDLWEAQNFPDGNLSMLAAVLEEMGRHETVVSLAAEGQY

SEQ ID NO: 140392 - DNA, 312 bp, Artificial Sequence
  derived and/or modified sequence
atgaagctgaagagtctctttggcgaaatcaccttcacctttggaataagcaaggagaaattgaagattctagacgatttaacattgctgccattgcttgtgaagcaatacaagatgctgtggtcctacaagttaccagggagcggcatcgtgatatggagcacgtttcatgctgtcatggactctgaatggcgaaggcagaacgctgaattgaacctgataacaaataagcacttcctcaagaacctacagagcaaacatttggacgtgaagatcttaaaaacaaagaataagctcgtcgagggcatttag

SEQ ID NO: 140393 - DNA, 2673 bp, Artificial Sequence
  derived and/or modified sequence
gacgacgacttcttccacgagctgcccgagaccttccccagcgacccccccgagcccctgccccacttcctgatcgagcccgaggaggcctacatcgtgaagaacaagcccgtgaacctgtactgcaaggccagccccgccacccagatctacttcaagtgcaacagcgagtgggtgcaccagaaggaccacatcgtggacgagagagtggacgagaccagcggcctgatcgtgagagaggtgagcatcgagatcagcagacagcaggtggaggagctgttcggccccgaggactactggtgccagtgcgtggcctggagcagcgccggcaccaccaagagcagaaaggcctacgtgagaatcgcctacctgagaaagaccttcgagcaggagcccctgggcaaggaggtgagcctggagcaggaggtgctgctgcagtgcagaccccccgagggcatccccgtggccgaggtggagtggctgaagaacgaggacatcatcgaccccgtggaggacagaaacttctacatcaccatcgaccacaacctgatcatcaagcaggccagactgagcgacaccgccaactacacctgcgtggccaagaacatcgtggccaagagaaagagcaccaccgccaccgtgatcgtgtacgtgaacggcggctggagcacctggaccgagtggagcgtgtgcaacagcagatgcggcagaggctaccagaagagaaccagaacctgcaccaaccccgcccccctgaacggcggcgccttctgcgagggccagagcgtgcagaagatcgcctgcaccaccctgtgccccgtggacggcagatggaccccctggagcaagtggagcacctgcggcaccgagtgcacccactggagaagaagagagtgcaccgcccccgcccccaagaacggcggcaaggactgcgacggcctggtgctgcagagcaagaactgcaccgacggcctgtgcatgcagaccgcccccgacagcgacgacgtggccctgtacgtgggcatcgtgatcgccgtgatcgtgtgcctggccatcagcgtggtggtggccctgttcgtgtacagaaagaaccacagagacttcgagagcgacatcatcgacagcagcgccctgaacggcggcttccagcccgtgaacatcaaggccgccagacaggacctgctggccgtgccccccgacctgaccagcgccgccgccatgtacagaggccccgtgtacgccctgcacgacgtgagcgacaagatccccatgaccaacagccccatcctggaccccctgcccaacctgaagatcaaggtgtacaacaccagcggcgccgtgaccccccaggacgacctgagcgagttcaccagcaagctgagcccccagatgacccagagcctgctggagaacgaggccctgagcctgaagaaccagagcctggccagacagaccgaccccagctgcaccgccttcggcagcttcaacagcctgggcggccacctgatcgtgcccaacagcggcgtgagcctgctgatccccgccggcgccatcccccagggcagagtgtacgagatgtacgtgaccgtgcacagaaaggagaccatgagaccccccatggacgacagccagaccctgctgacccccgtggtgagctgcggcccccccggcgccctgctgaccagacccgtggtgctgaccatgcaccactgcgccgaccccaacaccgaggactggaagatcctgctgaagaaccaggccgcccagggccagtgggaggacgtggtggtggtgggcgaggagaacttcaccaccccctgctacatccagctggacgccgaggcctgccacatcctgaccgagaacctgagcacctacgccctggtgggccacagcaccaccaaggccgccgccaagagactgaagctggccatcttcggccccctgtgctgcagcagcctggagtacagcatcagagtgtactgcctggacgacacccaggacgccctgaaggagatcctgcacctggagagacagatgggcggccagctgctggaggagcccaaggccctgcacttcaagggcagcacccacaacctgagactgagcatccacgacatcgcccacagcctgtggaagagcaagctgctggccaagtaccaggagatccccttctaccacgtgtggagcggcagccagagaaacctgcactgcaccttcaccctggagagattcagcctgaacaccgtggagctggtgtgcaagctgtgcgtgagacaggtggagggcgagggccagatcttccagctgaactgcaccgtgagcgaggagcccaccggcatcgacctgcccctgctggaccccgccaacaccatcaccaccgtgaccggccccagcgccttcagcatccccctgcccatcagacagaagctgtgcagcagcctggacgccccccagaccagaggccacgactggagaatgctggcccacaagctgaacctggacagatacctgaactacttcgccaccaagagcagccccaccggcgtgatcctggacctgtgggaggcccagaacttccccgacggcaacctgagcatgctggccgccgtgctggaggagatgggcagacacgagaccgtggtgagcctggccgccgagggccagtactag

SEQ ID NO: 140394 - DNA, 2796 bp, Artificial Sequence
  derived and/or modified sequence
atgagaaagggcctgagagccaccgccgccagatgcggcctgggcctgggctacctgctgcagatgctggtgctgcccgccctggccctgctgagcgccagcggcaccggcagcgccgcccaggacgacgacttcttccacgagctgcccgagaccttccccagcgacccccccgagcccctgccccacttcctgatcgagcccgaggaggcctacatcgtgaagaacaagcccgtgaacctgtactgcaaggccagccccgccacccagatctacttcaagtgcaacagcgagtgggtgcaccagaaggaccacatcgtggacgagagagtggacgagaccagcggcctgatcgtgagagaggtgagcatcgagatcagcagacagcaggtggaggagctgttcggccccgaggactactggtgccagtgcgtggcctggagcagcgccggcaccaccaagagcagaaaggcctacgtgagaatcgcctacctgagaaagaccttcgagcaggagcccctgggcaaggaggtgagcctggagcaggaggtgctgctgcagtgcagaccccccgagggcatccccgtggccgaggtggagtggctgaagaacgaggacatcatcgaccccgtggaggacagaaacttctacatcaccatcgaccacaacctgatcatcaagcaggccagactgagcgacaccgccaactacacctgcgtggccaagaacatcgtggccaagagaaagagcaccaccgccaccgtgatcgtgtacgtgaacggcggctggagcacctggaccgagtggagcgtgtgcaacagcagatgcggcagaggctaccagaagagaaccagaacctgcaccaaccccgcccccctgaacggcggcgccttctgcgagggccagagcgtgcagaagatcgcctgcaccaccctgtgccccgtggacggcagatggaccccctggagcaagtggagcacctgcggcaccgagtgcacccactggagaagaagagagtgcaccgcccccgcccccaagaacggcggcaaggactgcgacggcctggtgctgcagagcaagaactgcaccgacggcctgtgcatgcagaccgcccccgacagcgacgacgtggccctgtacgtgggcatcgtgatcgccgtgatcgtgtgcctggccatcagcgtggtggtggccctgttcgtgtacagaaagaaccacagagacttcgagagcgacatcatcgacagcagcgccctgaacggcggcttccagcccgtgaacatcaaggccgccagacaggacctgctggccgtgccccccgacctgaccagcgccgccgccatgtacagaggccccgtgtacgccctgcacgacgtgagcgacaagatccccatgaccaacagccccatcctggaccccctgcccaacctgaagatcaaggtgtacaacaccagcggcgccgtgaccccccaggacgacctgagcgagttcaccagcaagctgagcccccagatgacccagagcctgctggagaacgaggccctgagcctgaagaaccagagcctggccagacagaccgaccccagctgcaccgccttcggcagcttcaacagcctgggcggccacctgatcgtgcccaacagcggcgtgagcctgctgatccccgccggcgccatcccccagggcagagtgtacgagatgtacgtgaccgtgcacagaaaggagaccatgagaccccccatggacgacagccagaccctgctgacccccgtggtgagctgcggcccccccggcgccctgctgaccagacccgtggtgctgaccatgcaccactgcgccgaccccaacaccgaggactggaagatcctgctgaagaaccaggccgcccagggccagtgggaggacgtggtggtggtgggcgaggagaacttcaccaccccctgctacatccagctggacgccgaggcctgccacatcctgaccgagaacctgagcacctacgccctggtgggccacagcaccaccaaggccgccgccaagagactgaagctggccatcttcggccccctgtgctgcagcagcctggagtacagcatcagagtgtactgcctggacgacacccaggacgccctgaaggagatcctgcacctggagagacagatgggcggccagctgctggaggagcccaaggccctgcacttcaagggcagcacccacaacctgagactgagcatccacgacatcgcccacagcctgtggaagagcaagctgctggccaagtaccaggagatccccttctaccacgtgtggagcggcagccagagaaacctgcactgcaccttcaccctggagagattcagcctgaacaccgtggagctggtgtgcaagctgtgcgtgagacaggtggagggcgagggccagatcttccagctgaactgcaccgtgagcgaggagcccaccggcatcgacctgcccctgctggaccccgccaacaccatcaccaccgtgaccggccccagcgccttcagcatccccctgcccatcagacagaagctgtgcagcagcctggacgccccccagaccagaggccacgactggagaatgctggcccacaagctgaacctggacagatacctgaactacttcgccaccaagagcagccccaccggcgtgatcctggacctgtgggaggcccagaacttccccgacggcaacctgagcatgctggccgccgtgctggaggagatgggcagacacgagaccgtggtgagcctggccgccgagggccagtactag

SEQ ID NO: 140395 - DNA, 2673 bp, Artificial Sequence
  derived and/or modified sequence
gatgacgatttctttcacgagctgccagaaacctttccttcagaccctcctgaacccttaccgcactttcttatcgagccggaggaagcatacatcgtcaaaaataaacccgtgaacctctattgcaaggccagccccgcgacccagatctacttcaagtgtaattcagaatgggtgcatcagaaagatcacatcgtcgatgagcgcgtagacgaaacttccggactgatcgttagagaggtgtcaatcgaaatttccagacagcaggttgaggagttgttcggccccgaggactactggtgccaatgcgtcgcatggtcaagcgctgggaccaccaaatctaggaaagcctatgtgaggattgcttacctgcgcaagacattcgagcaggaaccactggggaaagaagtgagtctcgaacaggaagtcctgctccagtgcagaccccctgagggaatccctgtggctgaggtggagtggttgaagaacgaggatatcatcgacccagtggaggatcggaacttctatatcaccattgatcacaacctgattattaagcaggctagattgagtgacaccgccaattacacttgtgtggcaaagaatatcgtcgccaaacgtaagagcaccacagcaactgttattgtttacgtgaacggtggctggtctacatggaccgaatggtcagtgtgtaatagtaggtgtggcaggggctaccagaagaggactcgtacctgcacgaatcctgcccctctcaatgggggggctttctgtgagggacagagcgttcagaagatcgcatgcactaccctttgcccagtggatgggaggtggaccccatggtcaaagtggagcacctgtgggaccgagtgtacacactggcgcagacgagagtgtaccgcccctgcccctaagaatggggggaaagactgcgacggactggtgctccaatcaaaaaactgcactgacgggctctgcatgcaaactgcgcctgactcagatgacgtggccctatatgttggcattgtcattgcagtgatcgtgtgcctagccatttccgtcgtggtggcattgtttgtgtatagaaagaatcatcgcgactttgagtctgatattattgacagttcggcattaaatggcggatttcagccagtcaatatcaaagcagccaggcaggatctgctggctgtcccccccgatctgacgagcgccgccgcaatgtatagaggccccgtctacgctctgcacgacgtcagtgataagatcccaatgacgaacagcccaatactggatcctctccccaatttgaagatcaaggtatacaacacctctggggcagtcacaccccaggacgatctgagcgagtttacttctaagctgtccccacagatgacccagagcctgctcgagaatgaggccctgagtctgaaaaaccaatccctggctcggcaaaccgaccccagctgcactgctttcggcagctttaatagtctgggcggccacctgatcgtgcctaatagcggcgttagtctcctgatccccgcaggtgccatcccacagggcagggtgtacgagatgtatgtcacagtgcatcgtaaggagaccatgaggcctcccatggacgacagccagacattgcttacccccgttgtcagctgtgggcctccgggggcgctgttgactaggcctgtggtgctgacaatgcatcattgcgctgaccccaataccgaggactggaagatcttattgaagaatcaggctgcacagggacagtgggaagacgtggtggtggttggcgaggaaaactttactacaccctgttacattcaactggacgccgaggcttgtcacattctcactgagaacttaagtacttatgcgttggttggtcacagcactaccaaggcggcagccaagagattgaaattggcaatcttcggacctctctgctgcagcagtctagagtattcaattcgtgtgtattgtctcgacgatacccaggacgctttgaaagagattctgcatctggagcgccagatgggcggacaattattagaagagccaaaagccctgcactttaaaggtagcacccataacctgagactgagcatccacgacatcgcacacagcttatggaaatcaaagctacttgctaaataccaggaaatccctttttaccacgtatggagtgggtcccagcggaatcttcactgcacttttactctggagcggttcagtctaaatactgtggagctcgtgtgtaaactgtgtgtcaggcaggtcgagggtgaaggacagatattccagttgaattgcactgttagtgaggaacccacaggcatagatctgccactactcgatcctgcaaatacaataaccaccgtgaccgggccatctgccttttccatccccctaccgattagacagaagttatgttcatcgctcgacgcacctcaaaccagaggtcatgactggcgcatgttggcccacaaactgaatctagaccgctatctgaattatttcgctacaaagtcctctcccaccggggttatcctggatctgtgggaggctcagaattttcccgatgggaatctcagcatgctcgctgcagtgctggaagagatgggtcggcacgagaccgttgtcagtctggctgcggaggggcagtactag

SEQ ID NO: 140396 - DNA, 2796 bp, Artificial Sequence
  derived and/or modified sequence
atgcggaaaggcctacgagctactgccgcaaggtgtggattgggactggggtaccttctacagatgttagtgctacccgccttggctctgctttcagcctcaggcaccggatcagccgctcaagacgacgacttctttcacgagcttcccgagacattcccttctgacccacctgagccgctgcctcacttcctgattgagcccgaggaagcttacattgtgaagaacaagcccgtgaacctgtactgtaaagcgagccccgccacccaaatctacttcaagtgtaattcagagtgggtacatcaaaaagaccacatagtggatgagagagtggacgaaacctcaggccttatcgttcgagaggtgagtatcgaaatctctcgtcagcaggttgaagaactcttcgggccagaggattattggtgtcagtgcgttgcctggagttccgccggcacgaccaaaagccgcaaggcctatgtacggattgcttacctgagaaagacattcgaacaggagcctctgggaaaggaagttagtctggagcaagaggtgctcttgcagtgccggcctccagagggtatcccagtggctgaagtcgagtggctcaagaatgaggatatcatagatccagtggaggacagaaacttttatatcaccatcgatcacaaccttatcattaaacaggctagattaagcgacactgcgaactacacatgtgttgcaaagaacattgttgcgaagcggaaatctacaacagcaactgtcatcgtgtacgtgaatggcgggtggtccacttggacagaatggtctgtatgcaactctagatgcgggcggggctatcagaagagaacgcgtacctgtactaatccagctcccctgaatggaggcgcattttgcgagggccagtctgtgcagaagatcgcgtgtacaacactctgcccagtggacgggcgatggaccccttggtcaaagtggagtacctgcgggacagagtgcacacactggcgcagaagggagtgcaccgcacccgctcctaagaatggaggaaaggactgtgatggtctggtgctgcagagtaagaactgtaccgatggactgtgcatgcagactgcaccggactctgacgacgtggcactctatgtggggatcgttatcgccgtcattgtttgcctggccatctctgtggtggtggccctcttcgtctataggaaaaatcacagagatttcgagtccgacatcatcgattcgagtgccctgaatggcggattccagccagtcaacatcaaagcagctagacaagatctgcttgccgtcccccccgacctcacgagcgccgcagccatgtacagagggcctgtttacgctttacacgatgtgtcagacaagattcccatgactaatagcccgattcttgacccgttgcccaatctcaaaataaaagtttataataccagtggggctgtgacaccacaagatgatctcagcgagttcacatcaaaactctcgccacaaatgacacaatctctactggaaaatgaagccctgtcactgaagaaccaatcccttgccagacagacggatccttcctgtacagcgttcggatcgtttaattcactggggggacacctgatcgtgcccaattcgggcgtgagcctactcatcccagctggagccatcccacaggggcgtgtgtacgagatgtacgttacggtacacaggaaagaaacaatgaggccaccgatggacgactctcagacgctgctcactccagtggtcagctgcggaccaccgggagctctacttactagaccggtagtgctgacgatgcaccattgtgccgatcctaacactgaggattggaaaatacttttaaaaaatcaggccgcccagggccaatgggaggacgtcgtggtggttggcgaggaaaacttcacgaccccctgttacatacaactcgacgcggaggcttgccatatcctcacagagaacctgagcacctacgccttggttggccattcaacaaccaaagccgcagctaaaagattaaagcttgctatcttcggccccttgtgctgcagctcattggaatatagcatcagggtgtattgcctggacgacacacaggatgccctaaaagaaattcttcacctggagagacagatgggtggccagttactagaggaaccaaaagccctgcatttcaagggttccacccataatttgaggcttagcatccatgacatcgcccattccctatggaaatccaagctcctcgctaagtatcaggaaattccattttatcacgtgtggtccggctcccagcgcaacctgcattgtacctttacgctggagcgcttctccctgaatacagtcgaactcgtctgcaagctgtgcgtgaggcaggtggaaggggagggacagatctttcaactgaactgcacagtgtccgaggagcccactggcatcgaccttccgctcttggaccccgcaaacacaattacgacagttacaggaccatccgccttttccattcctctgccaatccggcagaaattgtgctcctccctggatgcgccgcagacacggggtcacgattggaggatgttggcgcataaactgaatcttgaccggtatcttaattacttcgcaactaaaagttcccctaccggcgtgatcctcgatctttgggaggctcagaacttccccgatggcaacttaagcatgttggcagccgtccttgaggaaatgggaaggcatgaaactgtcgttagcctcgccgctgaaggacagtactag

SEQ ID NO: 140397 - DNA, 2673 bp, Artificial Sequence
  derived and/or modified sequence
gatgatgacttcttccacgagctgcctgagaccttccccagcgaccccccagagcccctgccccacttcctgattgagcctgaggaggcctacatcgtgaagaacaagcctgtgaacctgtactgcaaggccagccctgccacccagatctacttcaagtgcaacagcgagtgggtgcaccagaaggaccacatcgtggatgagcgggtggatgagaccagcggcctgattgtgcgggaggtgtccattgagatcagccggcagcaggtggaggagctgtttggacctgaggactactggtgccagtgtgtggcctggagcagcgctggcaccaccaagagcaggaaggcctacgtgagaattgcctacctgaggaagacctttgagcaggagcccctgggcaaggaggtgtccctggagcaggaggtgctgctgcagtgcaggcctcctgagggcatccctgtggccgaggtggagtggctgaagaatgaagacatcattgatcctgtggaggacaggaacttctacatcaccatcgaccacaacctgatcatcaagcaggcccggctgagtgacacagccaactacacctgtgtggccaagaacatcgtggccaagaggaagagcaccacagccaccgtgattgtgtatgtgaatggaggctggagcacctggacagagtggagcgtgtgcaacagccgctgtggccggggctaccagaagaggaccaggacctgcaccaacccagcccccctgaatggaggagccttctgtgagggccagagcgtgcagaagatcgcctgcaccaccctgtgccctgtggatggccgctggaccccctggagcaagtggagcacctgtggcacagagtgcacccactggaggcggcgggagtgcacagccccagcccccaagaatggaggcaaggactgtgatggcctggtgctgcagagcaagaactgcacagatggcctgtgcatgcagacagccccagacagtgatgatgtggccctgtatgtgggcatcgtgattgctgtgattgtgtgcctggccatctctgtggtggtggccctgtttgtgtacaggaagaaccaccgggactttgaaagtgacatcatcgacagcagcgccctgaatggaggcttccagcctgtgaacatcaaggccgcccggcaggacctgctggccgtgcccccagacctgaccagcgctgctgccatgtaccggggccctgtgtatgccctgcatgatgtgtctgacaagatccccatgaccaacagccccatcctggaccccctgcccaacctgaagatcaaggtgtacaacaccagcggggctgtgaccccccaggatgacctgtctgagttcaccagcaagctgagcccccagatgacccagagcctgctggagaatgaggccctgagcctgaagaaccagagcctggcccggcagacagaccccagctgcacagccttcggcagcttcaacagcctgggcggccacctgattgtgcccaacagcggcgtgtccctgctgatcccagctggggccatcccccagggccgggtgtatgagatgtatgtgacagtgcacaggaaggagaccatgaggcctcccatggatgacagccagaccctgctgacccctgtggtgtcctgtggccccccaggggccctgctgaccaggcctgtggtgctgaccatgcaccactgtgccgaccccaacacagaggactggaagatcctgctgaagaaccaggccgcccagggccagtgggaggatgtggtggtggtgggggaggagaacttcaccaccccctgctacatccagctggatgctgaggcctgccacatcctgacagagaacctgagcacctacgccctggtgggccacagcaccaccaaggctgctgccaagaggctgaagctggccatcttcggccccctgtgctgcagcagcctggagtacagcatccgggtgtactgcctggatgacacccaggatgccctgaaggagatcctgcacctggagcggcagatgggcggccagctgctggaggagcccaaggccctgcacttcaagggcagcacccacaacctgcggctgagcatccatgacatcgcccacagcctgtggaagagcaagctgctggccaagtaccaggagatccccttctaccacgtgtggagcggcagccagaggaacctgcactgcaccttcaccctggagcgcttcagcctgaacacagtggagctggtgtgcaagctgtgtgtgcggcaggtggagggggagggccagatcttccagctgaactgcaccgtgtctgaggagcccactggaattgacctgcccctgctggaccctgccaacaccatcaccaccgtgacaggccccagcgccttcagcatccccctgcccatccggcagaagctgtgcagcagcctggatgccccccagacccggggccatgactggaggatgctggcccacaagctgaacctggaccgctacctgaactactttgccaccaagagcagccccaccggggtcatcctggacctgtgggaggcccagaacttcccagatggcaacctgtccatgctggccgctgtgctggaggagatgggcagacatgagaccgtggtgtccctggccgctgagggccagtactag

SEQ ID NO: 140398 - DNA, 2796 bp, Artificial Sequence
  derived and/or modified sequence
atgaggaagggcctgcgggccacagctgcccgctgtggcctgggcctgggctacctgctgcagatgctggtgctgcctgccctggccctgctgagcgccagcggcaccggcagcgctgcccaggatgatgacttcttccacgagctgcctgagaccttccccagcgaccccccagagcccctgccccacttcctgattgagcctgaggaggcctacatcgtgaagaacaagcctgtgaacctgtactgcaaggccagccctgccacccagatctacttcaagtgcaacagcgagtgggtgcaccagaaggaccacatcgtggatgagcgggtggatgagaccagcggcctcatcgtgcgggaggtgtccattgagatcagccggcagcaggtggaggagctgtttggacctgaggactactggtgccagtgtgtggcctggagcagcgctggcaccaccaagagcaggaaggcctacgtgcgcatcgcctacctgaggaagacctttgagcaggagcccctgggcaaggaggtgtccctggagcaggaggtgctgctgcagtgccggcccccagagggcatccctgtggccgaggtggagtggctgaagaatgaagacatcatcgaccctgtggaggacaggaacttctacatcaccatcgaccacaacctgatcatcaagcaggcccggctgagtgacacagccaactacacctgtgtggccaagaacatcgtggccaagaggaagagcaccacagccaccgtcatcgtgtatgtgaatggaggctggagcacctggacagagtggagcgtgtgcaacagccgctgtggccggggctaccagaagaggaccaggacctgcaccaacccagcccccctgaatggaggagccttctgtgagggccagagcgtgcagaagatcgcctgcaccaccctgtgccctgtggatggccgctggaccccctggagcaagtggagcacctgtggcacagaatgtacccactggaggagaagagaatgtacagccccagcccccaagaatggaggcaaggactgtgatggcctggtgctgcagagcaagaactgcacagatggcctgtgcatgcagacagccccagacagtgatgatgtggccctgtatgtgggcatcgtgattgctgtgattgtgtgcctggccatctctgtggtggtggccctgtttgtgtacaggaagaaccaccgggactttgaaagtgacatcatcgacagcagcgccctgaatggaggcttccagcctgtgaacatcaaggccgcccggcaggacctgctggccgtgcccccagacctgaccagcgctgctgccatgtaccggggccctgtgtatgccctgcatgatgtgtctgacaagatccccatgaccaacagccccatcctggaccccctgcccaacctgaagatcaaggtgtacaacaccagcggggctgtgaccccccaggatgacctgtctgagttcaccagcaagctgagcccccagatgacccagagcctgctggagaatgaggccctgagcctgaagaaccagagcctggcccggcagacagaccccagctgcacagccttcggcagcttcaacagcctgggcggccacctgattgtgcccaacagcggcgtgtccctgctgatcccagctggggccatcccccagggccgggtgtatgagatgtatgtgacagtgcacaggaaggagaccatgaggcctcccatggatgacagccagaccctgctgacccctgtggtgtcctgtggccccccaggggccctgctgaccaggcctgtggtgctgaccatgcaccactgtgccgaccccaacacagaggactggaagatcctgctgaagaaccaggccgcccagggccagtgggaggatgtggtggtggtgggggaggagaacttcaccaccccctgctacatccagctggatgctgaggcctgccacatcctgacagagaacctgagcacctacgccctggtgggccacagcaccaccaaggccgccgccaagaggctgaagctggccatcttcggccccctgtgctgcagcagcctggagtacagcatccgggtgtactgcctggatgacacccaggatgccctgaaggagatcctgcacctggagcggcagatgggcggccagctgctggaggagcccaaggccctgcacttcaagggcagcacccacaacctgcggctgagcatccatgacatcgcccacagcctgtggaagagcaagctgctggccaagtaccaggagatccccttctaccacgtgtggagcggcagccagaggaacctgcactgcaccttcaccctggagcgcttcagcctgaacacagtggagctggtgtgcaagctgtgtgtgcggcaggtggagggggagggccagatcttccagctgaactgcaccgtgtctgaggagcccaccggcatcgacctgcccctgctggaccctgccaacaccatcaccaccgtgacaggccccagcgccttcagcatccccctgcccatccggcagaagctgtgcagcagcctggatgccccccagacccggggccatgactggaggatgctggcccacaagctgaacctggaccgctacctgaactactttgccaccaagagcagccccactggagtcatcctggacctgtgggaggcccagaacttcccagatggcaacctgtccatgctggccgctgtgctggaggagatgggcagacatgaaacagtggtgtccctggccgctgagggccagtactag

SEQ ID NO: 140399 - DNA, 2673 bp, Artificial Sequence
  derived and/or modified sequence
gacgacgacttcttccacgagctgcccgagaccttccccagcgacccaccagagcccctgccccatttcctaatcgagcccgaggaagcctacatcgtcaagaataaacccgtaaatctgtattgcaaagcctcccccgcaactcagatctatttcaagtgtaattctgaatgggttcaccagaaggatcacattgtggacgaaagggtagatgaaacaagtggcctcattgtgcgtgaggtcagtatagagatcagtagacagcaggtggaggagttgttcgggccagaggactattggtgtcaatgtgtagcgtggagctccgcgggcacaaccaagagcagaaaagcctatgtgcgcattgcctacctgcgcaaaacattcgaacaggagcccctggggaaggaggtgtccctggaacaggaagtgctgctacaatgcagacctccagaaggaatacccgtggcagaggtcgagtggctcaaaaacgaggatatcattgatccagtggaggatagaaacttttatatcacaatcgaccacaacctgatcattaaacaggcacgcttgagcgacacggctaactatacctgtgtagcgaaaaatatcgtcgccaaacgtaagtcgaccaccgctaccgtcatagtgtacgtgaacggagggtggagcacatggaccgagtggagtgtctgcaattctcggtgcggccggggataccagaagaggactcggacctgtactaaccctgcacctctgaacggtggcgccttttgcgagggtcagtcagtgcagaaaatcgcctgtaccacgttgtgccctgtggatggtcgctggaccccatggtcaaaatggagcacttgtggaactgaatgcacccattggcgacgcagggaatgcaccgcaccagccccaaagaatgggggtaaggattgcgatggtcttgttctgcagagcaaaaactgcacagatggcttgtgcatgcagaccgctccggattctgacgatgtggccctctacgtcggcattgtcatagctgtgattgtttgccttgctatctcagttgtggtggcccttttcgtgtaccgcaaaaatcatcgcgacttcgaatcagatatcatagactcatctgcattgaatgggggatttcagccagtgaacatcaaggccgccagacaggacctgcttgctgtacctccagaccttacatccgcagctgctatgtaccggggtcctgtctacgccctgcacgacgttagcgacaagataccgatgaccaattctccgatcttggatcctctaccaaacctcaaaattaaggtttacaacacatcaggcgcggtgactccacaagatgacctgagtgagttcacatctaagctgtctccacaaatgacccagagcctgctggagaacgaggccttatccttaaagaatcagtcactcgcaagacagacagacccatcttgcactgcattcggcagctttaatagtctggggggccatctgatcgtgcccaatagtggagtaagtttacttatacctgccggtgcaatccctcaggggagagtgtatgaaatgtacgtaacggtccacagaaaggagaccatgcggccacccatggacgattcacagaccctgctgactcccgtggtgtcatgcgggcctccaggtgctttgctcacacgaccagtagttctgactatgcaccattgcgccgaccccaatactgaggattggaaaattttgcttaaaaaccaggcagcccaggggcaatgggaggacgtggtcgtcgtaggcgaggagaattttacgactccttgctacatacagctcgacgctgaggcctgtcacatcctcactgaaaatttgagcacatatgcgcttgtggggcacagcactacaaaggctgcagccaagcggctcaaactagctatattcggtcctctgtgctgctcctccctggagtattccatacgtgtgtactgtcttgatgatactcaagatgctttaaaagagatcctacatttagagcgccagatgggcggccagttactggaggaacctaaagctctccacttcaagggatctacccacaatctgaggctgagcatccatgatattgctcattctctgtggaaaagcaaattactggcgaaatatcaagagattccgttttaccatgtttggagtgggagccaacgtaatctccattgcacattcactctggagcgcttttctctgaatacggttgagcttgtgtgcaagttgtgtgttcggcaggttgaaggcgaagggcaaatcttccaattaaactgcactgtttctgaggagcctactggtatcgatcttcccttattggacccagctaatactattacgaccgttaccggaccatcagcgttctcaataccgttgcctatccgacagaaactatgcagctcgttagacgccccacagaccagaggccatgattggaggatgctcgcacacaaattaaatctcgaccgctacctcaattacttcgcgacgaaatcaagtcctactggagtcatcctggacctgtgggaggcacagaatttccctgacggaaatctgagcatgctggcagccgtgttggaggaaatgggtcgccatgaaactgtggtgtcactggctgcagagggacagtactag

SEQ ID NO: 140400 - DNA, 2796 bp, Artificial Sequence
  derived and/or modified sequence
atgcggaagggcctgcgggccaccgccgcccggtgcggcctgggcctggggtacttacttcaaatgctggtcctcccagccctcgccctcctcagcgcttccggaaccggctcagccgctcaggatgacgatttttttcacgaactgcccgagactttcccttccgatcctccagagcctcttccccacttcctgattgagcctgaggaagcatacatagtcaaaaataagcccgtgaacctatactgcaaggccagtccggccactcagatatattttaagtgtaatagtgaatgggttcaccagaaagaccacatcgttgatgagagagtcgatgagacatccggcctgatcgtgagagaagtgtcaatcgagatcagtcgacaacaagttgaggaactttttggcccggaagactattggtgccagtgcgtggcctggagcagtgccggcaccacgaagagcaggaaggcatatgtgaggatcgcatacctccgtaagacttttgaacaggagccgctcggaaaggaggtcagcctggagcaggaagtgttgctacagtgcaggcccccagaagggatacctgtggcagaagtggaatggctgaaaaatgaggatattattgaccctgtcgaggacaggaatttttatattacaatcgaccacaacctaattatcaaacaggccagattgagtgacaccgccaattacacgtgcgtggccaagaacatagtggcaaaacggaaatcgaccacagctaccgtgattgtctacgtcaatggaggatggagcacatggaccgagtggagcgtctgtaacagccgatgtggaagaggatatcagaagagaaccagaacatgtacaaaccctgctcccctcaacggtggcgctttctgcgagggccagagtgtccagaaaattgcctgtaccacattgtgtcctgtggacggcagatggacaccatggtccaagtggagtacctgcggcactgagtgcacccattggcgtaggagggagtgcactgcccctgcaccgaagaatgggggaaaagattgtgatgggctggtgctccaatccaagaattgcacggacgggctttgtatgcaaacagctcccgattccgacgacgtggccctgtacgtaggaattgtcatcgcagtgattgtctgtctcgcgatttctgtggtggtagccctgtttgtgtatcgaaaaaaccatagagattttgaatccgacattatagattcatcagcccttaacgggggattccagccagtgaacattaaggccgcacgacaggaccttctggccgtcccacccgatctcacttccgccgctgccatgtaccgggggcccgtgtacgctttgcatgatgtctcagacaaaattccaatgactaatagccctatcctcgacccgctgccaaacctgaaaatcaaggtatacaatacctcaggggccgtcaccccgcaagacgatttgtccgaatttaccagcaaactcagtccacagatgacccagagtctcctggagaacgaagcccttagccttaaaaatcagagtctcgctagacagacagacccgtcttgtacagcttttggaagttttaactctttaggtggccacttaatagtgcccaattctggagtgtctctactgatacctgcgggagcaattcctcagggtagggtatacgaaatgtatgtcaccgtccacagaaaggagaccatgcgccctcccatggatgattcacagaccctgctgactccagtggtcagttgcgggccccccggggccctgctcactcgtcctgttgtgctcacaatgcaccattgtgccgatcccaacacagaagactggaaaatccttttaaagaaccaggccgcccagggtcagtgggaagatgttgtggtggtaggagaggagaattttacaacgccttgctacattcaactggacgctgaagcatgccacatactcacagagaacttgagcacctacgcattagttgggcactctacgacaaaggctgccgctaaaaggctgaaattagccatcttcggacccctctgctgttccagtcttgaatactccatccgtgtgtattgtttagacgacacacaggacgccttgaaggaaatcctgcacctggaaaggcagatgggaggccagctcctggaggagccaaaggctctgcattttaagggatcaacccacaacctaaggctttcaattcatgatatagcacacagtttgtggaagtccaaacttctggctaaatatcaagaaatccccttttaccacgtgtggtctggaagccaaaggaatctgcactgcacctttacattggagaggttcagtttgaacaccgtcgagcttgtttgcaaattatgcgttagacaggtggaaggtgagggccagatatttcagctgaactgtaccgtgagcgaggaaccaacggggattgacctgccgctgctcgacccagctaacacaatcacaactgtgacgggcccgagcgctttctctattcccctgcccattcgccaaaagctgtgttcatctctggatgcacctcagacccgcggacatgattggcgcatgctggcacacaagctgaatctggatcgatatctcaactacttcgccacaaagagctccccaacaggcgtcatactcgacctatgggaagcccaaaatttccctgatgggaacttatccatgctggctgcagtgcttgaggagatgggtcgccacgagactgtggtctcactcgccgctgaaggccagtactag

SEQ ID NO: 140401 - DNA, 2673 bp, Artificial Sequence
  derived and/or modified sequence
gacgacgactttttccacgaactgcctgaaacttttccaagcgatcctccagaacccttgccgcactttctgattgaaccagaggaggcatatattgtgaaaaacaaaccagtgaatctttattgtaaagcgagtcctgcaacccagatttactttaagtgtaactccgaatgggtgcaccaaaaagaccatatcgttgacgaacgggtcgacgagacgtcgggtctcatcgtacgtgaggtgtcaattgaaatctcacgccagcaggtggaagaattgtttggccctgaagattattggtgccagtgtgttgcatggtcatcggccggaaccactaaatcccggaaggcatatgtgaggatcgcttatctgcggaaaacttttgagcaagagcctttaggcaaggaggtgagcctggagcaggaagtgttacttcagtgtaggcctccggaggggattccagtggcggaagtggagtggttgaagaacgaggacatcatcgatcccgtggaagaccggaatttctatatcaccatcgaccataacctcataattaagcaggcacggctgtctgatacagccaattacacgtgcgtcgcgaaaaacatcgtagcaaaaagaaaatcaactactgcgaccgtgatagtttacgtgaacggagggtggagtacatggactgaatggtctgtttgtaactcgaggtgcggaagaggataccagaagcgaacacggacttgtacgaatccagccccacttaatgggggtgccttctgcgaaggccagtctgttcagaagatagcatgcactacattatgccccgtagacggaaggtggactccttggtcaaaatggtccacctgtgggacagaatgcactcactggaggcggagagagtgtaccgccccagccccaaaaaatggtggaaaggactgcgatgggctggtcctgcagagcaaaaactgcactgatggattgtgcatgcagaccgctcctgacagtgatgacgtcgcactgtacgtagggatcgtcatcgctgtcatcgtgtgtctggccatctcagtagtggtcgctttgtttgtgtatcgaaaaaaccacagggactttgagtctgacatcatcgatagctcggccctgaacggaggcttccagcccgttaatattaaggctgccagacaagatctgctagctgtacccccagatttgacatccgctgccgctatgtatcgcggaccagtctacgccctgcacgacgtctccgataagattcctatgacaaactcgccgatccttgatcccctaccaaacttaaagattaaggtctacaatacttcgggcgcagttactccacaggacgatctgtctgaattcacttccaagctctccccccagatgactcaaagcctgttggagaacgaggcactgtctttgaaaaaccagtccctcgcaaggcagacggacccctcttgtacagcatttggaagcttcaacagtctgggcggtcacctaattgtgccgaattccggggtcagtcttctcattccagccggagctatcccgcaagggagagtttacgagatgtatgtgaccgtgcacagaaaggaaactatgaggccgccaatggatgattcccagacactgttaaccccagtggtttcatgcggtcctcccggtgccctgctcactaggccagtcgtcttaacaatgcaccactgtgccgatcctaatactgaagactggaaaatcctgttaaagaatcaggcggctcaagggcagtgggaggatgtggtcgtggtaggcgaagagaactttaccactccatgctatatacaacttgacgccgaagcttgtcatattctgaccgagaatctgtctacatacgccctggtcggccattccacgaccaaggcagcagctaagcgactgaagctcgccatcttcggtccactctgctgctcctctttggagtacagtatcagagtatattgcctggacgatacccaagacgccctgaaggagatactgcacctggagcgccagatgggcggtcagctgctggaagaaccaaaggcacttcattttaaaggcagtacccataacctcaggctgtctatccatgatatcgctcattctctctggaaaagcaagctgcttgctaaataccaagagatccccttttaccatgtgtggtcaggctcccagcgtaacttgcattgtacatttactctagagcgcttttcgcttaataccgtcgagttagtatgcaagctctgtgttcggcaagtggaaggagagggccagatcttccagctgaactgtacagtatctgaagagcccaccgggatcgatctcccacttctggacccagcaaacacaattacgacagtgacagggccatcagccttcagcatccccctcccgattcgccagaaattgtgttctagcctggacgctccacaaacaaggggacacgactggagaatgctcgctcacaaactaaatctggatcgctacctcaactattttgcaactaaatcatctccaacgggcgtgatcctagatctttgggaggcccagaacttccccgatggaaacttgtctatgttggccgctgtgctggaagaaatgggcagacatgagacggtggtgtccctcgccgcagaggggcagtactag

SEQ ID NO: 140402 - DNA, 2796 bp, Artificial Sequence
  derived and/or modified sequence
atgcgtaagggtcttcgcgcaacagcggcacgatgcggcctgggattggggtatctactgcagatgctggttctccccgcactcgcgctgctctctgcaagcggaaccggttcggcagcccaggacgacgatttttttcatgagctgccagaaacattcccgagtgaccctcccgagccattgccccacttcctcattgagcctgaggaggcttacattgtcaagaacaagcctgtcaatctgtactgtaaggcttcacctgcgacacagatctattttaagtgtaacagtgagtgggtgcaccagaaagaccacattgtcgacgaacgagtggacgagacatcaggtctgatcgtaagagaggtaagtatcgaaatcagcagacaacaagtggaggaactgtttggcccagaagattactggtgccagtgcgtggcatggtcaagcgccggtactaccaaaagccggaaggcctacgttaggattgcttacttgagaaaaacatttgagcaggagccgttaggcaaggaagtctccttagagcaggaagttctgctgcaatgccgaccgcctgagggtattcctgtcgccgaagtggaatggctcaagaacgaggatatcatcgatcctgtcgaagacagaaacttctacataacgatcgaccataacctgatcataaaacaagcacgactcagcgatactgccaattacacttgtgtggcaaagaatatcgtggctaagagaaaaagcaccaccgccaccgtgatagtctacgttaatggcggttggtccacgtggaccgaatggtctgtgtgcaacagccggtgtgggaggggatatcagaaacggaccagaacgtgcactaatccagccccacttaatggcggtgccttctgcgaagggcagtctgtgcagaagatagcctgcacaaccctgtgtccagtcgacggccgatggactccatggtccaagtggtccacctgtggcactgagtgtactcactggagaagaagagaatgtaccgccccagccccaaaaaacggaggcaaggattgtgacggacttgttctgcaaagcaagaattgtactgatggtctgtgcatgcagaccgcccctgattcagatgacgttgccttgtacgttggaatagtgatcgcagtgatagtgtgtttggccatctccgtggtcgtggctctgttcgtctaccgcaaaaaccaccgtgatttcgaatccgatatcattgacagcagtgctcttaacggagggtttcagcctgttaatatcaaagctgcaagacaggacctacttgccgtcccacctgatctgactagcgccgcagcgatgtaccgcggacccgtgtacgccctccacgacgtttccgataagattccaatgactaatagccctatcctcgaccctctccctaaccttaaaataaaagtttacaacacttccggggcagtgacacctcaggatgatctgtctgagttcacctctaagctttccccacagatgacacagagcctccttgagaacgaagctctttcgttgaagaatcagtcactcgctcgtcagaccgatccctcatgcactgcatttggatccttcaactctctcggaggccatctgatagttcctaacagtggagtgtcccttctcatccctgcaggagccatcccacaaggaagggtttacgagatgtacgtgactgttcaccgaaaagaaactatgcggcctcctatggatgactcacagactctgctgacaccagtggtgagctgtgggccacctggggcactgctaacaagacccgtggtgctgaccatgcatcactgtgctgatccaaacaccgaggactggaaaattttgcttaaaaaccaggccgcacagggccagtgggaagatgtggtcgtcgttggcgaggaaaattttaccactccctgctacattcagctggatgcagaagcatgtcatattttgaccgaaaatttgagcacctatgcattggtaggccattcaaccacaaaagccgcagccaaaaggctcaagcttgctatcttcggacccttatgctgtagttcattggagtacagcattcgggtctactgccttgatgacacccaggatgcattgaaggaaatcttgcatttggagcgacaaatgggaggccaactcttagaggaacctaaggccttacacttcaaagggagcacgcacaacctgcggctgtcgatacatgacattgctcatagcctctggaaatctaaactgcttgccaaataccaagaaatccctttctatcacgtttggtctggttctcagcgtaatctgcattgtactttcacgctcgagcgattcagtctgaacactgtcgaacttgtgtgtaagctctgcgtgcgccaagttgaaggtgagggccaaatcttccaacttaattgtaccgtgagtgaagaacccactgggattgaccttcccttattggatcccgctaataccataactacagtgaccggccctagcgccttctctatccctctgcccatccgacaaaagctgtgttcttctttggatgctccccagacacggggacacgactggagaatgttggcccataagctaaatctggatagatacctcaattacttcgcaacaaaatccagtccaacgggagtgatcctggacctttgggaggcccagaactttccggacggtaacctctccatgctggccgctgtgctggaagagatgggacgacacgagacagtggtcagtcttgctgcggaaggacagtattag

SEQ ID NO: 140403 - DNA, 3017 bp, Artificial Sequence
  derived and/or modified sequence
gatgatgacttttttcatgaactcccagaaacttttccttctgatccacctgagcctctgccacatttccttattgagcctgaagaagcttatattgtgaagaataagcccgtgaacctgtactgtaaagcaagccctgccacccagatctatttcaagtgtaatagtgaatgggttcatcagaaggaccacatagtagatgaaagagtagatgaaacttccggtctcattgtccgggaagtgagcattgagatttcgcgccagcaagtggaagaactctttggacctgaagattactggtgccagtgtgtggcctggagctccgcgggtaccacaaagagccggaaggcgtatgtgcgcattgcatatctacggaagacatttgagcaggaacccctaggaaaggaagtgtctttggaacaggaagtcttactccagtgtcgaccacctgaagggatcccagtggctgaggtggaatggttgaaaaatgaagacataattgatcccgttgaagatcggaatttttatattactattgatcacaacctcatcataaagcaggcccgactctctgatactgcaaattacacctgtgttgccaaaaacattgttgccaagaggaaaagtacaactgccactgtcatagtctatgtcaacggtggctggtccacctggacggagtggtctgtgtgtaacagccgctgtggacgagggtatcagaaacgtacaaggacttgtaccaacccggcaccactcaatgggggtgccttctgtgaagggcagagtgtgcagaaaatagcctgtactacgttatgcccagtggatggcaggtggacgccatggagcaagtggtctacttgtggaactgagtgcacccactggcgcaggagggagtgcacggcgccagcccccaagaatggaggcaaggactgcgacggcctcgtcttgcaatccaagaactgcactgatgggctttgcatgcagactgctcctgattcagatgatgttgctctctatgttgggattgtgatagcagtgatcgtttgcctggcgatctctgtagttgtggccttgtttgtgtatcggaagaatcatcgtgactttgagtcagatattattgactcttcggcactcaatgggggctttcagcctgtgaacatcaaggcagcaagacaagatctgctggctgtacccccagacctcacgtcagctgcagccatgtacagaggacctgtctatgccctgcatgacgtctcagacaaaatcccaatgaccaactctccaattctggatccactgcccaacctgaaaatcaaagtgtacaacacctcaggtgctgtcaccccccaagatgacctctctgagtttacgtccaagctgtcccctcagatgacccagtcgttgttggagaatgaagccctcagcctgaagaaccagagtctagcaaggcagactgatccatcctgtaccgcatttggcagcttcaactcgctgggaggtcaccttattgttcccaattcaggagtcagcttgctgattcccgctggggccattccccaagggagagtctacgaaatgtatgtgactgtacacaggaaagaaactatgaggccacccatggatgactctcagacacttttgacccctgtggtgagctgtgggcccccaggagctctgctcacccgcccagtcgtcctcactatgcatcactgcgcagaccccaataccgaggactggaaaatactgctcaagaaccaggcagcacagggacagtgggaggatgtggtggtggtcggggaggaaaacttcaccaccccctgctacattcagctggatgcagaggcctgccacatcctcacagagaacctcagcacctacgccctggtaggacattccaccaccaaagcggctgcgaagcgcctcaagctggccatctttgggcccctgtgctgctcctcgctggagtacagcatccgagtctactgtctggatgacacccaggatgccctgaaggaaattttacatcttgagagacagatgggaggacagctcctagaagaacctaaggctcttcattttaaaggcagcacccacaacctgcgcctgtcaattcacgatatcgcccattccctctggaagagcaaattgctggctaaatatcaggaaattccattttaccatgtttggagtggatctcaaagaaacctgcactgcaccttcactctggaaagatttagcctgaacacagtggagctggtttgcaaactctgtgtgcggcaggtggaaggagaagggcagatcttccagctcaactgcaccgtgtcagaggaacctactggcatcgatttgccgctgctggatcctgcgaacaccatcaccacggtcacggggcccagtgctttcagcatccctctccctatccggcagaagctctgtagcagcctggatgccccccagacgagaggccatgactggaggatgctggcccataagctgaacctggacaggtacttgaattactttgccaccaaatccagcccaactggcgtaatcctggatctttgggaagcacagaacttcccagatggaaacctgagcatgctggcagctgtcttggaagaaatgggaagacatgaaacggtggtgtccttagcagcagaagggcagtattaaccaccatgctggaaggggaaatgaaggacaaaaatgcacagggagtctgtggccgtccaggtgaatcacagctgaggaggaaatccagatgagaccaatgcacttcacaggcaagactgcagcaggagccagaaggaaaacagatacaactgcccatgtacatgcccactttactcggacatcatcacgggagttaagaaaaattgtgtaaatttgtaccttgaatttagctatcaacctaattttcctcttagttgggctgtatgctgtgtggtacaggatcttacagtttcctaggaaacgctttttattgctatccagatatatggataaactttcttaac

SEQ ID NO: 140404 - DNA, 9875 bp, Artificial Sequence
  derived and/or modified sequence
cagacttcggcgtgcggcggagctgcggctgctcctgctgctggggggagcggcggaggtggccgccttgcgcctccctggacttcccaagtgggggcagagcagtcgctcgcgggagacgtcagttagaaggcattgggaaagagggaccttcaaactcctcctcggcgtctcctctcctcccccttttggcccctgcctttggagaaagtggagtgtggcgcttggttgtcgttatttcttcggactgcttcgcggtgcacggattcagcttctgcccagtggggctttcagctgtttgcgcgtctctctgtccccctcccctccccccggcacacctctgtctacgatgaggaaaggtctgcgggcgacagcggcccgctgcggactgggactgggatacttgctgcaaatgctcgtgctacctgccctggccctgctcagcgccagcggcactggctccgccgcccaagatgatgacttttttcatgaactcccagaaacttttccttctgatccacctgagcctctgccacatttccttattgagcctgaagaagcttatattgtgaagaataagcccgtgaacctgtactgtaaagcaagccctgccacccagatctatttcaagtgtaatagtgaatgggttcatcagaaggaccacatagtagatgaaagagtagatgaaacttccggtctcattgtccgggaagtgagcattgagatttcgcgccagcaagtggaagaactctttggacctgaagattactggtgccagtgtgtggcctggagctccgcgggtaccacaaagagccggaaggcgtatgtgcgcattgcatatctacggaagacatttgagcaggaacccctaggaaaggaagtgtctttggaacaggaagtcttactccagtgtcgaccacctgaagggatcccagtggctgaggtggaatggttgaaaaatgaagacataattgatcccgttgaagatcggaatttttatattactattgatcacaacctcatcataaagcaggcccgactctctgatactgcaaattacacctgtgttgccaaaaacattgttgccaagaggaaaagtacaactgccactgtcatagtctatgtcaacggtggctggtccacctggacggagtggtctgtgtgtaacagccgctgtggacgagggtatcagaaacgtacaaggacttgtaccaacccggcaccactcaatgggggtgccttctgtgaagggcagagtgtgcagaaaatagcctgtactacgttatgcccagtggatggcaggtggacgccatggagcaagtggtctacttgtggaactgagtgcacccactggcgcaggagggagtgcacggcgccagcccccaagaatggaggcaaggactgcgacggcctcgtcttgcaatccaagaactgcactgatgggctttgcatgcagactgctcctgattcagatgatgttgctctctatgttgggattgtgatagcagtgatcgtttgcctggcgatctctgtagttgtggccttgtttgtgtatcggaagaatcatcgtgactttgagtcagatattattgactcttcggcactcaatgggggctttcagcctgtgaacatcaaggcagcaagacaagatctgctggctgtacccccagacctcacgtcagctgcagccatgtacagaggacctgtctatgccctgcatgacgtctcagacaaaatcccaatgaccaactctccaattctggatccactgcccaacctgaaaatcaaagtgtacaacacctcaggtgctgtcaccccccaagatgacctctctgagtttacgtccaagctgtcccctcagatgacccagtcgttgttggagaatgaagccctcagcctgaagaaccagagtctagcaaggcagactgatccatcctgtaccgcatttggcagcttcaactcgctgggaggtcaccttattgttcccaattcaggagtcagcttgctgattcccgctggggccattccccaagggagagtctacgaaatgtatgtgactgtacacaggaaagaaactatgaggccacccatggatgactctcagacacttttgacccctgtggtgagctgtgggcccccaggagctctgctcacccgcccagtcgtcctcactatgcatcactgcgcagaccccaataccgaggactggaaaatactgctcaagaaccaggcagcacagggacagtgggaggatgtggtggtggtcggggaggaaaacttcaccaccccctgctacattcagctggatgcagaggcctgccacatcctcacagagaacctcagcacctacgccctggtaggacattccaccaccaaagcggctgcgaagcgcctcaagctggccatctttgggcccctgtgctgctcctcgctggagtacagcatccgagtctactgtctggatgacacccaggatgccctgaaggaaattttacatcttgagagacagatgggaggacagctcctagaagaacctaaggctcttcattttaaaggcagcacccacaacctgcgcctgtcaattcacgatatcgcccattccctctggaagagcaaattgctggctaaatatcaggaaattccattttaccatgtttggagtggatctcaaagaaacctgcactgcaccttcactctggaaagatttagcctgaacacagtggagctggtttgcaaactctgtgtgcggcaggtggaaggagaagggcagatcttccagctcaactgcaccgtgtcagaggaacctactggcatcgatttgccgctgctggatcctgcgaacaccatcaccacggtcacggggcccagtgctttcagcatccctctccctatccggcagaagctctgtagcagcctggatgccccccagacgagaggccatgactggaggatgctggcccataagctgaacctggacaggtacttgaattactttgccaccaaatccagcccaactggcgtaatcctggatctttgggaagcacagaacttcccagatggaaacctgagcatgctggcagctgtcttggaagaaatgggaagacatgaaacggtggtgtccttagcagcagaagggcagtattaaccaccatgctggaaggggaaatgaaggacaaaaatgcacagggagtctgtggccgtccaggtgaatcacagctgaggaggaaatccagatgagaccaatgcacttcacaggcaagactgcagcaggagccagaaggaaaacagatacaactgcccatgtacatgcccactttactcggacatcatcacgggagttaagaaaaattgtgtaaatttgtaccttgaatttagctatcaacctaattttcctcttagttgggctgtatgctgtgtggtacaggatcttacagtttcctaggaaacgctttttattgctatccagatatatggataaactttcttaacaaacccaatttctacaaatgttgtttacatcaaattggacagggatgcagacactgtccatggctcgttctatttttgttcaaatcatttgaagttgaagctgtggacggtttgttgtgtctatttcagattagtaatttacagagaaatcacagacttttgctacaaatcgtgtgcatcaagtgtctcagataatcctcccatcagtgttctgtttctagaacttgtagaaccagtgttactgtttgtatcagggaagtggagaatctaagtgtaaaaaagaaataactaagactcctattccttggagggacccttctggtgccctttgggaataaagctgtagcactgcagggaagacagtgattcatgttcaaccccacaaacaagcatttttttcacaacatgtgtgtttgtttgtaatatgcaatatgaagtgtttttttttaaaggtattattattatttacaggtattctggtaaaatgatttttttaaatttctatttttgttagcagtgctgtttgttagtatttggttattgactagacctgtcccaccttttcacctatcaaggtgggtgtggtcatcagtttaattcaacatgcatcacttccttgaccttttacctttcccttattccaccccagaaaggtgattgataaatgctgaatggctttgtcagtctgttccttcagcttgctcaggcagggtctttctttctcctctgaggagtcttaaggagacgtgttctctattaagttcacttaatattgccgttgtgtggccccacgtcgactccctatggtgctctactctagaggcagtgtggttggaggaatggactctaaactggagatcaagaaaccagttctcattgtgggtctgtcactgtcttgttgcgccaccttgagaaagtcatttaaccacacgacctcagtgtcctcactagaaagtgaaagggtgggattagatcatctccaagttctgaaatgctcaacttccaccgtgatgcctccagtctcattcatcagtctgaagaccacaatggactctgacctggatcatcatttaaaaatcatcagctggtcttttgcccaggctatgttacgcctttcaagtagttctgacaaggaagatgattattctaaccagcattatgatgttgtttgtttggcctgagtcgctctgcatcattgcattatgctgttcactgagagatgacatccctttattatcattttcttagcctctcttgggatgcccctgcccccagccttcctgactggttgcaaattctgttttttattattgtcttggcatcttgatatctagaccactcctacaagtttatctggcagtaggaacttggtgcatttttttctacgctacacccccccacccttaatctttctttgctgtcataatattcagtagcatttataaaagctgtctagttagctctttaaaaacttttgtcctgcaaaatgtttgttagtcaacacactactttgtgtaaacaactattatgtttccttgggaccatcacaagctctttaacaaacacaaggactcaattcattcagcaggtggggattaaagaatcaaagcccagtagcaaaaccaaaactgaagaacaagcagacatgtgtatgaatcggaacctttagaacatgactgtggtttacttttaggctggaggcacacaagttgctgaacagacttgaattatacatgtgcttccatctttccatgtttccgctcctattttggtagcatcttgagattccttgatgcctccgccatcctcatccctgaggaactgctgataccttgctatggaacctcttctttctttcatgctttttattccgtatcttctgttttggacatacatacatatattctataaaatctctctcagcccaccccctgcattaggatttccatatttaaaatatttgtacactgactggggaagggagagattgcactataaacaagttcagtggatgtttgtagcaatgagtaaaactgtattctaaattaaaaatcaaatatatatacacgcagttatacacacacattttttaaaaggaggaggaggaaagagagctattgtccattcctacattttgaaataaacttgtcaagattacgcatcagtaccagggttgtggaatcatctatggaaatcaagaactagaatctgaactgaatggtcaaagaaacttctatgcctagtgaaaactagaggggagcaactatgtagctatgaacatgaatcaattccataactgttactaaaaacttattttgactaaaaagtcaccaacacagaactattgaacacaaacaggaattgtttgtcttactgaagtcactgagaacccttggggttcacttcagatgcttttttggttcaacttcccaccaccagaaaagggaaaagtgattgatttcgtgtgtgaggtactcatctgtcagaacccttaatgtttcctattaagtgaatgacaacttccatacatacactatttataccaaataattttcactacaaattctgatttccttctcctttggagtaaagtaatagctgttagattgctttcaaacttagaaggtccagatataacagttcatttcataggaagccacttcatcaaccattctatgtgatacatcctgcttctttctacaccgctggagaggcagtttggctggtttcatttggatagaaaaaactatcatttgtgcatgctgccatctagtggtgtacaacacaatctaacctgagtttaatattcactagaatgtgtttgacgaagggaatgaaaacctgtagagttcaaggacctttatgacaaacagatgtagggaaattttcacttcaaatttataattttcttattctcacttttttttcatttgcatcactcatctcaatattaggtcactgtgagcccagtacatcaactcattcatacacaacatatcttcagttgcttcttgtaacagaactatgtaaaatctatataaaacagtctttgaagagttgtcatttttaacacttatggttttcattggggtttgtatactttaaatctccttttagttccttaatatttatctttggaaatgtaagaagtatctgcttagaaagaaataagtcttatatatgcgaatggaatactatgtctagggaagagaaaattggggttgttaatcaaagggaagaaagcagcttcttttctgctgaatttgggaatccaaaggcagaggtttcatcctgtttttattttcttcttatcacactctttcaagtttccttaatgtatctggaaggaatagaagttggattcagaattgataactggcatggtgatgacaaacctgtgtaacaccaaggttctcacagctaacagctgtttcacaaacggcatcttccaaatgaacagtcacctctgctatgcagaaaacccccatcctgctgtgagcaagttaggctcttcaagaactggacaacttttgggtgaggtgttcaatatcaaactgcataatcattagccattttcatatatactattttatagatttaagtctctcaactatcaaaaagtagagcgattttcaggagaaaaaagtcgtggggactgagttcaggacaccctgaaactatgcgaccagtaatttttttaaggtattttttcctacaagtaaggtatctgaaaagtcaacgttttgagggtggaatcaagacttttcacttctcctggcaaagagcaacaaggctcttgtctcgtgtccttctgtgtgtctctgtcaggatcacagcagctgtgctcttggtctgcttactcctctgtaatccacgtatgcagaagggagttaataaggtgatcaccatctccccagaattcaaaggtctttgcctctataaggtctgcccctatggggccaggaaaatataaacctatataaggacttgcaagagagcataaagaaggtagaaaaggtttacttgttgggttttcaagccttcaagttgaatgagtcttagcttttgctgggcagttgttctggacaagtcatcagtttcatgtggagaactcagtgtaagcccaaggctaatgaatgagaggggtcccatggaaacacagctgaaatgaaatgggactttatccatcttctttgagaatggaagagcttttgtgaagcagtacatcattgctcaagataatggttgataagcattagattttatagatctaataaggaaaatattttattatctcaagttaacaaaacatttttttacctctcgagtgcctcataggaccaactattactctttggcttttatttttctttttgtattatttttatatattctttaaccttgctgagctagtattgactgaaatctttagaactttgcctctgggcaatgaagtaatgtttctctaccctaagatatctatttgtataatctctggctgtaatgatcactttggaagatttcctttgcatctctaattatttctttttaatggaataaggcataagggggaataaatatattgtaaccaatgttatgtaaacccatatccatacaggccaggaaagccaaatgaagtcatttccagaattctagtgtgaaaaacctatttttgaaaagtggggagatggctttgtgtagaactgggtgggttttctctgcagactaagtctagccatgagcttccagatcctttagttttatcagccttgtgcttaccccattttcataaatgctactttaacagccagtcttcataagtcatggttcctaggttttcctgtcacctcattgtattcatctgtggtaggatattaacgggctcattcaaccaaatgtaatgtgtgcctcagacctatttagcatggttggggggcatcagcaggacaaaccaacaggtactccgcaagtgtactggcacagcaagcccaccaattattagcagctcttcatcagcctgctgtctactcagacgcttgcctactgaagggacctgtccagagatcttctggaatcccaggttgggaatctctgcagaatgtcgtgacagttgtggcccaactagcttctgagtagaaacaaggaagctaccctgagatatagtcagctgcccacctgccatagtatttgctactgaatgccagccttttaacataccatttcagatttgtccttcaacaaaaatataaattgcaagtcataccatttaagggtcttttacaaatatgtctaaattgtgtgtcatttttaagttccaaaggtctactggactaagtactatcagaccagctgtagaacctgatggcgctgatccggggtggaataaccctcagtactggtgtgtagaagatgaattgtaggcaggttttgctgatcagcagcctaaggattgatgggctctcttttggcctctgatcctgagcactatggaggcagcatcagagaatggggacctgagctacataggttctcaatgttaaaacaactctgttcggagtgacatataagagcaagaaatctacagctggtgtaaaatacctttgccttttctatcccgaaagtaacaaatggcatctgtacatgtaggggtaaaaactcagatgtctactcctccaggccatggacaagaaaaagtacagcagtcagaacagtggaacaagtgatttgcattctcttcttcacgctttcctagatctgccattggtagcgcagccctcgccctccagacataatgcatcgagcccagttgcagggaacatcactgtgtgtgtgtgatgtcatggtgttatatgtgttgagtttaatgttgagctgaagcaagttggtgaccttcctctttgctctttgtaaagaagacaccaatgtttgtcagagaaaaatccccagcagtcgtgttgaagaggcagtgtcatccacctactgtcccctttggaacagttcaactgcagaaaggtcggattgaggttttgtgctttgtcgtttttcttttttaaacaaaacatgacaaccttggcttttccgatatggaacacttttgttgttgtggagttccctcttgctgtatcttctatgcaattccttttctaaaaaaaccccccggcagaggcagagtgccctccggatatctgtccggcgccttgctgagtggtggaggtgagggataccagctccgggtgtgcctcttttctctccctggctgccaatcctgattttccctgcagtccccttggtttgtaaattgcctgcatttattctgtcagccaacatgtacaaaatgtaagaaagaatttttaaacaggtaataaattatatttataagcaacaaa

SEQ ID NO: 140405 - protein, 238 aa, Artificial Sequence
  derived and/or modified sequence
MRPAALRGALLGCLCLALLCLGGADKRLRDNHEWKKLIMVQHWPETVCEKIQNDCRDPPDYWTIHGLWPDKSEGCNRSWPFNLEEIKKNWMEITDSSLPSPSMGPAPPRWMRSTPRRSTLAEAWNSTGSWTSTGGCALPPAALPSGDLCCRPSLTAGSRGVGVDLTALQQLLHVHYSATGIIPEECSEPTKPFQIILHHDHTEWVQSIGMPIWTISSSESAIGKTRTQPACAVLSHDS

SEQ ID NO: 140406 - protein, 207 aa, Artificial Sequence
  derived and/or modified sequence
MRPAALRGALLGCLCLALLCLGGADKRLRDNHEWKKLIMVQHWPETVCEKIQNDCRDPPDYWTIHGLWPDKSEGCNRSWPFNLEEIKKNWMEITDSSLPSPSTDLLPEMRAYWPDVIHSFPNRSRFCGTCAAQVDALNSQKKYFGRSLELYRELDLNRWVRPSPGCTSQWGSLLSPKPDSWIQGSGCRPHCPPAASACALFGYWDHS

SEQ ID NO: 140407 - protein, 306 aa, Artificial Sequence
  derived and/or modified sequence
MRPAALRGALLGCLCLALLCLGGADKRLRDNHEWKKLIMVQHWPETVCEKIQNDCRDPPDYWTIHGLWQVSHTSRRGLLFLFKNIFSLSSRNFSFYSLQTSMKKPPQPSLIFLIFSFKPDKSEGCNRSWPFNLEEIKDLLPEMRAYWPDVIHSFPNRSRFWKHEWEKHGTCAAQVDALNSQKKYFGRSLELYRELDLNSVLLKLGIKPSINYYQVADFKDALARVYGVIPKIQCLPPSQDEEVQTIGQIELCLTKQDQQLQNCTEPGEQPSPKQEVWLANGAAESRGLRVCEDGPVFYPPPKKTKH

SEQ ID NO: 140408 - protein, 256 aa, Artificial Sequence
  derived and/or modified sequence
MRPAALRGALLGCLCLALLCLGGADKRLRDNHEWKKLIMVQHWPETVCEKIQNDCRDPPDYWTIHGLWPDKSEGCNRSWPFNLEEIKDLLPEMRAYWPDVIHSFPNRSRFWKHEWEKHGTCAAQVDALNSQKKYFGRSLELYRELDLNSVLLKLGIKPSINYYQVADFKDALARVYGVIPKIQCLPPSQDEEVQTIGQIELCLTKQDQQLQNCTEPGEQPSPKQEVWLANGAAESRGLRVCEDGPVFYPPPKKTKH

SEQ ID NO: 140409 - protein, 254 aa, Artificial Sequence
  derived and/or modified sequence
MRPAALRGALLGCLCLALLCLGGADKRLRDNHEWKKLIMVQHWPETVCEKIQNDCRDPPDYWTIHGLWPDKSEGCNRSWPFNLEEIKDLLPEMRAYWPDVIHSFPNRSRFWKHEWEKHGTCAAQVDALNSQKKYFGRSLELYRELDLNSVLLKLGIKPSINYYQVADFKDALARVYGVIPKIQCLPPSQDEEVQTIGQIELCLTKQDQQLQNCTEPGEQPSPKQEVWLANGAAESRGLRVCEDGPVFYPPPKKT

SEQ ID NO: 140410 - DNA, 717 bp, Artificial Sequence
  derived and/or modified sequence
atgagaccagccgccctgcgcggagccctattgggttgcttatgcctggccttgctgtgcctcgggggggctgacaagcggctcagagacaatcacgagtggaagaagttaattatggtgcagcattggcccgagacagtgtgcgagaagattcagaacgactgccgggacccacctgattattggactatccacggactgtggccagataagagcgagggctgcaaccgatcttggcctttcaacttggaagagatcaagaagaactggatggagatcactgactcgagcctaccatctcccagcatgggacccgcccctcctcggtggatgcggtcgacaccccgacggagcacactggccgaggcctggaacagcacggggagttggactagtacgggaggttgtgctcttccccctgctgcattgccaagcggggatttgtgttgtcgtcccagtctgacggctggctcccgtggggtgggggtggacttgaccgccttgcagcagctgctccacgtccactacagcgccactggcattattcccgaagaatgtagtgaaccaactaagccctttcagattatactgcaccatgaccatacggagtgggttcagagcattggtatgccaatctggacgatatcatcatctgaatctgccattggcaaaactcgcacccagccagcatgcgcagtgctaagccacgattcttag

SEQ ID NO: 140411 - DNA, 624 bp, Artificial Sequence
  derived and/or modified sequence
atgagaccggcagcactccggggggccctccttggctgtctttgcctggccttgctttgtctcggaggggctgataaacggctcagggacaaccacgagtggaaaaagcttataatggtccaacattggccggagaccgtgtgtgagaagatccagaatgactgtcgcgacccccctgactactggacaattcacggcctctggccagacaagtctgagggctgtaatcgcagctggccctttaacctggaagagatcaaaaagaattggatggagatcacagactcttccctgccaagcccgagcactgatctgctgcccgaaatgagagcatattggcccgatgtgattcacagcttcccaaatagaagtaggttttgtgggacttgtgccgcccaggtggatgccctcaacagccagaaaaagtattttggccgctcgctcgaactgtatagggagctagacttgaataggtgggtgaggccatcacccggctgtacaagccaatggggtagcctcctgtctcccaaaccagattcatggatccaaggttcaggctgcaggcctcactgtccgcccgcagcttccgcatgcgctctcttcggatactgggatcatagctag

SEQ ID NO: 140412 - DNA, 921 bp, Artificial Sequence
  derived and/or modified sequence
atgagacctgccgcactccgaggagctctgcttgggtgtttatgcctggccctgctgtgcctgggcggcgctgacaaacggctccgagataaccatgaatggaagaaactgatcatggtacagcattggccggagactgtgtgtgagaaaatccagaacgactgtcgtgaccctcccgactattggactatccacggactgtggcaagtgagccacacctcacgaagagggctgctgttcctattcaagaatatcttctccctttcgtcgcgtaatttttcattctattccctacaaacatcaatgaaaaagcccccccagccaagcctgatattcttaattttctcattcaaacccgataagtccgaaggttgtaacaggtcttggccatttaatcttgaggaaattaaagacctcttgcccgaaatgcgtgcttactggccagatgtaatccactctttcccgaaccgctctcggttctggaaacacgaatgggaaaaacacggaacctgtgccgcccaagtggacgcgctgaactcgcagaagaagtattttgggaggtctctggagctgtaccgggagttagacttgaactcagttctcctcaagctgggcattaaaccctccataaattactatcaagttgcggactttaaggatgcattagctcgagtgtacggcgttatccccaaaatccagtgtttacccccatcccaagacgaggaggtgcaaactatagggcagatagagctgtgcctcactaaacaggaccaacagctgcagaactgtacggaacccggtgaacagccttcacccaaacaggaggtttggctggcaaacggtgcagctgagagccggggattgcgcgtctgtgaggatggacccgttttctaccccccccctaaaaaaacaaaacactag

SEQ ID NO: 140413 - DNA, 771 bp, Artificial Sequence
  derived and/or modified sequence
atgagacccgctgcgttgaggggcgccttgctcggttgcctgtgcctcgctctcttatgtctcggcggggccgataaaaggcttcgagacaaccacgaatggaaaaaactgatcatggtccagcattggccagagactgtctgcgaaaagattcaaaacgattgtagggacccacctgactactggactatacacgggctgtggcccgacaagtcggaagggtgcaataggagctggccattcaatctcgaggagatcaaggatctgttgccagaaatgcgagcttactggcccgacgtcattcactcctttccaaaccggagtcggttctggaaacatgaatgggagaagcacggcacatgcgcggcccaggtggacgccctgaacagtcagaaaaagtacttcggtcgctctctggaactgtaccgggaactcgatctgaacagtgtgttactcaaattaggcatcaagccctcaatcaactattaccaggttgccgacttcaaggacgctttggctagggtttatggtgttatccctaagatacagtgccttcccccatctcaggacgaagaggtgcagacaattggtcagattgaactatgcttgaccaagcaagatcagcaactgcaaaactgcaccgaacctggagaacagcctagcccgaagcaggaggtgtggctagcgaacggggccgccgagagtcgagggctgcgtgtctgtgaggatggccctgtgttttacccaccgcccaagaaaactaaacactag

SEQ ID NO: 140414 - DNA, 765 bp, Artificial Sequence
  derived and/or modified sequence
atgagacctgcagcgctgaggggagctctgctgggttgtctgtgcctcgctctgttgtgcctgggtggcgcagataaaagactgagagacaaccacgaatggaagaagctcatcatggtacagcactggcccgaaaccgtctgtgagaaaatccaaaacgactgccgtgacccccccgactactggacaattcacggtctttggcctgataagagcgaaggatgcaaccgtagctggcctttcaatctagaggagatcaaggacttgctcccggaaatgagagcctactggccagatgtgatccattcgttcccgaatcggtcgcggttctggaagcacgagtgggagaaacatggcacctgtgccgcgcaggtggatgctctgaacagccaaaagaaatactttggtcgctctttggaactctatagggaattggatctaaactctgtgctgcttaaactgggcattaagccttctattaattattatcaggtggctgactttaaggatgcgcttgcaagagtgtatggcgtaattcccaagattcagtgtctgccacccagccaggatgaagaggtccagacaattggacagatcgaactctgcctaacaaagcaggaccagcagctgcaaaactgcactgagcccggcgagcaaccttcccccaagcaggaggtttggcttgcaaacggcgcagcagaaagccggggcctgcgggtctgtgaggatggccctgtcttctatcccccaccaaaaaaaacctag

SEQ ID NO: 140415 - DNA, 771 bp, Artificial Sequence
  derived and/or modified sequence
atgcgcccggccgccttgagaggcgcccttctgggctgtctgtgcctggccttgctgtgtcttgggggcgccgacaaaaggttacgcgataaccatgagtggaaaaagctcatcatggtacaacactggcctgagaccgtgtgtgagaagatccagaacgactgtagggacccccctgattactggactattcacgggctgtggcccgataagagcgaaggctgcaaccggagctggcctttcaacctagaggagataaaggatctgctaccagagatgcgcgcctattggcccgacgtgatccatagctttcctaaccggagtcgattttggaagcatgaatgggaaaagcatggaacatgcgccgcgcaggtagatgccctgaactcccaaaaaaaatactttgggcggtccctcgagctatatcgggaactcgatctgaactcagtcctacttaagctgggaatcaagccctcaattaattattaccaggtagcggactttaaggacgcattagcgcgagtctatggcgtgattccaaagatccagtgcttgccaccctcccaagacgaagaggtgcagaccataggacaaattgaattgtgtctgacaaagcaggatcagcaacttcaaaattgtaccgagcccggagagcagccttccccaaagcaagaagtctggctggcaaacggagcagccgaatccagaggactacgtgtctgtgaggatggccctgtcttctaccctccaccgaagaagacaaagcactag

SEQ ID NO: 140416 - DNA, 717 bp, Artificial Sequence
  derived and/or modified sequence
atgaggcctgctgccctgcggggggccctgctgggctgcctgtgcctggccctgctgtgcctgggcggcgctgacaagaggctgcgggacaaccacgagtggaagaagctgatcatggtgcagcactggccagagaccgtgtgtgagaagatccagaatgactgccgggaccccccagactactggaccatccacggcctgtggccagacaagtctgagggctgcaacagatcctggcccttcaacctggaggagatcaagaagaactggatggagatcacagacagcagcctgcccagccccagcatgggccctgccccaccccgctggatgaggagcaccccccggcgcagcaccctggccgaggcctggaacagcacaggctcctggaccagcactggaggctgtgccctgcccccagctgccctgcccagcggggacctgtgctgccggcccagcctgacagctggcagccggggcgtgggcgtggacctgacagccctgcagcagctgctgcacgtgcactacagcgccaccggcatcatcccagaagaatgttctgagcccaccaagcccttccagatcatcctgcaccacgaccacacagagtgggtgcagagcatcggcatgcccatctggaccatcagcagcagcgagagcgccatcggcaagaccaggacccagcctgcctgtgctgtgctgagccatgacagctag

SEQ ID NO: 140417 - DNA, 624 bp, Artificial Sequence
  derived and/or modified sequence
atgaggcctgctgccctgcggggggccctgctgggctgcctgtgcctggccctgctgtgcctgggcggcgctgacaagaggctgcgggacaaccacgagtggaagaagctgatcatggtgcagcactggccagagaccgtgtgtgagaagatccagaatgactgccgggaccccccagactactggaccatccacggcctgtggccagacaagtctgagggctgcaacagatcctggcccttcaacctggaggagatcaagaagaactggatggagatcacagacagcagcctgcccagccccagcacagacctgctgcctgagatgagggcctactggccagatgtgatccacagcttccccaacagaagccgcttctgtggcacctgtgccgcccaggtggatgccctgaacagccagaagaagtacttcggccgcagcctggagctgtaccgggagctggacctgaaccgctgggtgcggcccagccctggctgcaccagccagtggggcagcctgctgagccccaagccagacagctggatccagggcagcggctgccggccccactgccccccagctgccagcgcctgtgccctgtttggctactgggaccacagctag

SEQ ID NO: 140418 - DNA, 921 bp, Artificial Sequence
  derived and/or modified sequence
atgaggcctgctgccctgcggggggccctgctgggctgcctgtgcctggccctgctgtgcctgggcggcgctgacaagaggctgcgggacaaccacgagtggaagaagctgatcatggtgcagcactggccagagaccgtgtgtgagaagatccagaatgactgccgggaccccccagactactggaccatccacggcctgtggcaggtgagccacaccagcagaagaggcctgctcttcctgttcaagaacatcttcagcctgagcagcaggaacttctccttctacagcctgcagacctccatgaagaagccaccccagcccagcctcatcttcctgatcttctccttcaagccagacaagtctgagggctgcaacagatcctggcccttcaacctggaggagatcaaggacctgctgcctgagatgagggcctactggccagatgtgatccacagcttccccaacagaagccgcttctggaagcatgagtgggagaagcacggcacctgtgccgcccaggtggatgccctgaacagccagaagaagtacttcggccgcagcctggagctgtaccgggagctggacctgaacagcgtgctgctgaagctgggcatcaagcccagcatcaactactaccaggtggccgacttcaaggatgccctggcccgggtgtatggagtcatccccaagatccagtgcctgccccccagccaggatgaggaggtgcagaccatcggccagatcgagctgtgcctgaccaagcaggaccagcagctgcagaactgcacagagcccggggagcagcccagccccaagcaggaggtgtggctggccaacggggctgctgagagccggggcctgcgggtgtgtgaagatggccctgtgttctaccccccacccaagaagaccaagcactag

SEQ ID NO: 140419 - DNA, 771 bp, Artificial Sequence
  derived and/or modified sequence
atgaggcctgctgccctgcggggggccctgctgggctgcctgtgcctggccctgctgtgcctgggcggcgctgacaagaggctgcgggacaaccacgagtggaagaagctgatcatggtgcagcactggccagagaccgtgtgtgagaagatccagaatgactgccgggaccccccagactactggaccatccacggcctgtggccagacaagtctgagggctgcaacagatcctggcccttcaacctggaggagatcaaggacctgctgcctgagatgagggcctactggccagatgtgatccacagcttccccaacagaagccgcttctggaagcatgagtgggagaagcacggcacctgtgccgcccaggtggatgccctgaacagccagaagaagtacttcggccgcagcctggagctgtaccgggagctggacctgaacagcgtgctgctgaagctgggcatcaagcccagcatcaactactaccaggtggccgacttcaaggatgccctggcccgggtgtatggagtcatccccaagatccagtgcctgccccccagccaggatgaggaggtgcagaccatcggccagatcgagctgtgcctgaccaagcaggaccagcagctgcagaactgcacagagcccggggagcagcccagccccaagcaggaggtgtggctggccaacggggctgctgagagccggggcctgcgggtgtgtgaagatggccctgtgttctaccccccacccaagaagaccaagcactag

SEQ ID NO: 140420 - DNA, 765 bp, Artificial Sequence
  derived and/or modified sequence
atgaggcctgctgccctgcggggggccctgctgggctgcctgtgcctggccctgctgtgcctgggcggcgctgacaagaggctgcgggacaaccacgagtggaagaagctgatcatggtgcagcactggccagagaccgtgtgtgagaagatccagaatgactgccgggaccccccagactactggaccatccacggcctgtggccagacaagtctgagggctgcaacagatcctggcccttcaacctggaggagatcaaggacctgctgcctgagatgagggcctactggccagatgtgatccacagcttccccaacagaagccgcttctggaagcatgagtgggagaagcacggcacctgtgccgcccaggtggatgccctgaacagccagaagaagtacttcggccgcagcctggagctgtaccgggagctggacctgaacagcgtgctgctgaagctgggcatcaagcccagcatcaactactaccaggtggccgacttcaaggatgccctggcccgggtgtatggagtcatccccaagatccagtgcctgccccccagccaggatgaggaggtgcagaccatcggccagatcgagctgtgcctgaccaagcaggaccagcagctgcagaactgcacagagcccggggagcagcccagccccaagcaggaggtgtggctggccaacggggctgctgagagccggggcctgcgggtgtgtgaagatggccctgtgttctaccccccacccaagaagacctag

SEQ ID NO: 140421 - DNA, 717 bp, Artificial Sequence
  derived and/or modified sequence
atgcggcccgccgccctgcggggcgccctgctgggctgcctgtgcctggccctcctgtgcctgggtggcgccgacaaacgattgcgcgacaaccatgagtggaagaagctgatcatggtacaacactggccagagactgtatgcgagaagattcaaaatgattgtagggaccctcctgattactggaccattcacggactatggcctgacaagtctgaaggatgcaatcgtagctggcccttcaaccttgaggagatcaagaagaattggatggagatcaccgacagctccctgccctccccctctatgggacctgcaccacccaggtggatgcgctctactccccgacgctcaacgctcgccgaggcttggaattcaactggctcctggacatcaacaggaggatgcgctttaccacctgcagctctcccctctggcgatctttgttgccgcccatcattaactgccggatcacgaggagtcggagtggatctcacagcgctgcaacaattacttcacgttcactatagtgccacagggattatcccagaggaatgctcagagcctaccaaaccattccagattatcctacaccatgatcacacggaatgggtgcaaagtattggcatgcccatttggacaatttccagtagtgagtctgctatcggaaaaacacgaacccagcctgcttgtgctgtcttgtcgcatgattcttag

SEQ ID NO: 140422 - DNA, 624 bp, Artificial Sequence
  derived and/or modified sequence
atgcggcccgccgccctgcggggcgccctgctgggctgcctgtgccttgcactcctatgcctagggggcgctgataaaagacttagagacaaccatgagtggaagaaactgatcatggtgcagcactggcccgaaactgtgtgtgagaagatacagaacgattgtagggatccaccagattactggaccatccacggactctggcccgacaagtctgaagggtgtaatcggagctggccgtttaacctggaggaaatcaagaaaaactggatggagataacggattcttcgctgccatccccctccacagacctcctgccagaaatgcgggcatactggccagatgtcattcacagttttccaaatcgaagcagattctgtggaacatgtgccgctcaagtagacgccttgaatagtcagaaaaaatattttgggcgatcactggagctttacagagaattggacctcaaccgctgggtgcggccaagtcctgggtgtaccagtcagtgggggtccctgctgagccctaagcctgatagctggattcagggaagtggctgtcgacctcactgccccccagccgccagcgcttgtgctctcttcggatactgggaccatagctag

SEQ ID NO: 140423 - DNA, 921 bp, Artificial Sequence
  derived and/or modified sequence
atgcggcccgccgccctgcggggcgccctgctgggctgcctgtgcctggccctgctctgcctggggggtgctgataaacggttgcgcgacaaccatgagtggaaaaaactgattatggtccagcactggcctgaaacagtgtgcgagaagattcagaatgattgccgtgatccgccagactactggacaattcacggcctctggcaagttagccatacctcccggcgaggtctcttattccttttcaaaaatatcttctctctgagctctcgcaattttagcttctattcgctgcagacaagtatgaaaaaacctccacagccctctttgatcttcctgatttttagcttcaagcccgataaatctgaaggttgcaatagaagttggccttttaaccttgaagagatcaaggatctcttgcctgaaatgagggcatactggcctgacgtcatacactccttcccaaatcgatctcgtttctggaaacacgagtgggagaagcatggcacgtgcgctgcccaggttgatgccctcaacagtcagaagaaatacttcgggcgttcactggagctgtatcgagagctggacctgaattccgtgctactgaagctggggattaaaccaagtattaactactaccaagtggccgactttaaagatgcacttgcccgtgtgtacggcgtgatcccaaaaatccaatgtctgcctccatctcaggacgaggaggtgcaaacaatcggccaaatcgaactgtgcctgaccaaacaggatcagcagcttcaaaattgtacggagcccggcgagcaacccagtccgaagcaggaagtttggttggcaaacggagctgctgaaagtcgagggctgcgagtgtgcgaggacgggccggtgttctacccacccccgaaaaagacaaaacactag

SEQ ID NO: 140424 - DNA, 771 bp, Artificial Sequence
  derived and/or modified sequence
atgcggcccgccgccctgcggggcgccctgctgggctgcctgtgcttggccttgctgtgtcttgggggtgctgataaaagactgcgcgacaatcacgaatggaaaaagttaatcatggtccagcactggcccgaaacggtgtgtgagaagatccaaaacgattgtagggatccccccgattactggactatacacggattgtggccggacaagtccgaaggctgtaacaggtcctggccgtttaacctcgaggagatcaaagatctcttgccagaaatgagagcatactggcccgatgtgatccattcatttcctaacagaagtcgtttctggaaacacgagtgggaaaagcatgggacctgcgcagcccaggttgatgctctcaatagtcaaaaaaagtactttggccgaagcctagagctttatagggaactggaccttaactcggtgctgctgaagcttggaatcaagccctccataaattactaccaggtcgccgactttaaggacgccctggctcgtgtgtacggagttatccccaagatccagtgcctccccccttcccaggatgaagaggtccagaccataggacaaatcgagctttgtcttacaaaacaggaccaacagctgcagaactgcactgagcctggagagcagccgtccccaaaacaggaagtgtggctggccaatggtgccgcagaatctaggggacttagagtgtgtgaagatggacccgtgttctatcctccaccgaagaagacaaagcattag

SEQ ID NO: 140425 - DNA, 765 bp, Artificial Sequence
  derived and/or modified sequence
atgcggcccgccgccctgcggggcgccctgctgggctgcctgtgcctggctctgttgtgtctcggaggcgccgataagcggcttcgtgataatcacgaatggaagaagctaattatggttcagcattggccggagaccgtgtgcgagaaaattcaaaacgattgtagagatccccctgactactggactatccacgggctttggcccgataaatccgaaggttgtaacaggtcatggccgtttaacctggaagaaataaaagacctgttaccagagatgagagcttattggccagacgttattcattcttttcccaaccgatcgcgcttctggaaacatgagtgggagaaacacggcacatgcgcggctcaggttgatgccctaaatagccagaaaaagtacttcggccgtagcctggagctgtatcgggagcttgacctaaactcagtgctcctcaagctgggtatcaaacccagcatcaattactatcaggtcgccgactttaaggatgccctagccagggtctacggcgtgatcccaaagatccagtgtctgccgccttcccaggatgaggaagttcagacgatcggacagattgaactgtgcctgacaaaacaagaccaacaactgcagaattgtacagagccgggcgaacagccatcccctaagcaagaggtgtggttggcaaacggggcagcagagtcccgggggctgagagtgtgcgaggacgggcccgttttctaccctcctcccaagaagacttag

SEQ ID NO: 140426 - DNA, 771 bp, Artificial Sequence
  derived and/or modified sequence
atgcggcccgccgccctgcggggcgccctgctgggctgcctgtgccttgctctgctttgtctgggtggggcagacaaaaggttgcgcgataaccacgaatggaaaaaactaataatggtacagcactggccagagactgtctgcgaaaagatccagaacgactgtcgtgatcctcctgattactggaccatccacggtctgtggcccgataagtctgagggctgtaaccgttcttggccctttaacctggaggagattaaggacctcttgccagaaatgagagcctattggccggatgttattcactcattccccaatagaagcagattttggaagcatgaatgggagaaacacggtacgtgcgcggctcaggtcgatgcattaaactcccaaaagaaatacttcggccgttcactcgagttgtaccgggagttagacttaaattctgtcctgctgaagctcggcattaaacccagcattaattactatcaggtggctgattttaaggacgcattagcacgggtctacggggtgatccctaagattcaatgcctaccgccctctcaggatgaagaagttcagaccatcggtcagatcgagctttgcttgaccaaacaagatcagcagcttcagaattgcacagagccgggcgaacaaccgagccccaagcaagaggtctggttggcaaatggagccgctgagtcccgcggattgagggtgtgcgaggacggccccgtgttttacccccccccaaagaaaacaaagcactag

SEQ ID NO: 140427 - DNA, 717 bp, Artificial Sequence
  derived and/or modified sequence
atgcgcccagccgcactcaggggcgcattgctcggctgtctgtgcctggcactgctgtgtttaggtggtgccgacaagagactccgcgataaccacgaatggaagaaactgattatggttcaacactggccagagaccgtctgcgaaaagattcagaacgattgtcgggacccccctgattattggaccattcatgggctatggcctgataaaagcgagggatgtaaccgcagctggccctttaatctggaagaaatcaagaagaattggatggaaataaccgactcatccttgcccagtccgtctatgggtccggcacctcccagatggatgcgttccacacccaggcgcagcacactggccgaagcctggaacagcactgggagctggacttccacaggtggatgtgccctgccacctgcagcattgcctagcggggacctgtgctgtagaccatccctaacagccggatccaggggggtgggcgtagatttgactgcgcttcagcaactgctgcatgtccattactcagctacggggattattccagaagaatgttcagagccaaccaaacccttccagatcattctgcatcacgaccacacagaatgggtgcagagtatcggtatgcccatttggacaatcagctctagtgagtctgcgatcggcaaaacacggacacaaccagcctgtgctgtgctgtcccatgattcctag

SEQ ID NO: 140428 - DNA, 624 bp, Artificial Sequence
  derived and/or modified sequence
atgagacccgcagcactaaggggagctctgctcggctgtttatgcctcgctctgctctgcctgggcggagctgataagcgcctaagagataatcacgagtggaagaaacttatcatggtgcaacattggcccgagacagtttgcgagaagatccagaatgattgtagagacccccctgattactggactatccacgggttgtggccagataaatccgaaggctgtaacagatcctggccatttaatctggaggagataaagaagaattggatggagataacagactcttccctgccaagcccgagcacagatctgctgccggaaatgcgggcttactggcccgacgtgattcattctttccccaaccgctctcgtttctgtggcacttgtgccgcacaggttgatgccctcaatagccagaaaaaatactttgggaggagtctggaactctaccgggaattggatttaaacaggtgggtccgcccttcacctggttgcacatctcagtgggggtccctgctgtccccaaagcccgactcttggatacagggatccggttgccgaccgcactgtccgcctgccgcatctgcgtgcgctctattcgggtactgggaccactcctag

SEQ ID NO: 140429 - DNA, 921 bp, Artificial Sequence
  derived and/or modified sequence
atgcggcctgccgcactgagaggcgcattgctgggatgcttgtgccttgcactgctatgcctggggggagccgacaaacgtctgagagataaccatgaatggaagaagctcattatggtgcagcactggcccgaaactgtctgcgagaaaatccagaatgactgcagggacccaccagattactggacaattcacggcctttggcaggtgtcgcacacttccaggaggggtctgctctttctcttcaagaacattttctcgctgtctagcagaaatttttccttttattcccttcaaacgagcatgaagaagccaccgcagccatccctgatttttctaatctttagcttcaaaccggacaagtccgagggctgtaatcggtcctggccattcaaccttgaagagatcaaagatctccttccagaaatgcgggcttactggccagacgtaatccactccttccctaacagaagccgcttctggaaacatgagtgggaaaagcatggtacgtgtgcggcacaggtcgacgccctgaactcacaaaagaaatattttggccgttcactggaactgtaccgcgaacttgacttgaactccgttctcctgaaacttggaataaagccttccattaactattatcaggtcgcagacttcaaagatgcgctggctagagtgtatggggtgattcctaaaatccaatgcctcccaccttctcaggatgaagaagtgcaaacaatcggccagatcgagctgtgtctgacgaagcaggatcagcaactgcagaattgtacagagccaggagagcagccctcacctaagcaggaagtgtggctcgccaatggcgctgctgagtctcgcggactccgtgtatgtgaagatggccctgtcttttaccctccaccaaaaaagacgaagcattag

SEQ ID NO: 140430 - DNA, 771 bp, Artificial Sequence
  derived and/or modified sequence
atgaggcctgccgctctaagaggcgctttgttaggctgtctctgcctagcactgttatgtctaggcggtgcagacaagagattgagagataatcacgagtggaaaaaacttataatggtgcagcactggccagagacagtgtgcgagaaaatacagaacgactgtcgggatccccctgattattggaccattcatggcttatggccggacaagagcgaaggttgcaacaggagttggccattcaaccttgaggagatcaaagacctactgccagaaatgcgggcttattggcccgatgtgatccatagctttcctaatcgctctaggttctggaaacacgagtgggaaaagcatggaacatgcgccgctcaggttgatgcgcttaactcacagaaaaaatattttggcagatccctcgaactgtaccgcgagctggatctcaactcggtgttgctgaaactggggatcaaaccgagcattaattattatcaggtggccgactttaaagacgcactcgcccgagtttacggagttattcccaagatacaatgcctgcctccttcacaggacgaggaagtgcagaccatcggacaaatcgaactctgccttaccaaacaggatcaacagctgcaaaactgcacagaacctggcgaacagccttcccccaaacaggaagtctggttggcaaatggggctgccgagagtcgtggactgcgcgtgtgtgaagatggacccgtgttttacccccctcccaaaaaaactaaacactag

SEQ ID NO: 140431 - DNA, 765 bp, Artificial Sequence
  derived and/or modified sequence
atgcgccctgccgcactgcgcggagccctcctggggtgcctgtgcctggctttattgtgtctgggaggcgcagacaaacggttacgcgacaatcacgagtggaagaagctgatcatggtgcagcactggccagaaactgtgtgcgaaaagattcagaatgactgcagagaccccccagattactggacaatccacggcctttggccagacaagtctgaggggtgtaatcgtagctggcctttcaacctggaggaaataaaagacctcctgcctgagatgagagcgtactggcccgacgtaatccattcgttcccgaaccggagccgattctggaagcacgaatgggaaaagcatggcacgtgcgcagcccaggtggatgcgttaaatagtcagaagaagtacttcggtcggtccctcgagttatatagggagctggacctcaacagcgtgctgctaaagctcggcattaagcccagtatcaactattatcaggtggcagattttaaggacgcacttgccagggtttatggcgtaattccaaaaattcagtgtctgcccccatcacaagatgaggaggtccagaccattggtcagattgaactctgcctaacgaaacaagatcagcagttacagaactgtacagagcccggagagcaaccctcacccaagcaggaggtctggttggccaacggagctgccgagtcacggggtcttagggtgtgcgaggacggacccgtattttatccgcctcctaaaaagacatag

SEQ ID NO: 140432 - DNA, 771 bp, Artificial Sequence
  derived and/or modified sequence
atgagaccagccgctctacgaggggctctcttaggctgtctttgcctggcgttactgtgtctagggggagccgacaaacgtcttcgagacaatcatgaatggaaaaaactcataatggttcagcattggccagagacagtttgtgagaagattcaaaatgattgtcgagatcccccagattactggacaattcacggcctttggcctgacaagtccgaaggctgtaaccggtcatggccattcaatctcgaggagattaaagaccttctgcccgagatgcgggcatattggccagacgtgattcattctttccctaatcggtcaagattctggaagcacgagtgggagaagcacggcacgtgcgccgcacaggtcgatgctctgaactcccagaagaagtatttcggcaggtctcttgagctctacagggagctagacttgaactcagtgttgttgaagctgggcatcaagccctccatcaattactaccaggttgctgatttcaaagatgctctggcccgagtgtacggggtaattcccaaaatccagtgcctgccaccatcacaggatgaagaggtccagacaatcggccagattgaactgtgcctgactaagcaagaccagcagctccagaattgtactgaacctggagagcagcctagccctaaacaagaggtatggttggccaacggggcagctgagtcccgtggtcttcgcgtgtgcgaagacgggcctgtattttatccacctcctaaaaagactaagcattag

SEQ ID NO: 140433 - DNA, 1124 bp, Artificial Sequence
  derived and/or modified sequence
ctctgctccggtgcaggcccgcagggcgccctgggctgggagcaacgcgactgaccgtggtcgtgggcggacggcggctgcagcgtggaggagctggggtcgctgtgggtcgcgaagcagagcccgggacgtgcgcgcttggtgcacgatcctgaaggggagctccgaggggcccgggtcgccagggctgctgcggccattcccggagcccggcgcggggcccgcgagatactggtttaggccgtcccagggctccgggcgcacccggtggccgctgctgcagcggagggagcgcggcggcgcgggggctcggagacagcgtttctcccggaagtcttcctcgggcagcaggtgggaagtgggagccggagcggcagctggcagcgttctctccgcaggtcggcaccatgcgccctgcagccctgcgcggggccctgctgggctgcctctgcctggcgttgctttgcctgggcggtgcggacaagcgcctgcgtgacaaccatgagtggaaaaaactaattatggttcagcactggcctgagacagtatgcgagaaaattcaaaacgactgtagagaccctccggattactggacaatacatggactatggcccgataaaagtgaaggatgtaatagatcgtggcccttcaatttagaagagattaagaaaaattggatggagattacagacagttcactcccttcccccagcatgggacctgcgccgcccaggtggatgcgctcaactcccagaagaagtactttggcagaagcctggaactctacagggagctggacctcaacaggtgggtgcgcccttcccccggctgcacttcccagtggggatctctgctgtcgcccaagcctgacagctggatccaggggagtgggtgtagacctcactgccctccagcagcttctgcatgtgcactattcggctactgggatcattcctgaggaatgttctgagcctaccaagcctttccagatcattctacatcacgatcacacagagtgggtgcagagtattgggatgcccatctggaccatctcatcatcagagtcggccatagggaaaacgaggactcaaccagcatgtgccgttctcagccatgattcctga

SEQ ID NO: 140434 - DNA, 1031 bp, Artificial Sequence
  derived and/or modified sequence
ctctgctccggtgcaggcccgcagggcgccctgggctgggagcaacgcgactgaccgtggtcgtgggcggacggcggctgcagcgtggaggagctggggtcgctgtgggtcgcgaagcagagcccgggacgtgcgcgcttggtgcacgatcctgaaggggagctccgaggggcccgggtcgccagggctgctgcggccattcccggagcccggcgcggggcccgcgagatactggtttaggccgtcccagggctccgggcgcacccggtggccgctgctgcagcggagggagcgcggcggcgcgggggctcggagacagcgtttctcccggaagtcttcctcgggcagcaggtgggaagtgggagccggagcggcagctggcagcgttctctccgcaggtcggcaccatgcgccctgcagccctgcgcggggccctgctgggctgcctctgcctggcgttgctttgcctgggcggtgcggacaagcgcctgcgtgacaaccatgagtggaaaaaactaattatggttcagcactggcctgagacagtatgcgagaaaattcaaaacgactgtagagaccctccggattactggacaatacatggactatggcccgataaaagtgaaggatgtaatagatcgtggcccttcaatttagaagagattaagaaaaattggatggagattacagacagttcactcccttccccctcaactgatcttttgccagaaatgagggcatactggcctgacgtaattcactcgtttcccaatcgcagccgcttctgtgggacctgcgccgcccaggtggatgcgctcaactcccagaagaagtactttggcagaagcctggaactctacagggagctggacctcaacaggtgggtgcgcccttcccccggctgcacttcccagtggggatctctgctgtcgcccaagcctgacagctggatccaggggagtgggtgtagacctcactgccctccagcagcttctgcatgtgcactattcggctactgggatcattcctga

SEQ ID NO: 140435 - DNA, 1391 bp, Artificial Sequence
  derived and/or modified sequence
ctctgctccggtgcaggcccgcagggcgccctgggctgggagcaacgcgactgaccgtggtcgtgggcggacggcggctgcagcgtggaggagctggggtcgctgtgggtcgcgaagcagagcccgggacgtgcgcgcttggtgcacgatcctgaaggggagctccgaggggcccgggtcgccagggctgctgcggccattcccggagcccggcgcggggcccgcgagatactggtttaggccgtcccagggctccgggcgcacccggtggccgctgctgcagcggagggagcgcggcggcgcgggggctcggagacagcgtttctcccggaagtcttcctcgggcagcaggtgggaagtgggagccggagcggcagctggcagcgttctctccgcaggtcggcaccatgcgccctgcagccctgcgcggggccctgctgggctgcctctgcctggcgttgctttgcctgggcggtgcggacaagcgcctgcgtgacaaccatgagtggaaaaaactaattatggttcagcactggcctgagacagtatgcgagaaaattcaaaacgactgtagagaccctccggattactggacaatacatggactatggcaagtgtctcacacaagcagaagaggcttgctattcttatttaaaaatatctttagtctttctagcagaaatttctctttttattctttgcagacttcaatgaaaaagccaccccaaccaagcctaatatttcttattttctcttttaagcccgataaaagtgaaggatgtaatagatcgtggcccttcaatttagaagagattaaggatcttttgccagaaatgagggcatactggcctgacgtaattcactcgtttcccaatcgcagccgcttctggaagcatgagtgggaaaagcatgggacctgcgccgcccaggtggatgcgctcaactcccagaagaagtactttggcagaagcctggaactctacagggagctggacctcaacagtgtgcttctaaaattggggataaaaccatccatcaattactaccaagttgcagattttaaagatgcccttgccagagtatatggagtgatacccaaaatccagtgccttccaccaagccaggatgaggaagtacagacaattggtcagatagaactgtgcctcactaagcaagaccagcagctgcaaaactgcaccgagccgggggagcagccgtcccccaagcaggaagtctggctggcaaatggggccgccgagagccggggtctgagagtctgtgaagatggcccagtcttctatcccccacctaaaaagaccaagcattgatgcccaagttttggaaatattctgttttaaaaagcaagagaaattcacaaactgcagctttct

SEQ ID NO: 140436 - DNA, 887 bp, Artificial Sequence
  derived and/or modified sequence
ttggtgctcccagcacctagcaccgggagactggagaggtttccaggagagtgacccgagtcggcaccatgcgccctgcagccctgcgcggggccctgctgggctgcctctgcctggcgttgctttgcctgggcggtgcggacaagcgcctgcgtgacaaccatgagtggaaaaaactaattatggttcagcactggcctgagacagtatgcgagaaaattcaaaacgactgtagagaccctccggattactggacaatacatggactatggcccgataaaagtgaaggatgtaatagatcgtggcccttcaatttagaagagattaaggatcttttgccagaaatgagggcatactggcctgacgtaattcactcgtttcccaatcgcagccgcttctggaagcatgagtgggaaaagcatgggacctgcgccgcccaggtggatgcgctcaactcccagaagaagtactttggcagaagcctggaactctacagggagctggacctcaacagtgtgcttctaaaattggggataaaaccatccatcaattactaccaagttgcagattttaaagatgcccttgccagagtatatggagtgatacccaaaatccagtgccttccaccaagccaggatgaggaagtacagacaattggtcagatagaactgtgcctcactaagcaagaccagcagctgcaaaactgcaccgagccgggggagcagccgtcccccaagcaggaagtctggctggcaaatggggccgccgagagccggggtctgagagtctgtgaagatggcccagtcttctatcccccacctaaaaagaccaagcattgatgcccaagttttggaaatattctgttttaaaaagcaagagaaattcac

SEQ ID NO: 140437 - DNA, 963 bp, Artificial Sequence
  derived and/or modified sequence
caggagagtgacccgagtaggtcccctcctaattctggagccgtccctcgggctgcgcagtggagcgccgaggtggcgggaggctgcggggagcctgggcggccaagcaccatctgcagtcaggagctcccgggcagcttgcagggcgcagtttttgaaagcgggtgctgcgtgcggaccgcgggcctgcagggtcggcaccatgcgccctgcagccctgcgcggggccctgctgggctgcctctgcctggcgttgctttgcctgggcggtgcggacaagcgcctgcgtgacaaccatgagtggaaaaaactaattatggttcagcactggcctgagacagtatgcgagaaaattcaaaacgactgtagagaccctccggattactggacaatacatggactatggcccgataaaagtgaaggatgtaatagatcgtggcccttcaatttagaagagattaaggatcttttgccagaaatgagggcatactggcctgacgtaattcactcgtttcccaatcgcagccgcttctggaagcatgagtgggaaaagcatgggacctgcgccgcccaggtggatgcgctcaactcccagaagaagtactttggcagaagcctggaactctacagggagctggacctcaacagtgtgcttctaaaattggggataaaaccatccatcaattactaccaagttgcagattttaaagatgcccttgccagagtatatggagtgatacccaaaatccagtgccttccaccaagccaggatgaggaagtacagacaattggtcagatagaactgtgcctcactaagcaagaccagcagctgcaaaactgcaccgagccgggggagcagccgtcccccaagcaggaagtctggctggcaaatggggccgccgagagccggggtctgagagtctgtgaagatggcccagtcttctatcccccacctaaaaagac

SEQ ID NO: 140438 - DNA, 1375 bp, Artificial Sequence
  derived and/or modified sequence
ctgcctcggcctctctgagccaaccacggggcggggcgtgaacgccgggcggggacgtgccgttctggggggcgtgtccaccggcgggggcgtgccgtcctgggggcgtggctctctgctccggtgcaggcccgcagggcgccctgggctgggagcaacgcgactgaccgtggtcgtgggcggacggcggctgcagcgtggaggagctggggtcgctgtgggtcgcgaagcagagcccgggacgtgcgcgcttggtgcacgatcctgaaggggagctccgaggggcccgggtcgccagggctgctgcggccattcccggagcccggcgcggggcccgcgagatactggtttaggccgtcccagggctccgggcgcacccggtggccgctgctgcagcggagggagcgcggcggcgcgggggctcggagacagcgtttctcccggaagtcttcctcgggcagcaggtgggaagtgggagccggagcggcagctggcagcgttctctccgcaggtcggcaccatgcgccctgcagccctgcgcggggccctgctgggctgcctctgcctggcgttgctttgcctgggcggtgcggacaagcgcctgcgtgacaaccatgagtggaaaaaactaattatggttcagcactggcctgagacagtatgcgagaaaattcaaaacgactgtagagaccctccggattactggacaatacatggactatggcccgataaaagtgaaggatgtaatagatcgtggcccttcaatttagaagagattaaggatcttttgccagaaatgagggcatactggcctgacgtaattcactcgtttcccaatcgcagccgcttctggaagcatgagtgggaaaagcatgggacctgcgccgcccaggtggatgcgctcaactcccagaagaagtactttggcagaagcctggaactctacagggagctggacctcaacagtgtgcttctaaaattggggataaaaccatccatcaattactaccaagttgcagattttaaagatgcccttgccagagtatatggagtgatacccaaaatccagtgccttccaccaagccaggatgaggaagtacagacaattggtcagatagaactgtgcctcactaagcaagaccagcagctgcaaaactgcaccgagccgggggagcagccgtcccccaagcaggaagtctggctggcaaatggggccgccgagagccggggtctgagagtctgtgaagatggcccagtcttctatcccccacctaaaaagaccaagcattgatgcccaagttttggaaatattctgttttaaaaagcaagagaaattcacaaactgcagctttctaaaaaacaactccaaagtgaa

SEQ ID NO: 140439 - DNA, 717 bp, Artificial Sequence
  derived and/or modified sequence
atgagacccgccgccctgagaggcgccctgctgggctgcctgtgcctggccctgctgtgcctgggcggcgccgacaagagactgagagacaaccacgagtggaagaagctgatcatggtgcagcactggcccgagaccgtgtgcgagaagatccagaacgactgcagagacccccccgactactggaccatccacggcctgtggcccgacaagagcgagggctgcaacagaagctggcccttcaacctggaggagatcaagaagaactggatggagatcaccgacagcagcctgcccagccccagcatgggccccgccccccccagatggatgagaagcacccccagaagaagcaccctggccgaggcctggaacagcaccggcagctggaccagcaccggcggctgcgccctgccccccgccgccctgcccagcggcgacctgtgctgcagacccagcctgaccgccggcagcagaggcgtgggcgtggacctgaccgccctgcagcagctgctgcacgtgcactacagcgccaccggcatcatccccgaggagtgcagcgagcccaccaagcccttccagatcatcctgcaccacgaccacaccgagtgggtgcagagcatcggcatgcccatctggaccatcagcagcagcgagagcgccatcggcaagaccagaacccagcccgcctgcgccgtgctgagccacgacagctag

SEQ ID NO: 140440 - DNA, 624 bp, Artificial Sequence
  derived and/or modified sequence
atgagacccgccgccctgagaggcgccctgctgggctgcctgtgcctggccctgctgtgcctgggcggcgccgacaagagactgagagacaaccacgagtggaagaagctgatcatggtgcagcactggcccgagaccgtgtgcgagaagatccagaacgactgcagagacccccccgactactggaccatccacggcctgtggcccgacaagagcgagggctgcaacagaagctggcccttcaacctggaggagatcaagaagaactggatggagatcaccgacagcagcctgcccagccccagcaccgacctgctgcccgagatgagagcctactggcccgacgtgatccacagcttccccaacagaagcagattctgcggcacctgcgccgcccaggtggacgccctgaacagccagaagaagtacttcggcagaagcctggagctgtacagagagctggacctgaacagatgggtgagacccagccccggctgcaccagccagtggggcagcctgctgagccccaagcccgacagctggatccagggcagcggctgcagaccccactgcccccccgccgccagcgcctgcgccctgttcggctactgggaccacagctag

SEQ ID NO: 140441 - DNA, 921 bp, Artificial Sequence
  derived and/or modified sequence
atgagacccgccgccctgagaggcgccctgctgggctgcctgtgcctggccctgctgtgcctgggcggcgccgacaagagactgagagacaaccacgagtggaagaagctgatcatggtgcagcactggcccgagaccgtgtgcgagaagatccagaacgactgcagagacccccccgactactggaccatccacggcctgtggcaggtgagccacaccagcagaagaggcctgctgttcctgttcaagaacatcttcagcctgagcagcagaaacttcagcttctacagcctgcagaccagcatgaagaagcccccccagcccagcctgatcttcctgatcttcagcttcaagcccgacaagagcgagggctgcaacagaagctggcccttcaacctggaggagatcaaggacctgctgcccgagatgagagcctactggcccgacgtgatccacagcttccccaacagaagcagattctggaagcacgagtgggagaagcacggcacctgcgccgcccaggtggacgccctgaacagccagaagaagtacttcggcagaagcctggagctgtacagagagctggacctgaacagcgtgctgctgaagctgggcatcaagcccagcatcaactactaccaggtggccgacttcaaggacgccctggccagagtgtacggcgtgatccccaagatccagtgcctgccccccagccaggacgaggaggtgcagaccatcggccagatcgagctgtgcctgaccaagcaggaccagcagctgcagaactgcaccgagcccggcgagcagcccagccccaagcaggaggtgtggctggccaacggcgccgccgagagcagaggcctgagagtgtgcgaggacggccccgtgttctaccccccccccaagaagaccaagcactag

SEQ ID NO: 140442 - DNA, 771 bp, Artificial Sequence
  derived and/or modified sequence
atgagacccgccgccctgagaggcgccctgctgggctgcctgtgcctggccctgctgtgcctgggcggcgccgacaagagactgagagacaaccacgagtggaagaagctgatcatggtgcagcactggcccgagaccgtgtgcgagaagatccagaacgactgcagagacccccccgactactggaccatccacggcctgtggcccgacaagagcgagggctgcaacagaagctggcccttcaacctggaggagatcaaggacctgctgcccgagatgagagcctactggcccgacgtgatccacagcttccccaacagaagcagattctggaagcacgagtgggagaagcacggcacctgcgccgcccaggtggacgccctgaacagccagaagaagtacttcggcagaagcctggagctgtacagagagctggacctgaacagcgtgctgctgaagctgggcatcaagcccagcatcaactactaccaggtggccgacttcaaggacgccctggccagagtgtacggcgtgatccccaagatccagtgcctgccccccagccaggacgaggaggtgcagaccatcggccagatcgagctgtgcctgaccaagcaggaccagcagctgcagaactgcaccgagcccggcgagcagcccagccccaagcaggaggtgtggctggccaacggcgccgccgagagcagaggcctgagagtgtgcgaggacggccccgtgttctaccccccccccaagaagaccaagcactag

SEQ ID NO: 140443 - DNA, 765 bp, Artificial Sequence
  derived and/or modified sequence
atgagacccgccgccctgagaggcgccctgctgggctgcctgtgcctggccctgctgtgcctgggcggcgccgacaagagactgagagacaaccacgagtggaagaagctgatcatggtgcagcactggcccgagaccgtgtgcgagaagatccagaacgactgcagagacccccccgactactggaccatccacggcctgtggcccgacaagagcgagggctgcaacagaagctggcccttcaacctggaggagatcaaggacctgctgcccgagatgagagcctactggcccgacgtgatccacagcttccccaacagaagcagattctggaagcacgagtgggagaagcacggcacctgcgccgcccaggtggacgccctgaacagccagaagaagtacttcggcagaagcctggagctgtacagagagctggacctgaacagcgtgctgctgaagctgggcatcaagcccagcatcaactactaccaggtggccgacttcaaggacgccctggccagagtgtacggcgtgatccccaagatccagtgcctgccccccagccaggacgaggaggtgcagaccatcggccagatcgagctgtgcctgaccaagcaggaccagcagctgcagaactgcaccgagcccggcgagcagcccagccccaagcaggaggtgtggctggccaacggcgccgccgagagcagaggcctgagagtgtgcgaggacggccccgtgttctaccccccccccaagaagacctag

SEQ ID NO: 140444 - protein, 119 aa, Artificial Sequence
  derived and/or modified sequence
MTQQGAALQNYNNELVKCIEELCQKREELCRQIQEEEDEKQRLQNEVRQLTEKLARVNENLARKIASRNEFDRTIAETEAAYLKILESSQTLLSVLKREAGNLTKATAPDQKSSGGRDS

SEQ ID NO: 140445 - DNA, 360 bp, Artificial Sequence
  derived and/or modified sequence
atgacccaacagggagccgctctgcagaattacaacaacgaactggtcaagtgtatcgaggagctgtgtcagaaaagagaggagctttgtcggcagatacaggaggaggaggatgagaagcaaaggcttcaaaatgaggtgcggcaactgactgaaaaactggcccgagtgaacgagaatctcgcccgcaagatcgcgtctcggaatgagttcgatcggaccatcgccgagactgaggccgcctatttgaagatcttggaatcgtctcagacactcctcagcgttctcaagcgggaagctgggaatctgacaaaagcgaccgctccagatcagaagagctcaggtggccgtgatagttag

SEQ ID NO: 140446 - DNA, 360 bp, Artificial Sequence
  derived and/or modified sequence
atgacccagcagggcgccgccctgcagaactacaacaatgagctggtgaagtgcatcgaggagctgtgccagaagcgggaggagctgtgccggcagatccaggaggaggaggatgagaagcagaggctgcagaatgaggtgcggcagctgacagagaagctggcccgggtgaatgaaaacctggccaggaagatcgccagcagaaatgaatttgacaggaccatcgccgagacagaggccgcctacctgaagatcctggagagcagccagaccctgctgtctgtgctgaagcgggaggccggcaacctgaccaaggccacagccccagaccagaagagcagcggcggccgggacagctag

SEQ ID NO: 140447 - DNA, 360 bp, Artificial Sequence
  derived and/or modified sequence
atgacccagcagggcgccgccctgcagaactacaacaacgagctggtcaaatgcatcgaggaactttgccagaaaagggaagagctgtgccgacaaatccaggaggaggaagatgaaaagcaaagactgcagaacgaggtgcggcagttgaccgagaaactcgcaagagtcaacgaaaatctggcacgcaagatcgcctcaaggaatgagttcgaccggaccattgcagaaacagaagctgcgtacctgaagatcctggagtcttcccaaaccctgctgtcagttctgaagcgggaggcaggcaacttgactaaagctaccgctccggaccagaagagctccggaggcagagacagttag

SEQ ID NO: 140448 - DNA, 360 bp, Artificial Sequence
  derived and/or modified sequence
atgacacagcagggggctgctcttcagaactacaacaacgagctcgttaaatgtatagaagagctgtgtcagaaaagagaggaactgtgcaggcagatacaggaagaggaggacgagaaacaacgtctgcagaacgaagtgaggcagctcactgagaagctggccagggttaatgagaacttggcgagaaaaattgcatcacgtaacgaattcgataggactatagccgagactgaggccgcttatcttaagatcttggagagtagtcagactcttttaagcgtgctgaagagagaggccggtaatctgaccaaagcaaccgcacctgatcagaaaagctccggtgggagagattcatag

SEQ ID NO: 140449 - DNA, 896 bp, Artificial Sequence
  derived and/or modified sequence
ccgtgggggagtcgtgcgcaggcgcggacagcgctgcttccgcggcggttggggtggtggggccccgggcggcgttgaccatgacccagcagggcgcggcgctgcagaactacaacaacgagctggtcaagtgcatagaggagctgtgccagaagcgggaggagctgtgccggcagatccaggaggaggaggacgagaagcagcggctgcagaatgaggtgaggcagctgacagagaagctggcccgcgtcaacgagaacctggcacgcaagattgcctctcgcaacgagttcgaccggaccatcgcggagacggaggccgcctacctcaagatcctggagagctcccagactttgctcagcgttctcaagagggaagctgggaacctgaccaaggctacagccccagaccagaaaagtagcggcggcagggacagctgaccagaccacgggcagggcctgcctccgtgtgcccctcagctcagccccagcaagtgtgtgctcagagcatctttgttcttcacggcagcagctaccttccctcactgtctcaggtgccgagaggggcaggtgccagcctccactggcatcagtgacaagcccagggcacagcccacccgggggtcctcgcttcatgctcacacaggctatggggatggtgggctccaggtcagctctgcaaggggcttgtctctgtggcacccacactcctgccctgccagggaggctctggttgtctgagcaccatgggggccccctcaccttgtccctcctcagccagcagaggcccagggcaagggacaggaggacaggggttctccttcaccacagaacccaaacctcaggtctcacccctgtggcctgtgattatgaataaagattatctttgtaaagatc

SEQ ID NO: 140450 - DNA, 360 bp, Artificial Sequence
  derived and/or modified sequence
atgacccagcagggcgccgccctgcagaactacaacaacgagctggtgaagtgcatcgaggagctgtgccagaagagagaggagctgtgcagacagatccaggaggaggaggacgagaagcagagactgcagaacgaggtgagacagctgaccgagaagctggccagagtgaacgagaacctggccagaaagatcgccagcagaaacgagttcgacagaaccatcgccgagaccgaggccgcctacctgaagatcctggagagcagccagaccctgctgagcgtgctgaagagagaggccggcaacctgaccaaggccaccgcccccgaccagaagagcagcggcggcagagacagctag

SEQ ID NO: 140451 - protein, 100 aa, Artificial Sequence
  derived and/or modified sequence
MSTSTSCPIPGGRDQLPDCYSTTPGGTLYATTPGGTRIIYDRKFLLECKNSPIARTPPCCLPQIPGVTTPPTAPLSKLEELKEQETEEEIPDDAQFEMDI

SEQ ID NO: 140452 - DNA, 303 bp, Artificial Sequence
  derived and/or modified sequence
atgtccacatcgaccagctgtccaatcccaggagggagggaccagttgcctgattgctacagtacaaccccaggcggaacgctgtatgccacgaccccaggtggcactcggattatttatgacagaaagtttctcctggaatgcaagaatagtccgattgcaagaacccccccctgctgcctgcctcagattcccggcgtgacgactccccccactgctcccctgtcaaagctcgaggaactgaaagagcaagaaacagaggaggaaatccccgatgacgctcagtttgaaatggacatttag

SEQ ID NO: 140453 - DNA, 303 bp, Artificial Sequence
  derived and/or modified sequence
atgagcaccagcaccagctgccccatccctgggggccgggaccagctgcctgactgctacagcaccacccctgggggcaccctgtatgccaccaccccaggcggcacccgcatcatctatgacaggaagttcctgctggagtgcaagaacagccccatcgcccggaccccaccctgctgcctgccccagatccctggggtgaccaccccacccacagcccccctgagcaagctggaggagctgaaggagcaggagacagaggaggagatcccagatgatgcccagtttgagatggacatctag

SEQ ID NO: 140454 - DNA, 303 bp, Artificial Sequence
  derived and/or modified sequence
atgagcaccagcaccagctgccccatccccggcggccgggaccagctgccagactgttactccacaacacccgggggcaccctctatgcgaccacaccgggaggcacgcgcatcatttacgaccggaagtttcttctggagtgcaagaatagcccaattgcccggactcctccttgttgcttgccgcagatcccaggagtaaccaccccacctaccgcaccactaagcaagttggaggagcttaaggagcaggagacagaggaggagattcctgacgatgcccaattcgagatggatatctag

SEQ ID NO: 140455 - DNA, 303 bp, Artificial Sequence
  derived and/or modified sequence
atgtctacctccacttcctgtcccattcctggcggtcgcgaccaacttcctgactgttattcaactaccccagggggtacactctatgctactacacccggaggcacacggataatttacgatcgaaaattcctgctggaatgcaaaaactcccctatcgcgaggaccccaccttgctgtctcccacagataccaggggtaacaactcccccaaccgctccactgagtaaactggaggaactcaaggaacaggagaccgaagaggagattccagatgatgcgcaatttgagatggacatttag

SEQ ID NO: 140456 - DNA, 691 bp, Artificial Sequence
  derived and/or modified sequence
ccgcctcagactcagagctgcgctcctcgacctcaacgccaggcggttactttgctgctcctcccgctcgctatgtcaacgtccactagctgcccgattcccgggggccgggaccagctgcccgactgctacagcaccacgccggggggcacgctatacgccactacccccggaggcaccaggatcatctacgaccgaaagttcctgctggagtgcaagaactcacccattgcccggacacccccctgctgcctccctcagattcccggggtcacaactcctccaacagcccctctctccaagctggaggagctgaaggagcaggagacagaggaagagatacccgatgacgcacaatttgaaatggacatctaatccagtgcagatgacctggcatgtggagttacagagggatccctcatgccactgctgccaccacctcttcctggggcatccaaaggccagctggcctcatctaatctggaagggagtgacttgttagttccaggcctcctttagttctgaggcagctagaccagggataggagtgggcaacttgccaagcccttaactctacttcctcttcagtctgtggtactcctcctaaccctaaaccctctatgctcaggggctggaactggggaatggagtaagtcaccttctgactgcttagtaaacattcaaagaaatg

SEQ ID NO: 140457 - DNA, 303 bp, Artificial Sequence
  derived and/or modified sequence
atgagcaccagcaccagctgccccatccccggcggcagagaccagctgcccgactgctacagcaccacccccggcggcaccctgtacgccaccacccccggcggcaccagaatcatctacgacagaaagttcctgctggagtgcaagaacagccccatcgccagaacccccccctgctgcctgccccagatccccggcgtgaccaccccccccaccgcccccctgagcaagctggaggagctgaaggagcaggagaccgaggaggagatccccgacgacgcccagttcgagatggacatctag

SEQ ID NO: 140458 - protein, 514 aa, Artificial Sequence
  derived and/or modified sequence
MALMQELYSTPASRLDSFVAQWLQPHREWKEEVLDAVRTVEEFLRQEHFQGKRGLDQDVRVLKVVKVGSFGNGTVLRSTREVELVAFLSCFHSFQEAAKHHKDVLRLIWKTMWQSQDLLDLGLEDLRMEQRVPDALVFTIQTRGTAEPITVTIVPAYRALGPSLPNSQPPPEVYVSLIKACGGPGNFCPSFSELQRNFVKHRPTKLKSLLRLVKHWYQQYVKARSPRANLPPLYALELLTIYAWEMGTEEDENFMLDEGFTTVMDLLLEYEVICIYWTKYYTLHNAIIEDCVRKQLKKERPIILDPADPTLNVAEGYRWDIVAQRASQCLKQDCCYDNRENPISSWNVKRARDIHLTVEQRGYPDFNLIVNPYEPIRKVKEKIRRTRGYSGLQRLSFQVPGSERQLLSSRCSLAKYGIFSHTHIYLLETIPSEIQVFVKNPDGGSYAYAINPNSFILGLKQQIEDQQGLPKKQQQLEFQGQVLQDWLGLGIYGIQDSDTLILSKKKGEALFPAS

SEQ ID NO: 140459 - DNA, 1545 bp, Artificial Sequence
  derived and/or modified sequence
atggctctcatgcaggagctgtactccactcccgcctccagacttgatagcttcgtcgctcaatggctccagccacacagggaatggaaagaggaagtgctcgatgccgtgcggacagttgaggaattccttaggcaggagcacttccagggaaagagaggcctcgatcaagacgtgagagtcctaaaagttgtcaaagttggatccttcggtaatggaacggtgctgcgcagtaccagggaggtggagctagtggccttcctctcatgctttcactccttccaagaggcagccaaacaccataaggacgtgctccggctgatttggaagacgatgtggcaaagccaggacctcctggacctgggcctcgaagacctcaggatggaacaacgagtgcctgatgccctcgtctttaccattcagactcgcggaacagccgagccaattactgtgacgatcgtacctgcctacagggctctggggcctagtctgccaaactcccaacccccccctgaggtttacgtgtctctcatcaaggcttgcggtggacccggaaacttttgcccatctttctctgagctgcaaaggaactttgtgaagcacaggcctacaaagctcaagtctttgctgcggctagtcaaacattggtaccagcagtacgtgaaggcgaggagtccacgcgctaacctgccaccactgtatgctcttgagctcctcaccatctacgcttgggagatggggaccgaggaagatgagaattttatgctggacgagggattcacaaccgtaatggatctcttgcttgaatatgaggtgatttgcatatactggaccaagtactacactctgcacaacgcaatcattgaggactgcgtccgaaaacaattgaagaaggaacgccccatcatcctggaccctgccgacccgacactaaacgttgccgaggggtatcgttgggatatcgttgcccagcgcgcaagtcagtgcctgaaacaagattgttgttatgataatcgagagaaccccatttccagttggaatgtcaaacgagcccgcgatatccatctgaccgtcgagcagcgtggctatcccgacttcaacctcattgtgaatccttacgaacctatccgcaaggtgaaagagaaaattcgtcgtacaaggggctattccggactgcagaggctgtctttccaagtgccagggtccgagcgtcagttgctctccagtcggtgcagcttggccaagtacggaatcttttcccacacgcatatctatctgttggagacaattccctctgaaatccaggtgtttgttaagaatcctgatggaggcagctacgcctatgctattaatccaaatagcttcatactgggcctgaagcagcagatcgaggaccagcagggcctccctaagaaacaacaacagcttgagtttcaaggacaggtcctccaagattggctgggcctcggcatctacggcatacaggatagtgacaccctaatcctgagtaagaagaagggtgaggctctgtttcctgcaagctag

SEQ ID NO: 140460 - DNA, 1545 bp, Artificial Sequence
  derived and/or modified sequence
atggccctgatgcaggagctgtacagcaccccagccagccggctggacagctttgtggcccagtggctgcagccccaccgggagtggaaggaggaggtgctggatgctgtgaggacagtggaggagttcctgcggcaggagcacttccagggcaagaggggcctggaccaggatgtgcgggtgctgaaggtggtgaaggtgggcagctttggaaatggcaccgtgctgcggagcacccgggaggtggagctggtggccttcctgagctgcttccacagcttccaggaggccgccaagcaccacaaggatgtgctgcggctcatctggaagaccatgtggcagagccaggacctgctggacctgggcctggaggacctgaggatggagcagagggtgcctgatgccctggtgttcaccatccagacccggggcacagctgagcccatcaccgtgaccatcgtgcctgcctaccgggccctgggccccagcctgcccaacagccagcccccacctgaggtgtatgtgtccctcatcaaggcctgtggcggccctggcaacttctgccccagcttcagcgagctgcagaggaactttgtgaagcaccggcccaccaagctgaagagcctgctgcggctggtgaagcactggtaccagcagtatgtgaaggcccggagcccccgggccaacctgccccccctgtatgccctggagctgctgaccatctatgcctgggagatgggcacagaggaggatgagaacttcatgctggatgagggcttcaccaccgtgatggacctgctgctggagtatgaggtgatctgcatctactggaccaagtactacaccctgcacaatgccatcatcgaggactgtgtgaggaagcagctgaagaaggagcggcccatcatcctggaccctgctgaccccaccctgaatgtggccgagggctaccgctgggacatcgtggcccagagggccagccagtgcctgaagcaggactgctgctatgacaaccgggagaaccccatcagctcctggaatgtgaagagggcccgggacatccacctgactgtggagcagaggggctacccagacttcaacctgattgtgaacccctatgagcccatcaggaaggtgaaggagaagatccggaggacccggggctacagcggcctgcagaggctgtccttccaggtgcccggcagcgagcggcagctgctgagcagccgctgcagcctggccaagtatggcatcttcagccacacccacatctacctgctggagaccatccccagcgagatccaggtgtttgtgaagaacccagatggcggcagctatgcctatgccatcaaccccaacagcttcatcctgggcctgaagcagcagatcgaggaccagcagggcctgcccaagaagcagcagcagctggagttccagggccaggtgctgcaggactggctgggcctgggcatctacggcatccaggacagcgacaccctcatcctgagcaagaagaagggggaggccctcttccctgccagctag

SEQ ID NO: 140461 - DNA, 1545 bp, Artificial Sequence
  derived and/or modified sequence
atggccctgatgcaggagctgtacagcacccccgccagccggctggactccttcgttgcgcagtggttgcagcctcacagggagtggaaagaggaagtgctggatgcagtacggacggtcgaagaattccttaggcaggaacattttcagggaaagcgcgggctagatcaggacgtgcgggtgctgaaggtggtgaaagttggaagctttggaaatggaacagttctgagatctaccagagaggtcgagttagtagccttcctttcttgcttccactcttttcaggaagccgccaagcaccacaaagacgttctcaggctgatctggaagacgatgtggcagagccaagacctcctggatctaggtctggaggacctgcggatggagcagagggtcccagatgccctggtcttcactatccaaacacggggcaccgctgagcccatcaccgtcacaattgtgccggcctacagggccctgggtccatccctccccaattcacagcctccccctgaagtgtacgtgtccttgatcaaagcctgtggagggccaggaaacttttgcccaagtttttcggagctgcagaggaatttcgtcaaacaccggcctactaaactcaaaagtcttttaagattggtcaaacactggtaccagcagtacgttaaggctaggagtccgcgggccaatctcccccctctttacgctctagaactcctgacaatatacgcttgggagatgggcaccgaggaggacgagaacttcatgttggacgaaggtttcacgacagtcatggacctgctccttgagtacgaagtcatttgcatctattggactaagtactatactctccacaacgccattatcgaagactgtgtgcggaagcaactgaagaaagaacgaccgataattctggacccagcagaccccactttgaacgtggctgaaggttacagatgggatatagtggcacaacgagcgtcacaatgcttgaagcaagattgttgttatgataatcgagagaaccccattagcagctggaacgtcaaacgtgcccgagatattcacctaacggttgaacaacgggggtatccagattttaaccttatcgtgaacccatatgagccgattaggaaggtgaaagaaaagatcagaagaacaagggggtattcggggctacagaggttgtcctttcaggtccccggctcagaaaggcagctgctcagctcgagatgttctctggccaagtacgggattttcagtcacacccacatttacctgcttgaaactatcccctcagaaattcaggtgttcgtgaaaaatcccgacggtgggagctacgcatacgcaatcaacccaaatagttttatcttaggcctcaagcaacaaattgaagaccaacaaggacttccaaaaaagcagcagcagcttgagtttcagggccaggtgctgcaagactggctcggcctcgggatctatggcatccaggactcggacacactgatattgtctaagaaaaagggtgaagctctatttcccgcttcctag

SEQ ID NO: 140462 - DNA, 1545 bp, Artificial Sequence
  derived and/or modified sequence
atggcattgatgcaggaactctattcaactccagccagccgcctggactcatttgtggcacaatggttacagccccacagggaatggaaagaggaggtgcttgacgccgtccggacagttgaagaattcctacgacaggaacacttccaggggaagaggggcctcgaccaagatgtccgagtgttgaaagttgtgaaggtgggctcgttcggcaatggaactgtactgagaagtactcgggaggtggagctcgtagcattcctaagttgtttccattccttccaagaagccgcaaaacaccacaaagacgtcctccgcctcatctggaagaccatgtggcagtcgcaggatctgttggacttgggcctagaggacctgcgcatggaacaacgggtccccgatgccttggtctttaccatccaaacacgagggaccgcagaaccgatcaccgtaactatcgtgcccgcttacagggcactgggcccttcactgcctaatagtcagcccccacccgaggtgtacgtgtctctgatcaaagcctgcggtggccctgggaatttctgcccttctttctctgagctccagaggaatttcgtgaagcacagaccaaccaagctgaagtcactgttaaggctcgttaaacattggtatcagcagtatgtaaaagcacggagtccgcgagcaaatctgccaccattgtatgcgttggaattgttaacgatctatgcctgggagatgggtacggaggaggatgagaacttcatgctggatgagggctttaccacagtgatggatttgcttctggaatatgaggttatttgcatttactggacaaagtattatactctccacaatgcaataatcgaggattgcgtgagaaaacagcttaagaaagagagacccattattcttgatccagccgacccaactttgaacgttgcggaaggttatagatgggacatcgtggctcagcgggcatcacagtgtttaaagcaggattgttgctacgacaaccgagaaaatcccatcagctcttggaacgtcaagcgagcacgggatattcacctcacagtggagcagagagggtatccagacttcaatctgatcgttaatccgtacgagccgatccggaaggtgaaagagaaaatcagaaggacccgcggatacagcgggctgcaaaggctttcatttcaggtgcccggatccgaaaggcagctcctcagcagcagatgcagtcttgcgaagtatggcattttctcacacactcatatttatctgctggaaacaatccccagcgaaattcaggtgttcgtaaagaatccagatggcggttcctatgcatacgccattaacccaaacagttttatcttaggactgaaacagcagatagaagaccagcaggggctcccaaagaaacagcaacagttagagtttcagggccaggtactgcaggactggctgggcctaggtatttacgggattcaggatagcgacacgctaattctctcaaaaaagaaaggagaggctctttttcccgctagctag

SEQ ID NO: 140463 - DNA, 2059 bp, Artificial Sequence
  derived and/or modified sequence
tgactagacggccagcctgttaaggtggccccagatattccagcctcagcccagagtcctcctgtgcccctactgcagcaagggtgtctccaagaagggggacctggagtcagcccgtcacacctggtttcctctctgctagggtccctcctcccacagagcactggagggcagctgaggaggagctaccttaaaaaaggaggtgtgtgccagggagctgggtaggagcctggctatatatctgcccagcagcggtactctcgggacagagatggcactgatgcaggaactgtatagcacaccagcctccaggctggactccttcgtggctcagtggctgcagccccaccgggagtggaaggaagaggtgctagacgctgtgcggaccgtggaggagtttctgaggcaggagcatttccaggggaagcgtgggctggaccaggatgtgcgggtgctgaaggtagtcaaggtgggctccttcgggaatggcacggttctcaggagcaccagagaggtggagctggtggcgtttctgagctgtttccacagcttccaggaggcagccaagcatcacaaagatgttctgaggctgatatggaaaaccatgtggcaaagccaggacctgctggacctcgggctcgaggacctgaggatggagcagagagtccccgatgctctcgtcttcaccatccagaccagggggactgcggagcccatcacggtcaccattgtgcctgcctacagagccctggggccttctcttcccaactcccagccaccccctgaggtctatgtgagcctgatcaaggcctgcggtggtcctggaaatttctgcccatccttcagcgagctgcagagaaatttcgtgaaacatcggccaactaagctgaagagcctcctgcgcctggtgaaacactggtaccagcagtatgtgaaagccaggtcccccagagccaatctgccccctctctatgctcttgaacttctaaccatctatgcctgggaaatgggtactgaagaagacgagaatttcatgttggacgaaggcttcaccactgtgatggacctgctcctggagtatgaagtcatctgtatctactggaccaagtactacacactccacaatgcaatcattgaggattgtgtcagaaaacagctcaaaaaagagaggcccatcatcctggatccggccgaccccaccctcaacgtggcagaagggtacagatgggacatcgttgctcagagggcctcccagtgcctgaaacaggactgttgctatgacaacagggagaaccccatctccagctggaacgtgaagagggcacgagacatccacttgacagtggagcagaggggttacccagatttcaacctcatcgtgaacccttatgagcccataaggaaggttaaagagaaaatccggaggaccaggggctactctggcctgcagcgtctgtccttccaggttcctggcagtgagaggcagcttctcagcagcaggtgctccttagccaaatatgggatcttctcccacactcacatctatctgctggagaccatcccctccgagatccaggtcttcgtgaagaatcctgatggtgggagctacgcctatgccatcaaccccaacagcttcatcctgggtctgaagcagcagattgaagaccagcaggggcttcctaaaaagcagcagcagctggaattccaaggccaagtcctgcaggactggttgggtctggggatctatggcatccaagacagtgacactctcatcctctcgaagaagaaaggagaggctctgtttccagccagttagttttctctgggagacttctctgtacatttctgccatgtactccagaactcatcctgtcaatcactctgtcccattgtctactgggaaggtcccaggtcttcaccagttttacaatgagttatcccaggccagacgtggtagctcacacctgtaatcccagaactttgggaggccgaggtgggaggagcgcttgagccgaggagttcaagaccagcctgggtatcacagggagaccccgtctct

SEQ ID NO: 140464 - DNA, 1545 bp, Artificial Sequence
  derived and/or modified sequence
atggccctgatgcaggagctgtacagcacccccgccagcagactggacagcttcgtggcccagtggctgcagccccacagagagtggaaggaggaggtgctggacgccgtgagaaccgtggaggagttcctgagacaggagcacttccagggcaagagaggcctggaccaggacgtgagagtgctgaaggtggtgaaggtgggcagcttcggcaacggcaccgtgctgagaagcaccagagaggtggagctggtggccttcctgagctgcttccacagcttccaggaggccgccaagcaccacaaggacgtgctgagactgatctggaagaccatgtggcagagccaggacctgctggacctgggcctggaggacctgagaatggagcagagagtgcccgacgccctggtgttcaccatccagaccagaggcaccgccgagcccatcaccgtgaccatcgtgcccgcctacagagccctgggccccagcctgcccaacagccagcccccccccgaggtgtacgtgagcctgatcaaggcctgcggcggccccggcaacttctgccccagcttcagcgagctgcagagaaacttcgtgaagcacagacccaccaagctgaagagcctgctgagactggtgaagcactggtaccagcagtacgtgaaggccagaagccccagagccaacctgccccccctgtacgccctggagctgctgaccatctacgcctgggagatgggcaccgaggaggacgagaacttcatgctggacgagggcttcaccaccgtgatggacctgctgctggagtacgaggtgatctgcatctactggaccaagtactacaccctgcacaacgccatcatcgaggactgcgtgagaaagcagctgaagaaggagagacccatcatcctggaccccgccgaccccaccctgaacgtggccgagggctacagatgggacatcgtggcccagagagccagccagtgcctgaagcaggactgctgctacgacaacagagagaaccccatcagcagctggaacgtgaagagagccagagacatccacctgaccgtggagcagagaggctaccccgacttcaacctgatcgtgaacccctacgagcccatcagaaaggtgaaggagaagatcagaagaaccagaggctacagcggcctgcagagactgagcttccaggtgcccggcagcgagagacagctgctgagcagcagatgcagcctggccaagtacggcatcttcagccacacccacatctacctgctggagaccatccccagcgagatccaggtgttcgtgaagaaccccgacggcggcagctacgcctacgccatcaaccccaacagcttcatcctgggcctgaagcagcagatcgaggaccagcagggcctgcccaagaagcagcagcagctggagttccagggccaggtgctgcaggactggctgggcctgggcatctacggcatccaggacagcgacaccctgatcctgagcaagaagaagggcgaggccctgttccccgccagctag

SEQ ID NO: 140465 - protein, 763 aa, Artificial Sequence
  derived and/or modified sequence
MNQKTILVLLILAVITIFALVCVLLVGRGGDGGEPSQLPHCPSVSPSAQPWTHPGQSQLFADLSREELTAVMRFLTQRLGPGLVDAAQARPSDNCVFSVELQLPPKAAALAHLDRGSPPPAREALAIVFFGRQPQPNVSELVVGPLPHPSYMRDVTVERHGGPLPYHRRPVLFQEYLDIDQMIFNRELPQASGLLHHCCFYKHRGRNLVTMTTAPRGLQSGDRATWFGLYYNISGAGFFLHHVGLELLVNHKALDPARWTIQKVFYQGRYYDSLAQLEAQFEAGLVNVVLIPDNGTGGSWSLKSPVPPGPAPPLQFYPQGPRFSVQGSRVASSLWTFSFGLGAFSGPRIFDVRFQGERLVYEISLQEALAIYGGNSPAAMTTRYVDGGFGMGKYTTPLTRGVDCPYLATYVDWHFLLESQAPKTIRDAFCVFEQNQGLPLRRHHSDLYSHYFGGLAETVLVVRSMSTLLNYDYVWDTVFHPSGAIEIRFYATGYISSAFLFGATGKYGNQVSEHTLGTVHTHSAHFKVDLDVAGLENWVWAEDMVFVPMAVPWSPEHQLQRLQVTRKLLEMEEQAAFLVGSATPRYLYLASNHSNKWGHPRGYRIQMLSFAGEPLPQNSSMARGFSWERYQLAVTQRKEEEPSSSSVFNQNDPWAPTVDFSDFINNETIAGKDLVAWVTAGFLHIPHAEDIPNTVTVGNGVGFFLRPYNFFDEDPSFYSADSIYFRGDQDAGACEVNPLACLPQAAACAPDLPAFSHGGFSHN

SEQ ID NO: 140466 - DNA, 2292 bp, Artificial Sequence
  derived and/or modified sequence
atgaaccaaaaaactatcctggttttgctgattctggccgtgataacgatctttgccttggtctgtgttcttctggtcggacgagggggcgacggaggcgagcctagccagttaccgcactgcccatccgtatccccatccgctcagccttggactcaccccggacagagccaactgttcgcagacctctcaagagaagagctcacggccgtgatgcgattcctcacccaacgattaggtccagggctggtcgacgctgcacaggctcgcccatcagacaattgcgtgttcagcgtcgagttgcagctcccacccaaagcagccgcactagcacatctggatcgaggttctccaccaccggcccgggaggcgcttgcaattgtgtttttcggacgccagcctcagccaaacgtctccgagttggtcgtgggcccattgccacatccatcttacatgagagatgttactgtggagcgccatgggggcccgcttccctaccaccgtcggcctgtgttgttccaggagtacctggacatcgatcagatgatattcaatagggagttgcctcaggccagtgggctgctccaccactgctgtttctataaacaccgggggagaaacctggtgactatgacgactgcaccaagagggctacagtcaggtgatagggcgacctggtttggtctttattacaatatttccggagccggcttctttctgcaccacgtgggtctggagcttctggttaaccacaaagctttggatcccgcccgttggactatacaaaaagtgttctaccagggcaggtactacgatagtttggctcagttagaagcccaattcgaggcaggattagtaaacgtcgtcctgattcctgataacggcaccggaggcagctggtcactcaagagccctgtaccccctgggccggcgccgcctcttcagttctaccctcagggacctcgcttctcagtccaggggagccgcgtcgcttcctctctgtggactttttctttcggactgggagccttcagtggccctaggatctttgatgtgcgctttcagggtgagcgccttgtctatgagatttcactccaggaggccttggccatttatggcggaaattctcctgcggccatgactactaggtatgtagatgggggattcgggatgggtaagtacaccactccgctgaccaggggtgttgattgtccttacctggccacttacgttgactggcatttcctattagaaagtcaggcccctaaaaccatccgggacgccttctgcgtgttcgagcagaaccagggtcttcccttacgccgacatcacagcgacctgtattcgcactatttcggagggctggccgaaactgtgctcgtcgtgcgttccatgtctactctgctaaactacgattatgtttgggataccgtcttccatcctagtggagctattgagattcggttttatgcaacaggctacatttctagcgctttcctctttggagctaccggaaaatacggcaatcaggtcagcgagcatacattaggaacagtgcatactcactctgctcattttaaggtggacctcgacgtggctggactcgagaattgggtgtgggccgaggacatggtgtttgttccaatggccgtaccttggagccccgagcatcagctacaacggctgcaggtcacccgcaaactgctggaaatggaagaacaagccgccttcctggtagggtccgctaccccacgctacctgtaccttgccagcaatcactcaaataagtggggacatcctcgtggttaccgcatacaaatgctgagtttcgccggtgagcctctcccccagaacagttccatggctcggggctttagctgggaacgctatcagctggctgtaactcaaagaaaggaggaagagccttcatcctcctccgtgttcaaccaaaacgacccatgggctccgactgtcgatttttccgattttataaacaatgagactattgcaggcaaagatctcgtcgcctgggttaccgcggggttcttacatataccacacgcggaggatatacccaatactgtgaccgtcgggaacggcgttggtttctttttgcgaccatacaatttttttgatgaggaccccagcttttacagtgcagactccatttactttcggggcgaccaggatgctggagcctgcgaggtaaacccattggcctgtctgccgcaggccgcagcctgcgcccctgacctacctgccttctcacacggaggctttagtcacaactag

SEQ ID NO: 140467 - DNA, 2292 bp, Artificial Sequence
  derived and/or modified sequence
atgaaccagaagaccatcctggtgctgctgatcctggccgtcatcaccatctttgccctggtgtgtgtgctgctggtgggcagaggaggagatggaggagagcccagccagctgccccactgccccagcgtgagccccagcgcccagccctggacccaccctggccagagccagctgtttgctgacctgagccgggaggagctgacagctgtgatgaggttcctgacccagaggctgggccctggcctggtggatgctgcccaggcccggcccagcgacaactgtgtgttttctgtggagctgcagctgccccccaaggccgccgccctggcccacctggaccggggcagccccccaccagcccgggaggccctggccatcgtgttcttcggccggcagccccagcccaacgtgtctgagctggtggtgggccccctgccccaccccagctacatgagagatgtgacagtggagcggcacggcggccccctgccctaccaccggcggcctgtgctcttccaggagtacctggacatcgaccagatgatcttcaaccgggagctgccccaggccagcggcctgctgcaccactgctgcttctacaagcaccggggcaggaacctggtgaccatgaccacagccccccggggcctgcagagcggggaccgggccacctggtttggcctgtactacaacatcagcggggccggcttcttcctgcaccacgtgggcctggagctgctggtgaaccacaaggccctggaccctgcccgctggaccatccagaaggtgttctaccagggccgctactatgacagcctggcccagctggaggcccagtttgaagctggcctggtgaatgtggtgctgatcccagacaatggcaccggcggctcctggagcctgaagagccctgtgcccccaggccctgccccacccctgcagttctacccccagggcccccgcttctctgtgcagggcagccgggtggccagcagcctgtggaccttctcctttggcctgggcgccttcagcggcccccgcatctttgatgtgcgcttccagggcgagcggctggtgtatgagatcagcctgcaggaggccctggccatctacggcggcaacagccctgctgccatgaccacccgctacgtggatggcggcttcggcatgggcaagtacaccacccccctgacccggggcgtggactgcccctacctggccacctacgtggactggcacttcctgctggagagccaggcccccaagaccatcagagatgccttctgtgtgtttgagcagaaccagggcctgcccctgcggcggcaccacagcgacctgtacagccactactttggaggcctggccgagaccgtgctggtggtgcgctccatgagcaccctgctgaactatgactatgtgtgggacacagtgttccaccccagcggggccatcgagatccgcttctacgccaccggctacatcagcagcgccttcctgtttggagccaccgggaagtatggcaaccaggtgtctgagcacaccctgggcaccgtgcacacccacagcgcccacttcaaggtggacctggatgtggccggcctggagaactgggtgtgggccgaggacatggtgtttgtgcccatggctgtgccctggagccctgagcaccagctgcagaggctgcaggtgaccaggaagctgctggagatggaggagcaggccgccttcctggtgggcagcgccaccccccgctacctgtacctggccagcaaccacagcaacaagtggggccacccccggggctaccgcatccagatgctgagctttgctggggagcccctgccccagaacagctccatggcccggggcttctcctgggagcgctaccagctggccgtgacccagaggaaggaggaggagcccagcagcagcagcgtcttcaaccagaatgacccctgggcccccaccgtggacttcagtgacttcatcaacaatgagaccatcgccggcaaggacctggtggcctgggtgacagctggcttcctgcacatcccccatgctgaggacatccccaacacagtgacagtgggcaatggagtgggcttcttcctgcggccctacaacttctttgatgaggaccccagcttctacagcgctgacagcatctacttccggggggaccaggatgctggggcctgtgaggtgaaccccctggcctgcctgccccaggccgccgcctgtgccccagacctgcctgccttcagccatggaggcttcagccacaactag

SEQ ID NO: 140468 - DNA, 4023 bp, Artificial Sequence
  derived and/or modified sequence
gtccttcccacccttagtcccaggcatctgactaccgggaacctcagccagagtccgggagccccccaccccgtccaggagccaacagagcccccgtcttgctggcgtgagaatacattgctctcctttggttgaatcagctgtccctcttcgtgggaaaatgaaccagaagacaatcctcgtgctcctcattctggccgtcatcaccatctttgccttggtttgtgtcctgctggtgggcaggggtggagatgggggtgaacccagccagcttccccattgcccctctgtatctcccagtgcccagccttggacacaccctggccagagccagctgtttgcagacctgagccgagaggagctgacggctgtgatgcgctttctgacccagcggctggggccagggctggtggatgcagcccaggcccggccctcggacaactgtgtcttctcagtggagttgcagctgcctcccaaggctgcagccctggctcacttggacagggggagccccccacctgcccgggaggcactggccatcgtcttctttggcaggcaaccccagcccaacgtgagtgagctggtggtggggccactgcctcacccctcctacatgcgggacgtgactgtggagcgtcatggaggccccctgccctatcaccgacgccccgtgctgttccaagagtacctggacatagaccagatgatcttcaacagagagctgccccaggcttctgggcttctccaccactgttgcttctacaagcaccggggacggaacctggtgacaatgaccacggctccccgtggtctgcaatcaggggaccgggccacctggtttggcctctactacaacatctcgggcgctgggttcttcctgcaccacgtgggcttggagctgctagtgaaccacaaggcccttgaccctgcccgctggactatccagaaggtgttctatcaaggccgctactacgacagcctggcccagctggaggcccagtttgaggccggcctggtgaatgtggtgctgatcccagacaatggcacaggtgggtcctggtccctgaagtcccctgtgcccccgggtccagctccccctctacagttctatccccaaggcccccgcttcagtgtccagggaagtcgagtggcctcctcactgtggactttctcctttggcctcggagcattcagtggcccaaggatctttgacgttcgcttccaaggagaaagactagtttatgagataagcctccaagaggccttggccatctatggtggaaattccccagcagcaatgacgacccgctatgtggatggaggctttggcatgggcaagtacaccacgcccctgacccgtggggtggactgcccctacttggccacctacgtggactggcacttccttttggagtcccaggcccccaagacaatacgtgatgccttttgtgtgtttgaacagaaccagggcctccccctgcggcgacaccactcagatctctactcgcactactttgggggtcttgcggaaacggtgctggtcgtcagatctatgtccaccttgctcaactatgactatgtgtgggatacggtcttccaccccagtggggccatagaaatacgattctatgccacgggctacatcagctcggcattcctctttggtgctactgggaagtacgggaaccaagtgtcagagcacaccctgggcacggtccacacccacagcgcccacttcaaggtggatctggatgtagcaggactggagaactgggtctgggccgaggatatggtctttgtccccatggctgtgccctggagccctgagcaccagctgcagaggctgcaggtgacccggaagctgctggagatggaggagcaggccgccttcctcgtgggaagcgccacccctcgctacctgtacctggccagcaaccacagcaacaagtggggtcacccccggggctaccgcatccagatgctcagctttgctggagagccgctgccccaaaacagctccatggcgagaggcttcagctgggagaggtaccagctggctgtgacccagcggaaggaggaggagcccagtagcagcagcgttttcaatcagaatgacccttgggcccccactgtggatttcagtgacttcatcaacaatgagaccattgctggaaaggatttggtggcctgggtgacagctggttttctgcatatcccacatgcagaggacattcctaacacagtgactgtggggaacggcgtgggcttcttcctccgaccctataacttctttgacgaagacccctccttctactctgccgactccatctacttccgaggggaccaggatgctggggcctgcgaggtcaaccccctagcttgcctgccccaggctgctgcctgtgcccccgacctccctgccttctcccacgggggcttctctcacaactaggcggtcctgggatggggcatgtggccaagggctccagggccagggtgtgagggatggggagcagctgggcactgggccggcagcctggttccctctttcctgtgccaggactctctttcttccactaccctccctcgcatccgcctctgagccaggagcctcctgaccctgtgatgcctgacacaggggacactgaaccttgttgatgccagctgtactgagttctcatccacagaggccaggcatggcccagcctggagccgtggccgagggcttccctagatggttccctttgttgctgtctggctttcccgaatctttttaggccacctccaaggactctaaaagggggctattccctggagaccccagagtagggttgccagtcctgcaagtccatagctgagctggaaaggatgcttctgctcacattccctctcatccaggtcctttccttctcgtcttcctctctctcacctacttcctcctcctcctcctgttcctgccttctcttctatcctgcaatttctcccgaatcctgaggggatatccctatgtcccagcccctggtactcccccagccctcagttttcagtcaagttccgtctcctctccagccctatggaagtctcaaggtcacgggacccctaatcagagtggccaatccctgtgtgtcgttcccttgtgtctgttgcttattgggagtaggagttgctcctacccctgtcctggggctgggtgtgtttcaggacagctgcttctgtgcatttgtgtctgcctgcctcatgctctctatagaggaggatggtcatcgtgacagcagcagctcaagttagcatttcaagtgatttgggggtgcaatgataatgaagaatggccattttgtaccagggctctgtattctgcaacagcctgtttgggaggctggagtggaaacaaagggtgggcatcaaagatgagaagccaaagcccctacaactccagccacccagccaggaggggctgtccaatcacattcaggcatgcgaatgagctgggccctgggtgaggtgggggtctggcctagtggggaggggcctggcctgggtggggcagggcctggcctggtccaggcttgggctccattcccatcactgctgtccctcctgaggtctggattggggatggggacaaagaaatagcaagagatgagaaacaacagaaacttttttctctaaaggactggttaaatcaattctgatacagccttacaatacaatagtatgcagctaaaaaataattgtatgtctttatatactaatatgtaataatcttcaggtgaaaaaggcaagccacagaaatgtgtatagcgcacttcccatttgtgtttcagaaaggagtagaatataaacacataattgcttatgtatgcctattcagaataaatgggtaacactgattacttttgggaggggaaccagtaggttgaggacaggagagggaagggtcttaacacttacacccttttgtacattttgaattttgaaccatgtgactgtattacctattcaaaataaacaataaatgggccc

SEQ ID NO: 140469 - DNA, 2292 bp, Artificial Sequence
  derived and/or modified sequence
atgaaccagaagaccatcctggtgctgctgatcctggccgtgatcacaatttttgctttggtgtgcgtactgctcgtggggcggggtggcgacgggggtgaaccttcccaactgccacactgcccatccgtatccccctctgcccagccatggacccatcccggccagtcacaactcttcgcagacttatcaagggaagaactgacagcggtgatgaggtttctgacccagcgcctgggccctggacttgtggacgctgcccaggctaggccatctgacaactgcgtatttagcgtggagctacagctgccaccaaaggccgccgcccttgcccatttagaccgcggctcccctccccccgctcgagaggccctggccattgtatttttcggccgccaaccccagccaaacgtttcagagctggtggtgggaccccttccgcacccttcctacatgagagacgtaacggttgaacgacacggagggccccttccctaccatcgtcgccccgttctcttccaggagtacttagacatagatcaaatgatctttaaccgcgagctcccacaggcctccggtttgcttcaccactgttgtttttataaacaccggggccggaacctggtcactatgaccactgcaccgaggggactgcagtcaggcgaccgggccacctggttcggactttactataatatttcaggggccggcttttttttacaccacgtaggactggagctcttggtgaaccacaaagccctcgaccctgccaggtggacgatccagaaagtgttttaccagggaagatactatgattcgctagctcagctcgaggcccagtttgaggcaggacttgtgaatgtcgtcctgatccccgacaacggaacgggaggctcctggagcctaaaaagccctgtgccacccgggcccgctcccccactgcaattttaccctcaaggcccccgtttctcagtgcagggctcccgggtcgcctcttctctctggacattcagttttggccttggtgctttctcaggcccaaggatatttgacgtccgttttcagggagagaggctggtttatgagatttccctacaggaagctttggccatctatggcggcaattcacctgctgccatgaccacaagatacgtggatggaggctttgggatgggaaaatacactacacctctgacacgaggagtcgactgcccctatctcgccacttacgtcgattggcatttcctgctcgagagtcaggcacctaaaacaatcagagacgccttttgcgtatttgagcaaaaccagggactgcccctccgccgacatcacagcgatttgtacagtcattacttcggcggactggccgaaactgtccttgtcgtgagatctatgagtacgctgcttaactacgattacgtttgggacaccgtgttccatcctagtggagccatcgaaattcgtttctatgcgaccggttatatcagctcggcattcttgttcggagcaactggaaagtatgggaatcaggtcagcgaacataccctgggcaccgttcacacccacagcgcacacttcaaggttgacctggacgtggcaggacttgagaactgggtctgggctgaggacatggtgtttgtacctatggccgtcccgtggtctccagaacaccagctgcagcggcttcaggtcacgaggaaattactggagatggaagagcaggccgcatttctggttggttctgctacaccacgctacctttacctagcgagtaaccatagcaacaaatggggccatccacgaggctatcgtattcagatgttgagcttcgcaggggaacctctgccacaaaattcatctatggcacgcggatttagttgggaacgttatcagctggccgtcacgcagagaaaggaggaggagccctcttccagttccgtgttcaaccagaatgacccttgggcccccacagtggattttagcgacttcataaacaatgagaccatcgcagggaaagacttggtagcctgggtaaccgccggctttctgcatatcccccacgccgaggatatacccaacacagtgaccgtaggaaatggggtcggatttttcctgaggccatacaacttctttgacgaggatccttctttctacagtgctgatagcatatatttccgaggcgatcaggacgccggggcttgtgaggtgaaccctctggcctgtctgccccaagccgccgcttgcgctccggatttacccgcattttctcacggcggtttttctcataactag

SEQ ID NO: 140470 - DNA, 2292 bp, Artificial Sequence
  derived and/or modified sequence
atgaatcaaaagacgattctggtattgctgatcttggccgtgatcacaatatttgccttggtatgtgtcctgctagtagggaggggtggagacggcggagaaccttcacagttaccccattgcccgtccgtgtctccatcagcacagccatggacgcaccctggccaatcacagctctttgcagacctgagtagagaagagttgaccgccgtgatgaggttcctcactcagaggctgggtccaggactggtcgatgccgcacaggccaggccttccgacaattgtgtgttttcagttgagctgcaactcccccctaaggccgcagcgctggcccacctggatcgcggttcaccacccccagcgagagaagcacttgccatcgttttctttggaaggcaaccccagcctaacgtgagcgaactagttgttgggcctctgccccatccaagttacatgcgagatgtgacggtggaacgtcatggcggacccctgccctaccaccgtaggccagtgctctttcaagaatatttggatattgaccaaatgatatttaatcgggagctcccccaggccagcgggctgctacaccactgctgcttctataaacacagaggtaggaatcttgtgaccatgacaacagctcctcggggtttgcagagcggggatcgagcaacttggttcggcctgtactacaacatctctggcgcaggctttttcctccaccatgtcgggttagaactccttgtgaaccacaaggctctcgatccagcgcgttggacaattcaaaaggtgttctaccagggtagatactacgacagccttgcccagttggaggcccagtttgaagctgggctagtgaacgtcgttctgataccagataacgggactgggggaagctggtcactaaagtctcctgtccctcccggtcccgctccacccctccagttctaccctcaagggcctcgcttcagcgttcagggatcccgagtggcctcaagcttgtggactttttcttttggactgggagccttttcaggcccacggatctttgacgtaaggttccagggcgagaggcttgtatatgaaatctccttacaggaggccctcgccatatatggtggcaatagcccggcagcaatgacaacacggtacgtagacgggggatttggaatgggaaagtataccacccccttgaccagaggagttgattgtccataccttgcaacttatgtggattggcatttcctcctcgaaagccaggctcctaagaccataagagatgccttctgtgtattcgagcagaaccagggattgcccctccgacggcaccactcagacctgtatagtcactacttcgggggtctggctgagaccgtgctggtcgtgcggtccatgtcaactctcctgaattacgactacgtgtgggataccgtgtttcatcctagcggcgctatcgagatcaggttctacgccaccggctatattagcagcgcatttttgttcggcgcaaccggtaaatacgggaatcaagtttcagagcacaccctagggacagtgcatacccattccgcccattttaaggtggaccttgacgttgctggactggagaactgggtgtgggctgaggatatggtgttcgtgcctatggcggtcccatggagccctgagcaccagctgcagcgactgcaggtgacccgtaaactgcttgaaatggaagagcaggctgctttcctggtgggctctgcaactcctagatacctctatctcgcatcaaatcatagcaataagtgggggcacccccgtggttatagaatccagatgctgagctttgcaggagagcccctaccccagaactcatccatggcccgaggattttcctgggaacgttatcaattggcagttactcagcgtaaagaggaggagccctcctcttcaagcgtttttaatcagaatgacccttgggcgccaactgtggacttttccgatttcatcaacaatgagacaatagctggcaaagacttagtagcttgggtgactgccggttttctgcatattccacacgcagaggacattccgaacactgttacagttggtaatggtgtcggcttcttcctgaggccatataatttctttgacgaggaccccagcttctattcagctgacagcatctacttccgaggcgatcaagacgcaggcgcttgtgaggtgaatccactcgcctgcctgcctcaggcagctgcttgcgcgcctgacctgccagcttttagccacggcggatttagccacaattag

SEQ ID NO: 140471 - DNA, 2292 bp, Artificial Sequence
  derived and/or modified sequence
atgaaccagaagaccatcctggtgctgctgatcctggccgtgatcaccatcttcgccctggtgtgcgtgctgctggtgggcagaggcggcgacggcggcgagcccagccagctgccccactgccccagcgtgagccccagcgcccagccctggacccaccccggccagagccagctgttcgccgacctgagcagagaggagctgaccgccgtgatgagattcctgacccagagactgggccccggcctggtggacgccgcccaggccagacccagcgacaactgcgtgttcagcgtggagctgcagctgccccccaaggccgccgccctggcccacctggacagaggcagccccccccccgccagagaggccctggccatcgtgttcttcggcagacagccccagcccaacgtgagcgagctggtggtgggccccctgccccaccccagctacatgagagacgtgaccgtggagagacacggcggccccctgccctaccacagaagacccgtgctgttccaggagtacctggacatcgaccagatgatcttcaacagagagctgccccaggccagcggcctgctgcaccactgctgcttctacaagcacagaggcagaaacctggtgaccatgaccaccgcccccagaggcctgcagagcggcgacagagccacctggttcggcctgtactacaacatcagcggcgccggcttcttcctgcaccacgtgggcctggagctgctggtgaaccacaaggccctggaccccgccagatggaccatccagaaggtgttctaccagggcagatactacgacagcctggcccagctggaggcccagttcgaggccggcctggtgaacgtggtgctgatccccgacaacggcaccggcggcagctggagcctgaagagccccgtgccccccggccccgccccccccctgcagttctacccccagggccccagattcagcgtgcagggcagcagagtggccagcagcctgtggaccttcagcttcggcctgggcgccttcagcggccccagaatcttcgacgtgagattccagggcgagagactggtgtacgagatcagcctgcaggaggccctggccatctacggcggcaacagccccgccgccatgaccaccagatacgtggacggcggcttcggcatgggcaagtacaccacccccctgaccagaggcgtggactgcccctacctggccacctacgtggactggcacttcctgctggagagccaggcccccaagaccatcagagacgccttctgcgtgttcgagcagaaccagggcctgcccctgagaagacaccacagcgacctgtacagccactacttcggcggcctggccgagaccgtgctggtggtgagaagcatgagcaccctgctgaactacgactacgtgtgggacaccgtgttccaccccagcggcgccatcgagatcagattctacgccaccggctacatcagcagcgccttcctgttcggcgccaccggcaagtacggcaaccaggtgagcgagcacaccctgggcaccgtgcacacccacagcgcccacttcaaggtggacctggacgtggccggcctggagaactgggtgtgggccgaggacatggtgttcgtgcccatggccgtgccctggagccccgagcaccagctgcagagactgcaggtgaccagaaagctgctggagatggaggagcaggccgccttcctggtgggcagcgccacccccagatacctgtacctggccagcaaccacagcaacaagtggggccaccccagaggctacagaatccagatgctgagcttcgccggcgagcccctgccccagaacagcagcatggccagaggcttcagctgggagagataccagctggccgtgacccagagaaaggaggaggagcccagcagcagcagcgtgttcaaccagaacgacccctgggcccccaccgtggacttcagcgacttcatcaacaacgagaccatcgccggcaaggacctggtggcctgggtgaccgccggcttcctgcacatcccccacgccgaggacatccccaacaccgtgaccgtgggcaacggcgtgggcttcttcctgagaccctacaacttcttcgacgaggaccccagcttctacagcgccgacagcatctacttcagaggcgaccaggacgccggcgcctgcgaggtgaaccccctggcctgcctgccccaggccgccgcctgcgcccccgacctgcccgccttcagccacggcggcttcagccacaactag

SEQ ID NO: 140472 - protein, 923 aa, Artificial Sequence
  derived and/or modified sequence
MGSGAGELGRAERLPVLFLFLLSLFCPALCEQIRYRIPEEMPKGSVVGNLATDLGFSVQELPTRKLRVSSEKPYFTVSAESGELLVSSRLDREEICGKKPACALEFEAVAENPLNFYHVNVEIEDINDHTPKFTQNSFELQISESAQPGTRFILGSAHDADIGSNTLQNYQLSPSDHFSLINKEKSDGSKYPEMVLKTPLDREKQKSYHLTLTALDFGAPPLSSTAQIHVLVTDANDNAPVFSQDVYRVSLSENVYPGTTVLQVTATDQDEGVNAEITFSFSEASQITQFDLNSNTGEITVLNTLDFEEVKEYSIVLEARDGGGMIAQCTVEVEVIDENDNAPEVIFQSLPNLIMEDAELGTHIALLKVRDKDSRHNGEVTCKLEGDVPFKILTSSRNTYKLVTDAVLDREQNPEYNITVTATDRGKPPLSSSSSITLHIGDVNDNAPVFSQSSYIVHVAENNPPGASISQVRASDPDLGPNGQVSYCIMASDLEQRELSSYVSISAESGVVFAQRAFDHEQLRAFELTLQARDQGSPALSANVSLRVLVDDRNDNAPRVLYPALGPDGSALFDMVPHAAEPGYLVTKVVAVDADSGHNAWLSYHVLQASEPGLFSLGLRTGEVRTARALGDRDAVRQRLLVAVRDGGQPPLSATATLHLVFADSLQEVLPDITDRPDPSDLQAELQFYLVVALALISVLFLVAMILAIALRLRRSSSPASWSCFQPGLCVKSESVVPPNYSEGTLPYSYNLCVAHTGKTEFNFLKCSEQLSSGQDILCGDSSGALFPLCNSSELTSHQQAPPNTDWRFSQAQRPGTSGSQNGDDTGTWPNNQFDTEMLQAMILASASEAADGSSTLGGGAGTMGLSARYGPQFTLQHVPDYRQNVYIPGSNATLTNAAGKRDGKAPAGGNGNKKKSGKKEKK

SEQ ID NO: 140473 - DNA, 2772 bp, Artificial Sequence
  derived and/or modified sequence
atggggagtggagcgggggagctcggcagggccgagcgcctacctgttctgttcctgtttctgttgagcctcttttgcccagccctgtgcgagcagataaggtataggattcccgaggaaatgcccaagggcagcgtagttggcaatttggccacagatctgggcttctccgtgcaggaacttcccaccaggaagcttagggttagctccgagaagccatatttcacagtctccgccgaatctggtgagctgctcgtctcgagtaggcttgatagggaggagatctgtggcaaaaagccagcatgcgccttggagttcgaagcggtcgcagaaaacccactgaatttctaccacgtgaacgtagaaatcgaagacataaatgaccacacaccaaaattcactcagaactccttcgaactccagattagtgaaagcgctcaaccagggacccgctttatcctggggtccgctcacgacgctgatatcgggtcaaatacactgcagaactatcagctatccccatcagatcatttctccttaatcaataaggaaaagtcagatggaagtaaatatccggaaatggttctgaaaacccccctagacagggagaagcaaaagtcctatcatctcacccttactgctcttgatttcggtgccccccctttgagcagcacagcccaaatccacgtccttgtaaccgatgcaaacgataatgcccctgtgttttcccaggatgtgtatagagtttcactcagcgaaaacgtttatccaggtactaccgttctgcaagttactgcaacggaccaggacgagggagtgaatgcagagatcacattcagcttcagcgaggcttctcagatcactcagtttgacctgaactcaaataccggggagatcaccgtgctcaacactctggatttcgaggaagtgaaggagtattccatcgtcctggaggccagagacggcgggggaatgatcgcacagtgtacggtggaggtggaggtcattgatgagaatgataatgctcccgaagtcatcttccagtcattgcccaatctgatcatggaagacgccgagttaggtacgcacattgcgctcctgaaagtgcgggataaagacagccgacataacggcgaagtcacctgtaagctggagggcgatgtccccttcaagattcttactagttcgcgcaacacgtacaagctcgtcacagacgctgtgcttgacagagagcagaaccccgaatataacatcaccgtaaccgccaccgatcgaggcaagccaccactgtcctcctctagcagcataacattacatatcggagatgtaaatgacaatgcgcccgtgttctcacagtcctcctatattgtccacgtcgcagagaataaccctccaggcgcttccatctcacaagtcagggccagcgaccccgatctcggcccaaatgggcaggtgagttattgcataatggcatcggatctcgagcagcgagaactgtcaagttacgtgagcattagtgctgaatctggcgtagtcttcgcacagcgcgcttttgatcacgagcaactgcgcgcttttgagttgacactccaggcccgcgaccagggatcacccgccctgagtgctaatgtctcacttcgggtccttgttgacgaccgaaacgataacgcgcctcgagtcctctatcccgcgctaggccctgatggatccgcactgttcgacatggttccccacgccgcggagccagggtacctggtgacaaaggttgtcgctgttgacgcagatagtggccataacgcatggcttagctaccatgtgttacaggcgtctgagcccggcctcttctccctgggactgaggactggagaggttagaacagcccgcgcgctgggagatcgggatgccgtgcgccagcgcttactggtggccgtgagagacggtggccagccacctctttccgctacagccaccctgcatctggttttcgcagattccttgcaggaagtcttaccagacattacagaccgtcctgacccctccgatttgcaggcggaactgcagttttatctagtggtggccctggccctcatcagtgtcctgtttctcgttgccatgatacttgctattgcgcttaggctacggaggtccagctcccctgcctcatggtcttgtttccagcctggcctgtgtgtaaagagtgagagtgtggtgccccccaattactccgaaggcacccttccttactcctacaatctgtgcgtcgcccatacaggcaagaccgagtttaacttcttgaaatgtagcgaacagctgtcctctggtcaggacattctttgtggtgacagctcaggagcgctgtttcctctttgtaattcatctgagttgaccagtcaccagcaggccccgcctaatactgactggcggttctcacaagcccagaggccgggaacgagcggctcacagaatggtgacgatacaggaacatggcctaataatcagttcgacactgagatgctccaggccatgatcctggccagcgcttcagaggctgcagacgggtccagtacactgggcgggggagctggtaccatgggtttgagcgcccgatatggtcctcagtttaccctgcagcacgtgcctgattacaggcaaaatgtatacattccaggatctaacgccacactaacaaacgccgcgggtaagcgggatgggaaagcccctgcggggggaaacggaaataagaagaagtctggcaagaaggagaaaaagtag

SEQ ID NO: 140474 - DNA, 2772 bp, Artificial Sequence
  derived and/or modified sequence
atgggcagcggggccggggagctgggccgggcagagcggctgcctgtgctcttcctgttcctgctgagcctcttctgcccagccctgtgtgagcagatccgctaccgcatccctgaggagatgcccaagggctctgtggtgggcaacctggccacagacctgggcttctctgtgcaggagctgcccaccaggaagctgcgggtgagcagcgagaagccctacttcaccgtgtctgctgagagcggggagctgctggtgagcagccggctggaccgggaggagatctgtgggaagaagccagcctgtgccctggagtttgaggccgtggccgagaaccccctgaacttctaccacgtgaatgtggagattgaggacatcaatgaccacacccccaagttcacccagaacagctttgagctgcagatcagcgagagcgcccagcccggcacccgcttcatcctgggcagcgcccatgatgctgacatcggcagcaacaccctgcagaactaccagctgagccccagcgaccacttcagcctcatcaacaaggagaagagtgatggcagcaagtacccagagatggtgctgaagacccccctggaccgggagaagcagaagagctaccacctgaccctgacagccctggactttggagccccacccctgagcagcacagcccagatccacgtgctggtgacagatgccaatgacaatgcccctgtgttcagccaggatgtgtacagagtgtccctgtctgaaaatgtgtacccaggcaccaccgtgctgcaggtgacagccacagaccaggatgagggcgtgaatgctgagatcaccttctccttcagcgaggccagccagatcacccagtttgacctgaacagcaacacaggagagatcaccgtgctgaacaccctggactttgaggaggtgaaggagtacagcatcgtgctggaggccagagatggcggcggcatgattgcccagtgcaccgtggaggtggaggtgattgatgaaaatgacaatgcccctgaggtgatcttccagagcctgcccaacctgatcatggaggatgctgagctgggcacccacatcgccctgctgaaggtgcgggacaaggacagccgccacaatggagaggtgacctgcaagctggagggagatgtgcccttcaagatcctgaccagcagcaggaacacctacaagctggtgacagatgctgtgctggaccgggagcagaaccctgagtacaacatcaccgtgacagccacagaccggggcaagccacccctgagcagcagcagcagcatcaccctgcacatcggagatgtgaatgacaatgcccctgtgttcagccagagcagctacatcgtgcacgtggccgagaacaaccccccaggggccagcatcagccaggtgcgggccagtgaccctgacctgggccccaacggccaggtgtcctactgcatcatggccagtgacctggagcagcgggagctgagcagctatgtgtccatctctgctgagagcggcgtggtgtttgcccagagggcctttgaccacgagcagctgcgggcctttgagctgaccctgcaggcccgggaccagggcagccctgccctgagcgccaacgtgtccctgcgggtgctggtggatgacagaaatgacaatgccccccgggtgctgtacccagccctgggcccagatggcagcgccctgtttgacatggtgccccatgctgctgagcccggctacctggtgaccaaggtggtggccgtggatgctgacagcggccacaatgcctggctgagctaccacgtgctgcaggccagcgagcccggcctcttcagcctgggcctgaggactggagaggtgaggacagcccgggccctgggggacagagatgctgtgcggcagaggctgctggtggccgtgagagatggcggccagccccccctgagcgccacagccaccctgcacctggtgtttgctgacagcctgcaggaggtgctgcctgacatcacagacagaccagaccccagcgacctgcaggccgagctgcagttctacctggtggtggccctggccctgatctctgtgctcttcctggtggccatgatcctggccatcgccctgcggctgcggcgcagcagcagccctgcctcctggagctgcttccagcccggcctgtgtgtgaagtctgagagcgtggtgccccccaactacagcgagggcaccctgccctacagctacaacctgtgtgtggcccacacaggcaagacagagttcaacttcctgaagtgcagcgagcagctgagcagcggccaggacatcctgtgtggggacagcagcggggccctcttccccctgtgcaacagcagcgagctgaccagccaccagcaggccccacccaacacagactggaggttcagccaggcccagaggcctggcaccagcggcagccagaatggagatgacaccggcacctggcccaacaaccagtttgacacagagatgctgcaggccatgatcctggccagcgccagcgaggccgcagatggcagcagcaccctgggcggcggggccggcaccatgggcctgagcgcccgctatggcccccagttcaccctgcagcacgtgcctgactaccggcagaatgtgtacatccctggcagcaatgccaccctgaccaatgctgctgggaagagagatggcaaggccccagctggaggaaatggaaacaagaagaagagcggcaagaaggagaagaagtag

SEQ ID NO: 140475 - DNA, 2772 bp, Artificial Sequence
  derived and/or modified sequence
atgggcagcggcgccggcgagctgggccgggccgagcggctgcccgtgctcttcctatttctgctgtccctattctgccctgctttgtgtgagcaaatacgctatcgcatacccgaggaaatgccgaagggctccgtcgtgggaaatttggcgaccgatttgggttttagcgtgcaagaactgccgactaggaaacttcgtgtatcatccgaaaagccatacttcacggttagcgccgaaagtggagaacttctggtctcttctagattggatagagaagagatttgcgggaaaaagcccgcctgcgccctggagttcgaggccgtagctgaaaatccgctgaacttttaccacgttaatgtggaaatcgaagacattaatgaccacacgcctaaattcacccaaaatagcttcgagttgcagatctccgaatctgcccagcctgggactaggttcatccttggttctgcacacgatgcggacattggaagcaacacactgcagaattatcagctaagcccatcggaccatttctctctcattaacaaggagaaaagtgatgggagcaagtaccccgagatggtccttaaaaccccgttggaccgtgagaaacagaagtcctaccacctgacattgactgccctggatttcggggcgccaccactgtcttccactgcccagattcacgttcttgtcactgatgctaacgataatgctccggtgttcagtcaggacgtatacagggtgtccctctctgagaacgtgtatcctggaacaaccgtactccaggtaaccgccaccgaccaggatgagggcgtgaacgcggagattaccttttcgttcagcgaggccagtcaaattacacagttcgatctcaactcgaatactggtgagattacggtgctgaataccctcgactttgaagaagtcaaagagtatagcattgtgttggaagccagggatggaggaggtatgatcgcacagtgcaccgtcgaggtggaggtgatcgatgagaacgataacgcccctgaagttattttccagtccctccctaatcttattatggaagacgctgaactgggaacacacatcgcattactgaaggtgagggataaggacagcagacacaatggtgaggtgacatgtaaactggaaggtgatgtaccatttaagatccttacttcatctcgtaacacatataaattggtgaccgacgccgtgctcgaccgtgagcagaatcccgagtataatataacagtgacagccaccgatcgtggcaagccaccacttagttccagctcctcaatcactctccatataggagacgtcaatgataacgcgcctgttttctctcagtcttcatacattgttcacgtggctgagaacaatcctcccggcgcttcaatttcgcaggttcgggccagtgacccggaccttggtccgaacggacaggttagctactgtattatggcgtccgacctggagcaaagagagctgtcatcttacgtgagcatttccgccgaatcaggcgtcgtattcgcccagcgagcgtttgatcacgagcagttgcgggccttcgaacttactctgcaggcacgcgaccagggctctccagcgctatcagccaatgtgtcactgcgagtgctggtagacgatagaaatgataacgcgcccagggtgctgtaccctgcgctggggcccgatggttcggcattattcgacatggtgcctcacgcggccgagcccggatatttggtgacaaaggtagtagcagtcgacgctgacagcggacataatgcatggctgagctatcacgtattacaggcctctgagcctggcttgttcagcctcggcctccggacaggagaggtgagaacagcacgggccctcggcgaccgggacgccgtgaggcagaggctgctggtcgccgttcgggatggcggacagccccctctgtccgccactgctactttacacctggtctttgctgatagcctgcaagaggtgctgcccgatatcaccgacaggcccgacccatctgatttacaggcggaattacagttttatctggttgtggccctggccctgattagtgtcttgttcctcgtggctatgatcttggcgatagctctgcgactgcggcgcagcagctccccagccagttggtcgtgctttcagcccggcctgtgcgtgaaatccgaaagcgttgttcctcccaattattcggagggcacgctcccgtatagttataatctctgcgtggcgcataccgggaaaaccgaattcaacttcctaaagtgctcagagcagctaagcagcggccaagatatactgtgcggcgactcttcgggggcactcttcccattgtgcaattctagtgaactaacttcacatcagcaggctccaccaaacactgattggcgtttttcccaggcacagcgcccagggacgagtggctcgcagaacggagacgatacaggaacgtggcctaacaatcaattcgataccgagatgttacaagcaatgatactcgcttccgccagtgaagcagcagacggcagcagtacacttggcggtggtgcagggacaatgggcttaagcgcccggtatggacctcagttcactctgcaacatgtgccagactaccgacagaatgtctatatccccggctcaaacgccacattaacgaatgcggcaggcaaaagagatgggaaggcaccagccggagggaatggaaataagaaaaaatccgggaaaaaagaaaagaagtag

SEQ ID NO: 140476 - DNA, 2772 bp, Artificial Sequence
  derived and/or modified sequence
atgggatccggcgctggggaactgggcagagccgagcgtctgcctgttctatttcttttccttctttccctcttttgtccagctttgtgcgaacagattcgatacaggatccccgaagagatgccaaaggggagtgtggtcggcaatcttgctactgatctcggcttcagcgtacaagagctccctacgcgaaaactgcgcgtttcttcagaaaaaccatactttaccgtttcagcggagagcggagaattgctagtgagctctcggctggacagagaagagatttgtggcaagaaacctgcttgtgccctagagttcgaagccgtcgcagagaatcctttgaacttctatcatgtgaatgtggagatcgaagatatcaacgaccatacacccaagtttactcaaaattcgtttgagctgcagattagtgaatctgctcaacccggaactcggttcatcttgggaagcgcgcatgacgctgatatcggcagtaacacactgcagaactaccaactatcacccagtgatcactttagcttgattaacaaggagaagtctgacggctccaaatatcccgagatggtcctgaaaactccactggatcgtgagaagcaaaaatcctaccacctcactttgactgctctggactttggcgctcctcctttgtctagcacagctcagatccacgtcctcgtgaccgacgctaacgacaacgcccctgtgttctcccaggacgtgtatcgggtctccctgagcgagaatgtttaccctggtactacagttctgcaggtcaccgcaaccgaccaagacgaaggcgtgaacgcagagattaccttttccttctcggaagcaagtcaaattacacaattcgacctgaacagcaacaccggagaaatcactgtgcttaacacactagacttcgaggaagtcaaggagtactcgatagtccttgaagcgagggacggcggaggaatgatcgctcaatgcacagtagaagtggaagtgatcgatgagaacgataacgccccagaagtgatcttccagtccttacccaatctgataatggaggacgccgagctgggaacacacatcgctctcttaaaagttcgcgacaaggattccagacacaacggcgaagtgacttgtaagcttgagggcgatgtgccatttaagattttgacgagcagccgcaatacctacaaacttgtcaccgatgcagtgttggatagagagcaaaatcctgagtacaacatcacagtgaccgccacagaccggggaaagcctcctctatctagttcctcttcaataacactgcacattggcgacgtaaatgataacgccccagtttttagtcagagcagctatattgtgcatgtcgccgaaaacaaccccccaggggctagcatctcgcaggtacgcgctagcgaccccgacctcgggcctaacggccaggtttcctattgtatcatggccagcgacctcgagcaacgtgagctgtccagttacgtatctatctccgcagaaagcggggtggtcttcgcccagcgcgcattcgatcatgagcagctgagggcttttgagctcacactgcaagccagagatcaggggtcgcctgccctgtcagctaatgtctcgctgcgagtgcttgttgacgataggaatgataacgcacccagggtcttgtatcccgctctgggaccagacggtagcgcgctgttcgatatggtgccccatgcggctgagcctggatacttggtgaccaaagtggtggcagtcgatgcagactcgggacataacgcttggctgtcctaccacgtgttacaggcctccgagcctggcctctttagcctggggcttcggaccggtgaggtccgcactgcacgcgctctgggggaccgggacgcagttaggcaacgtttactcgtggccgttcgtgacgggggacagcctcctttgtctgccaccgcgactctccatttagtgttcgcggattctcttcaagaggttcttcctgatatcaccgaccgcccagatccttccgatctgcaggccgaattacagttctatttagtagttgccctggcactcatttccgttctgtttctggtcgccatgattctggcaatagccttacggctcagaaggtctagctctcccgcttcatggtcctgctttcagccaggactctgtgtgaagtcagagagcgtcgtacctcctaactatagcgagggaaccctcccctactcatataatctgtgcgtcgctcacaccggtaagactgaattcaatttcttgaagtgttctgagcagctcagctcgggccaagatatcctatgtggagatagtagtggggcactgtttcccctgtgtaacagttcagagctaacctcccaccaacaggcccctcccaatacagattggcggttctcccaagcacagagaccaggcacaagtggaagccagaacggggacgacactggtacctggcccaataaccagttcgatacggaaatgctgcaggccatgattctagcctcagcgagcgaggcagcagatggatcttcaacgctaggcggaggagccggtaccatgggattatctgccagatacggtccacagttcacactgcaacacgtgcctgattaccggcaaaacgtgtatattccgggaagtaatgcaaccttgaccaacgccgctggaaaacgtgacggcaaggccccagccggtggaaacggtaacaagaaaaagtctgggaagaaggagaaaaaatag

SEQ ID NO: 140477 - DNA, 4578 bp, Artificial Sequence
  derived and/or modified sequence
atggggagcggcgccggggagctgggccgggctgagaggctgccagtgctctttctcttcctgctgtctttgttctgcccggcgctctgtgagcagatccgctacaggattcccgaggaaatgcccaagggctccgtagtggggaacctcgccacggacctggggttcagcgtccaggagttaccgactcgaaaactgcgcgtcagttcggagaagccttacttcaccgtgagcgcagagagcggggagttgcttgtgagcagcaggctagacagggaggagatatgcgggaagaagccagcttgtgctctggaatttgaggctgttgctgaaaatccactgaacttttatcacgtgaatgtggagatcgaggacattaatgaccacacgccaaaattcacgcaaaattcctttgagctgcaaataagtgagtctgcacagcctggcacacgatttatattaggatctgcccatgatgcggatattggtagcaacacactgcagaattaccaactcagtcccagtgatcatttctcactgataaataaagagaaatcagatggcagtaaataccctgagatggtattgaagacacctttggacagagaaaagcagaaatcctaccacttgactttgactgccttggactttggagctccacccctaagcagcactgcacagatacacgttctagtgactgatgccaatgataatgctccagtgttcagtcaagacgtatacagggtgagcctttcagaaaacgtgtacccggggaccacggtgctacaggtgactgccacggaccaggatgagggtgtcaatgccgagattactttctctttcagtgaagctagccagatcacccaatttgacctgaactctaacaccggggaaattactgttttaaatacattagattttgaagaagtcaaagaatattccatagttttggaagcaagggacggtggaggaatgattgcgcaatgcacagtggaggtagaagtcatagatgaaaatgacaacgccccagaagtgatattccagtctctacccaacctaattatggaggacgccgagctgggaacacatattgctttgctcaaagtccgtgacaaggattccagacacaatggagaagtgacttgtaaattggaaggtgatgttccatttaaaatattaacttcttcaagaaacacgtataaattagtgacagatgctgttctagaccgcgagcagaatccagagtacaatataaccgttacggcaacagatcggggcaagcctcccctctcctccagttccagcatcaccctgcacattggtgatgtaaatgacaacgctccggttttctcacagtcttcctatatagtccacgtggccgagaacaacccgcctggagcctctatttcacaagtcagggcttctgatccggacttggggcccaacggccaagtctcttactgcatcatggccagtgacctggagcagcgggagctgtcatcctacgtgtccataagcgcggagagcggggtggtgttcgcgcagcgcgccttcgaccacgagcagctgcgcgccttcgaactcacactgcaggcccgcgaccagggctcgccagcgctcagcgcgaacgtgagcctgcgcgtgttagtggacgaccgcaacgacaatgcgccacgggtgctgtaccccgcgctgggtcccgacggctctgcgctcttcgatatggtgccgcacgctgcagagcctggctacttggtgaccaaggtagtggcggtggacgcagactcaggacacaacgcctggctgtcctaccacgtgctgcaggctagcgagcccgggctcttcagcctggggctgcgcacgggcgaagtgcgcacagcgcgtgccttaggcgacagggacgccgtccgccagcgccttctggtcgccgtgcgtgacggtggacagccaccactctcggccactgccacgttgcacctggtcttcgccgacagcttgcaggaggtgctgccggatatcactgaccgccccgacccctctgacctccaggctgagctgcagttttacctagtggtggccttggccttgatctcagtgctcttcctcgtggccatgattctggccattgccttgcgcctgcgacgctcctccagccccgcctcctggagctgcttccagcctggtctctgtgttaaatccgaatccgtggttccccccaactacagcgaggggactttgccttattcctacaatctatgtgttgcacatacaggaaagacggagtttaatttcctaaaatgtagtgagcagttgagttcaggacaagacatactttgcggtgattcatctggggccttatttccactttgtaattccagtgaattgacttcccatcagcaagccccgcccaacacggactggcgtttctctcaggcccagagacccggcaccagcggctcccaaaatggcgatgacaccggcacctggcccaacaaccagtttgacacagagatgctgcaagccatgatcttggcgtccgccagtgaagctgctgatgggagctccaccctgggagggggtgccggcaccatgggattgagcgcccgctacggaccccagttcaccctgcagcacgtgcccgactaccgccagaatgtctacatcccaggcagcaatgccacactgaccaacgcagctggcaagcgggatggcaaggccccagcaggtggcaatggcaacaagaagaagtcgggcaagaaggagaagaagtaacatggaggccaggccaagagccacagggcggcctctccccaaccagcccagcttctccttacctgcacccaggcctcagagtttcagggctaacccccagaatactggtaggggccaaggccatgctccccttgggaaacagaaacaagtgcccagtcagcacctaccccttcccccccagggggttgaatatgcaaaagcagttccgctgggaacccccatccaatcaactgctgtacccatgggggtagtggggttactgtagacaccaagaaccatttgccacaccccgtttagttacagctgaactcctccatcttccaaatcaatcaggcccatccatcccatgcctccctcctccccaccccactccaacagttcctctttcccgagtaaggtggttggggtgttgaagtaccaagtaacctacaagcctcctagttctgaaaagttggaagggcatcatgacctcttggcctctcctttgattctcaatcttcccccaaagcatggtttggtgccagccccttcacctccttccagagcccaagatcaatgctcaagttttggaggacatgatcaccatccccatggtactgatgcttgctggatttagggagggcattttgctaccaagcctcttcccaacgccctggggaccagtcttctgttttgtttttcattgtttgacgtttccactgcatgccttgacttcccccacctcctcctcaaacaagagactccactgcatgttccaagacagtatggggtggtaagataaggaagggaagtgtgtggatgtggatggtgggggcatggacaaagcttgacacatcaagttatcaaggccttggaggaggctctgtatgtcctcaggggactgacaacatcctccagattccagccataaaccaataactaggctggacccttcccactacataatagggctcagcccaggcagccagctttgggctgagctaacaggaccaatggattaaactggcatttcagtccaaggaagctcgaagcaggtttaggaccaggtccccttgagaggtcagaggggcctctgtgggtgctgggtactccagaggtgccactggtggaagggtcagcggagccccagcaggaagggtgggccagccaggccattcttagtccctgggttggggaggcagggagctagggcagggaccaaatgaacagaaagtctcagcccaggatggggcttcttcaacagggcccctgccctcctgaagcctcagtccttcaccttgccaggtgccgtttctcttccgtgaaggccactgcccaggtccccagtgcgccccctagtggccatagcctggttaaagttccccagtgcctccttgtgcatagaccttcttctcccacccccttctgcccctgggtccccggccatccagcggggctgccagagaaccccagacctgcccttacagtagtgtagcgccccctccctctttcggctggtgtagaatagccagtagtgtagtgcggtgtgcttttacgtgatggcgggtgggcagcgggcggcgggctccgcgcagccgtctgtccttgatctgcccgcggcggcccgtgttgtgttttgtgctgtgtccacgcgctaaggcgaccccctcccccgtactgacttctcctataagcgcttctcttcgcatagtcacgtagctcccaccccaccctcttcctgtgtctcacgcaagttttatactctaatatttatatggctttttttcttcgacaaaaaaataataaaacgtttcttctgaaaagctg

SEQ ID NO: 140478 - DNA, 2772 bp, Artificial Sequence
  derived and/or modified sequence
atgggcagcggcgccggcgagctgggcagagccgagagactgcccgtgctgttcctgttcctgctgagcctgttctgccccgccctgtgcgagcagatcagatacagaatccccgaggagatgcccaagggcagcgtggtgggcaacctggccaccgacctgggcttcagcgtgcaggagctgcccaccagaaagctgagagtgagcagcgagaagccctacttcaccgtgagcgccgagagcggcgagctgctggtgagcagcagactggacagagaggagatctgcggcaagaagcccgcctgcgccctggagttcgaggccgtggccgagaaccccctgaacttctaccacgtgaacgtggagatcgaggacatcaacgaccacacccccaagttcacccagaacagcttcgagctgcagatcagcgagagcgcccagcccggcaccagattcatcctgggcagcgcccacgacgccgacatcggcagcaacaccctgcagaactaccagctgagccccagcgaccacttcagcctgatcaacaaggagaagagcgacggcagcaagtaccccgagatggtgctgaagacccccctggacagagagaagcagaagagctaccacctgaccctgaccgccctggacttcggcgccccccccctgagcagcaccgcccagatccacgtgctggtgaccgacgccaacgacaacgcccccgtgttcagccaggacgtgtacagagtgagcctgagcgagaacgtgtaccccggcaccaccgtgctgcaggtgaccgccaccgaccaggacgagggcgtgaacgccgagatcaccttcagcttcagcgaggccagccagatcacccagttcgacctgaacagcaacaccggcgagatcaccgtgctgaacaccctggacttcgaggaggtgaaggagtacagcatcgtgctggaggccagagacggcggcggcatgatcgcccagtgcaccgtggaggtggaggtgatcgacgagaacgacaacgcccccgaggtgatcttccagagcctgcccaacctgatcatggaggacgccgagctgggcacccacatcgccctgctgaaggtgagagacaaggacagcagacacaacggcgaggtgacctgcaagctggagggcgacgtgcccttcaagatcctgaccagcagcagaaacacctacaagctggtgaccgacgccgtgctggacagagagcagaaccccgagtacaacatcaccgtgaccgccaccgacagaggcaagccccccctgagcagcagcagcagcatcaccctgcacatcggcgacgtgaacgacaacgcccccgtgttcagccagagcagctacatcgtgcacgtggccgagaacaacccccccggcgccagcatcagccaggtgagagccagcgaccccgacctgggccccaacggccaggtgagctactgcatcatggccagcgacctggagcagagagagctgagcagctacgtgagcatcagcgccgagagcggcgtggtgttcgcccagagagccttcgaccacgagcagctgagagccttcgagctgaccctgcaggccagagaccagggcagccccgccctgagcgccaacgtgagcctgagagtgctggtggacgacagaaacgacaacgcccccagagtgctgtaccccgccctgggccccgacggcagcgccctgttcgacatggtgccccacgccgccgagcccggctacctggtgaccaaggtggtggccgtggacgccgacagcggccacaacgcctggctgagctaccacgtgctgcaggccagcgagcccggcctgttcagcctgggcctgagaaccggcgaggtgagaaccgccagagccctgggcgacagagacgccgtgagacagagactgctggtggccgtgagagacggcggccagccccccctgagcgccaccgccaccctgcacctggtgttcgccgacagcctgcaggaggtgctgcccgacatcaccgacagacccgaccccagcgacctgcaggccgagctgcagttctacctggtggtggccctggccctgatcagcgtgctgttcctggtggccatgatcctggccatcgccctgagactgagaagaagcagcagccccgccagctggagctgcttccagcccggcctgtgcgtgaagagcgagagcgtggtgccccccaactacagcgagggcaccctgccctacagctacaacctgtgcgtggcccacaccggcaagaccgagttcaacttcctgaagtgcagcgagcagctgagcagcggccaggacatcctgtgcggcgacagcagcggcgccctgttccccctgtgcaacagcagcgagctgaccagccaccagcaggccccccccaacaccgactggagattcagccaggcccagagacccggcaccagcggcagccagaacggcgacgacaccggcacctggcccaacaaccagttcgacaccgagatgctgcaggccatgatcctggccagcgccagcgaggccgccgacggcagcagcaccctgggcggcggcgccggcaccatgggcctgagcgccagatacggcccccagttcaccctgcagcacgtgcccgactacagacagaacgtgtacatccccggcagcaacgccaccctgaccaacgccgccggcaagagagacggcaaggcccccgccggcggcaacggcaacaagaagaagagcggcaagaaggagaagaagtag

SEQ ID NO: 140479 - protein, 3298 aa, Artificial Sequence
  derived and/or modified sequence
MQKELGIVPSCPGMKSPRPHLLLPLLLLLLLLLGAGVPGAWGQAGSLDLQIDEEQPAGTLIGDISAGLPAGTAAPLMYFISAQEGSGVGTDLAIDEHSGVVRTARVLDREQRDRYRFTAVTPDGATVEVTVRVADINDHAPAFPQARAALQVPEHTAFGTRYPLEPARDADAGRLGTQGYALSGDGAGETFRLETRPGPDGTPVPELVVTGELDRENRSHYMLQLEAYDGGSPPRRAQALLDVTLLDINDHAPAFNQSRYHAVVSESLAPGSPVLQVFASDADAGVNGAVTYEINRRQSEGDGPFSIDAHTGLLQLERPLDFEQRRVHELVVQARDGGAHPELGSAFVTVHVRDANDNQPSMTVIFLSADGSPQVSEAAPPGQLVARISVSDPDDGDFAHVNVSLEGGEGHFALSTQDSVIYLVCVARRLDREERDAYNLRVTATDSGSPPLRAEAAFVLHVTDVNDNAPAFDRQLYRPEPLPEVALPGSFVVRVTARDPDQGTNGQVTYSLAPGAHTHWFSIDPTSGIITTAASLDYELEPQPQLIVVATDGGLPPLASSATVSVALQDVNDNEPQFQRTFYNASLPEGTQPGTCFLQVTATDADSGPFGLLSYSLGAGLGSSGSPPFRIDAHSGDVCTTRTLDRDQGPSSFDFTVTAVDGGGLKSMVYVKVFLSDENDNPPQFYPREYAASISAQSPPGTAVLRLRAHDPDQGSHGRLSYHILAGNSPPLFTLDEQSGLLTVAWPLARRANSVVQLEIGAEDGGGLQAEPSARVDISIVPGTPTPPIFEQLQYVFSVPEDVAPGTSVGIVQAHNPPGRLAPVTLSLSGGDPRGLFSLDAVSGLLQTLRPLDRELLGPVLELEVRAGSGVPPAFAVARVRVLLDDVNDNSPAFPAPEDTVLLPPNTAPGTPIYTLRALDPDSGVNSRVTFTLLAGGGGAFTVDPTTGHVRLMRPLGPSGGPAHELELEARDGGSPPRTSHFRLRVVVQDVGTRGLAPRFNSPTYRVDLPSGTTAGTQVLQVQAQAPDGGPITYHLAAEGASSPFGLEPQSGWLWVRAALDREAQELYILKVMAVSGSKAELGQQTGTATVRVSILNQNEHSPRLSEDPTFLAVAENQPPGTSVGRVFATDRDSGPNGRLTYSLQQLSEDSKAFRIHPQTGEVTTLQTLDREQQSSYQLLVQVQDGGSPPRSTTGTVHVAVLDLNDNSPTFLQASGAAGGGLPIQVPDRVPPGTLVTTLQAKDPDEGENGTILYTLTGPGSELFSLHPHSGELLTAAPLIRAERPHYVLTLSAHDQGSPPRSASLQLLVQVLPSARLAEPPPDLAERDPAAPVPVVLTVTAAEGLRPGSLLGSVAAPEPAGVGALTYTLVGGADPEGTFALDAASGRLYLARPLDFEAGPPWRALTVRAEGPGGAGARLLRVQVQVQDENEHAPAFARDPLALALPENPEPGAALYTFRASDADGPGPNSDVRYRLLRQEPPVPALRLDARTGALSAPRGLDRETTPALLLLVEATDRPANASRRRAARVSARVFVTDENDNAPVFASPSRVRLPEDQPPGPAALHVVARDPDLGEAARVSYRLASGGDGHFRLHSSTGALSVVRPLDREQRAEHVLTVVASDHGSPPRSATQVLTVSVADVNDEAPTFQQQEYSVLLRENNPPGTSLLTLRATDPDVGANGQVTYGGVSSESFSLDPDTGVLTTLRALDREEQEEINLTVYAQDRGSPPQLTHVTVRVAVEDENDHAPTFGSAHLSLEVPEGQDPQTLTMLRASDPDVGANGQLQYRILDGDPSGAFVLDLASGEFGTMRPLDREVEPAFQLRIEARDGGQPALSATLLLTVTVLDANDHAPAFPVPAYSVEVPEDVPAGTLLLQLQAHDPDAGANGHVTYYLGAGTAGAFLLEPSSGELRTAAALDREQCPSYTFSVSAVDGAAAGPLSTTVSVTITVRDVNDHAPTFPTSPLRLRLPRPGPSFSTPTLALATLRAEDRDAGANASILYRLAGTPPPGTTVDSYTGEIRVARSPVALGPRDRVLFIVATDLGRPARSATGVIIVGLQGEAERGPRFPRASSEATIRENAPPGTPIVSPRAVHAGGTNGPITYSILSGNEKGTFSIQPSTGAITVRSAEGLDFEVSPRLRLVLQAESGGAFAFTVLTLTLQDANDNAPRFLRPHYVAFLPESRPLEGPLLQVEADDLDQGSGGQISYSLAASQPARGLFHVDPTTGTITTTAILDREIWAETRLVLMATDRGSPALVGSATLTVMVIDTNDNRPTIPQPWELRVSEDALLGSEIAQVTGNDVDSGPVLWYVLSPSGPQDPFSVGRYGGRVSLTGPLDFEQCDRYQLQLLAHDGPHEGRANLTVLVEDVNDNAPAFSQSLYQVMLLEHTPPGSAILSVSATDRDSGANGHISYHLASPADGFSVDPNNGTLFTIVGTVALGHDGSGAVDVVLEARDHGAPGRAARATVHVQLQDQNDHAPSFTLSHYRVAVTEDLPPGSTLLTLEATDADGSRSHAAVDYSIISGNWGRVFQLEPRLAEAGESAGPGPRALGCLVLLEPLDFESLTQYNLTVAAADRGQPPQSSVVPVTVTVLDVNDNPPVFTRASYRVTVPEDTPVGAELLHVEASDADPGPHGLVRFTVSSGDPSGLFELDESSGTLRLAHALDCETQARHQLVVQAADPAGAHFALAPVTIEVQDVNDHGPAFPLNLLSTSVAENQPPGTLVTTLHAIDGDAGAFGRLRYSLLEAGPGPEGREAFALNSSTGELRARVPFDYEHTESFRLLVGAADAGNLSASVTVSVLVTGEDEYDPVFLAPAFHFQVPEGARRGHSLGHVQATDEDGGADGLVLYSLATSSPYFGINQTTGALYLRVDSRAPGSGTATSGGGGRTRREAPRELRLEVIARGPLPGSRSATVPVTVDITHTALGLAPDLNLLLVGAVAASLGVVVVLALAALVLGLVRARSRKAEAAPGPMSQAAPLASDSLQKLGREPPSPPPSEHLYHQTLPSYGGPGAGGPYPRGGSLDPSHSSGRGSAEAAEDDEIRMINEFPRVASVASSLAARGPDSGIQQDADGLSDTSCEPPAPDTWYKGRKAGLLLPGAGATLYREEGPPATATAFLGGCGLSPAPTGDYGFPADGKPCVAGALTAIVAGEEELRGSYNWDYLLSWCPQFQPLASVFTEIARLKDEARPCPPAPRIDPPPLITAVAHPGAKSVPPKPANTAAARAIFPPASHRSPISHEGSLSSAAMSPSFSPSLSPLAARSPVVSPFGVAQGPSASALSAESGLEPPDDTELHI

SEQ ID NO: 140480 - DNA, 9897 bp, Artificial Sequence
  derived and/or modified sequence
atgcagaaggagctgggcatcgtgcccagctgccccggcatgaagagccccagaccccacctgctgctgcccctgctgctgctgctgctgctgctgctgggcgccggcgtgcccggcgcctggggccaggccggcagcctggacctgcagatcgacgaggagcagcccgccggcaccctgatcggcgacatcagcgccggcctgcccgccggcaccgccgcccccctgatgtacttcatcagcgcccaggagggcagcggcgtgggcaccgacctggccatcgacgagcacagcggcgtggtgagaaccgccagagtgctggacagagagcagagagacagatacagattcaccgccgtgacccccgacggcgccaccgtggaggtgaccgtgagagtggccgacatcaacgaccacgcccccgccttcccccaggccagagccgccctgcaggtgcccgagcacaccgccttcggcaccagataccccctggagcccgccagagacgccgacgccggcagactgggcacccagggctacgccctgagcggcgacggcgccggcgagaccttcagactggagaccagacccggccccgacggcacccccgtgcccgagctggtggtgaccggcgagctggacagagagaacagaagccactacatgctgcagctggaggcctacgacggcggcagcccccccagaagagcccaggccctgctggacgtgaccctgctggacatcaacgaccacgcccccgccttcaaccagagcagataccacgccgtggtgagcgagagcctggcccccggcagccccgtgctgcaggtgttcgccagcgacgccgacgccggcgtgaacggcgccgtgacctacgagatcaacagaagacagagcgagggcgacggccccttcagcatcgacgcccacaccggcctgctgcagctggagagacccctggacttcgagcagagaagagtgcacgagctggtggtgcaggccagagacggcggcgcccaccccgagctgggcagcgccttcgtgaccgtgcacgtgagagacgccaacgacaaccagcccagcatgaccgtgatcttcctgagcgccgacggcagcccccaggtgagcgaggccgccccccccggccagctggtggccagaatcagcgtgagcgaccccgacgacggcgacttcgcccacgtgaacgtgagcctggagggcggcgagggccacttcgccctgagcacccaggacagcgtgatctacctggtgtgcgtggccagaagactggacagagaggagagagacgcctacaacctgagagtgaccgccaccgacagcggcagcccccccctgagagccgaggccgccttcgtgctgcacgtgaccgacgtgaacgacaacgcccccgccttcgacagacagctgtacagacccgagcccctgcccgaggtggccctgcccggcagcttcgtggtgagagtgaccgccagagaccccgaccagggcaccaacggccaggtgacctacagcctggcccccggcgcccacacccactggttcagcatcgaccccaccagcggcatcatcaccaccgccgccagcctggactacgagctggagccccagccccagctgatcgtggtggccaccgacggcggcctgccccccctggccagcagcgccaccgtgagcgtggccctgcaggacgtgaacgacaacgagccccagttccagagaaccttctacaacgccagcctgcccgagggcacccagcccggcacctgcttcctgcaggtgaccgccaccgacgccgacagcggccccttcggcctgctgagctacagcctgggcgccggcctgggcagcagcggcagcccccccttcagaatcgacgcccacagcggcgacgtgtgcaccaccagaaccctggacagagaccagggccccagcagcttcgacttcaccgtgaccgccgtggacggcggcggcctgaagagcatggtgtacgtgaaggtgttcctgagcgacgagaacgacaaccccccccagttctaccccagagagtacgccgccagcatcagcgcccagagcccccccggcaccgccgtgctgagactgagagcccacgaccccgaccagggcagccacggcagactgagctaccacatcctggccggcaacagcccccccctgttcaccctggacgagcagagcggcctgctgaccgtggcctggcccctggccagaagagccaacagcgtggtgcagctggagatcggcgccgaggacggcggcggcctgcaggccgagcccagcgccagagtggacatcagcatcgtgcccggcacccccaccccccccatcttcgagcagctgcagtacgtgttcagcgtgcccgaggacgtggcccccggcaccagcgtgggcatcgtgcaggcccacaacccccccggcagactggcccccgtgaccctgagcctgagcggcggcgaccccagaggcctgttcagcctggacgccgtgagcggcctgctgcagaccctgagacccctggacagagagctgctgggccccgtgctggagctggaggtgagagccggcagcggcgtgccccccgccttcgccgtggccagagtgagagtgctgctggacgacgtgaacgacaacagccccgccttccccgcccccgaggacaccgtgctgctgccccccaacaccgcccccggcacccccatctacaccctgagagccctggaccccgacagcggcgtgaacagcagagtgaccttcaccctgctggccggcggcggcggcgccttcaccgtggaccccaccaccggccacgtgagactgatgagacccctgggccccagcggcggccccgcccacgagctggagctggaggccagagacggcggcagcccccccagaaccagccacttcagactgagagtggtggtgcaggacgtgggcaccagaggcctggcccccagattcaacagccccacctacagagtggacctgcccagcggcaccaccgccggcacccaggtgctgcaggtgcaggcccaggcccccgacggcggccccatcacctaccacctggccgccgagggcgccagcagccccttcggcctggagccccagagcggctggctgtgggtgagagccgccctggacagagaggcccaggagctgtacatcctgaaggtgatggccgtgagcggcagcaaggccgagctgggccagcagaccggcaccgccaccgtgagagtgagcatcctgaaccagaacgagcacagccccagactgagcgaggaccccaccttcctggccgtggccgagaaccagccccccggcaccagcgtgggcagagtgttcgccaccgacagagacagcggccccaacggcagactgacctacagcctgcagcagctgagcgaggacagcaaggccttcagaatccacccccagaccggcgaggtgaccaccctgcagaccctggacagagagcagcagagcagctaccagctgctggtgcaggtgcaggacggcggcagcccccccagaagcaccaccggcaccgtgcacgtggccgtgctggacctgaacgacaacagccccaccttcctgcaggccagcggcgccgccggcggcggcctgcccatccaggtgcccgacagagtgccccccggcaccctggtgaccaccctgcaggccaaggaccccgacgagggcgagaacggcaccatcctgtacaccctgaccggccccggcagcgagctgttcagcctgcacccccacagcggcgagctgctgaccgccgcccccctgatcagagccgagagaccccactacgtgctgaccctgagcgcccacgaccagggcagcccccccagaagcgccagcctgcagctgctggtgcaggtgctgcccagcgccagactggccgagcccccccccgacctggccgagagagaccccgccgcccccgtgcccgtggtgctgaccgtgaccgccgccgagggcctgagacccggcagcctgctgggcagcgtggccgcccccgagcccgccggcgtgggcgccctgacctacaccctggtgggcggcgccgaccccgagggcaccttcgccctggacgccgccagcggcagactgtacctggccagacccctggacttcgaggccggccccccctggagagccctgaccgtgagagccgagggccccggcggcgccggcgccagactgctgagagtgcaggtgcaggtgcaggacgagaacgagcacgcccccgccttcgccagagaccccctggccctggccctgcccgagaaccccgagcccggcgccgccctgtacaccttcagagccagcgacgccgacggccccggccccaacagcgacgtgagatacagactgctgagacaggagccccccgtgcccgccctgagactggacgccagaaccggcgccctgagcgcccccagaggcctggacagagagaccacccccgccctgctgctgctggtggaggccaccgacagacccgccaacgccagcagaagaagagccgccagagtgagcgccagagtgttcgtgaccgacgagaacgacaacgcccccgtgttcgccagccccagcagagtgagactgcccgaggaccagccccccggccccgccgccctgcacgtggtggccagagaccccgacctgggcgaggccgccagagtgagctacagactggccagcggcggcgacggccacttcagactgcacagcagcaccggcgccctgagcgtggtgagacccctggacagagagcagagagccgagcacgtgctgaccgtggtggccagcgaccacggcagcccccccagaagcgccacccaggtgctgaccgtgagcgtggccgacgtgaacgacgaggcccccaccttccagcagcaggagtacagcgtgctgctgagagagaacaacccccccggcaccagcctgctgaccctgagagccaccgaccccgacgtgggcgccaacggccaggtgacctacggcggcgtgagcagcgagagcttcagcctggaccccgacaccggcgtgctgaccaccctgagagccctggacagagaggagcaggaggagatcaacctgaccgtgtacgcccaggacagaggcagccccccccagctgacccacgtgaccgtgagagtggccgtggaggacgagaacgaccacgcccccaccttcggcagcgcccacctgagcctggaggtgcccgagggccaggacccccagaccctgaccatgctgagagccagcgaccccgacgtgggcgccaacggccagctgcagtacagaatcctggacggcgaccccagcggcgccttcgtgctggacctggccagcggcgagttcggcaccatgagacccctggacagagaggtggagcccgccttccagctgagaatcgaggccagagacggcggccagcccgccctgagcgccaccctgctgctgaccgtgaccgtgctggacgccaacgaccacgcccccgccttccccgtgcccgcctacagcgtggaggtgcccgaggacgtgcccgccggcaccctgctgctgcagctgcaggcccacgaccccgacgccggcgccaacggccacgtgacctactacctgggcgccggcaccgccggcgccttcctgctggagcccagcagcggcgagctgagaaccgccgccgccctggacagagagcagtgccccagctacaccttcagcgtgagcgccgtggacggcgccgccgccggccccctgagcaccaccgtgagcgtgaccatcaccgtgagagacgtgaacgaccacgcccccaccttccccaccagccccctgagactgagactgcccagacccggccccagcttcagcacccccaccctggccctggccaccctgagagccgaggacagagacgccggcgccaacgccagcatcctgtacagactggccggcacccccccccccggcaccaccgtggacagctacaccggcgagatcagagtggccagaagccccgtggccctgggccccagagacagagtgctgttcatcgtggccaccgacctgggcagacccgccagaagcgccaccggcgtgatcatcgtgggcctgcagggcgaggccgagagaggccccagattccccagagccagcagcgaggccaccatcagagagaacgccccccccggcacccccatcgtgagccccagagccgtgcacgccggcggcaccaacggccccatcacctacagcatcctgagcggcaacgagaagggcaccttcagcatccagcccagcaccggcgccatcaccgtgagaagcgccgagggcctggacttcgaggtgagccccagactgagactggtgctgcaggccgagagcggcggcgccttcgccttcaccgtgctgaccctgaccctgcaggacgccaacgacaacgcccccagattcctgagaccccactacgtggccttcctgcccgagagcagacccctggagggccccctgctgcaggtggaggccgacgacctggaccagggcagcggcggccagatcagctacagcctggccgccagccagcccgccagaggcctgttccacgtggaccccaccaccggcaccatcaccaccaccgccatcctggacagagagatctgggccgagaccagactggtgctgatggccaccgacagaggcagccccgccctggtgggcagcgccaccctgaccgtgatggtgatcgacaccaacgacaacagacccaccatcccccagccctgggagctgagagtgagcgaggacgccctgctgggcagcgagatcgcccaggtgaccggcaacgacgtggacagcggccccgtgctgtggtacgtgctgagccccagcggcccccaggaccccttcagcgtgggcagatacggcggcagagtgagcctgaccggccccctggacttcgagcagtgcgacagataccagctgcagctgctggcccacgacggcccccacgagggcagagccaacctgaccgtgctggtggaggacgtgaacgacaacgcccccgccttcagccagagcctgtaccaggtgatgctgctggagcacaccccccccggcagcgccatcctgagcgtgagcgccaccgacagagacagcggcgccaacggccacatcagctaccacctggccagccccgccgacggcttcagcgtggaccccaacaacggcaccctgttcaccatcgtgggcaccgtggccctgggccacgacggcagcggcgccgtggacgtggtgctggaggccagagaccacggcgcccccggcagagccgccagagccaccgtgcacgtgcagctgcaggaccagaacgaccacgcccccagcttcaccctgagccactacagagtggccgtgaccgaggacctgccccccggcagcaccctgctgaccctggaggccaccgacgccgacggcagcagaagccacgccgccgtggactacagcatcatcagcggcaactggggcagagtgttccagctggagcccagactggccgaggccggcgagagcgccggccccggccccagagccctgggctgcctggtgctgctggagcccctggacttcgagagcctgacccagtacaacctgaccgtggccgccgccgacagaggccagcccccccagagcagcgtggtgcccgtgaccgtgaccgtgctggacgtgaacgacaacccccccgtgttcaccagagccagctacagagtgaccgtgcccgaggacacccccgtgggcgccgagctgctgcacgtggaggccagcgacgccgaccccggcccccacggcctggtgagattcaccgtgagcagcggcgaccccagcggcctgttcgagctggacgagagcagcggcaccctgagactggcccacgccctggactgcgagacccaggccagacaccagctggtggtgcaggccgccgaccccgccggcgcccacttcgccctggcccccgtgaccatcgaggtgcaggacgtgaacgaccacggccccgccttccccctgaacctgctgagcaccagcgtggccgagaaccagccccccggcaccctggtgaccaccctgcacgccatcgacggcgacgccggcgccttcggcagactgagatacagcctgctggaggccggccccggccccgagggcagagaggccttcgccctgaacagcagcaccggcgagctgagagccagagtgcccttcgactacgagcacaccgagagcttcagactgctggtgggcgccgccgacgccggcaacctgagcgccagcgtgaccgtgagcgtgctggtgaccggcgaggacgagtacgaccccgtgttcctggcccccgccttccacttccaggtgcccgagggcgccagaagaggccacagcctgggccacgtgcaggccaccgacgaggacggcggcgccgacggcctggtgctgtacagcctggccaccagcagcccctacttcggcatcaaccagaccaccggcgccctgtacctgagagtggacagcagagcccccggcagcggcaccgccaccagcggcggcggcggcagaaccagaagagaggcccccagagagctgagactggaggtgatcgccagaggccccctgcccggcagcagaagcgccaccgtgcccgtgaccgtggacatcacccacaccgccctgggcctggcccccgacctgaacctgctgctggtgggcgccgtggccgccagcctgggcgtggtggtggtgctggccctggccgccctggtgctgggcctggtgagagccagaagcagaaaggccgaggccgcccccggccccatgagccaggccgcccccctggccagcgacagcctgcagaagctgggcagagagccccccagccccccccccagcgagcacctgtaccaccagaccctgcccagctacggcggccccggcgccggcggcccctaccccagaggcggcagcctggaccccagccacagcagcggcagaggcagcgccgaggccgccgaggacgacgagatcagaatgatcaacgagttccccagagtggccagcgtggccagcagcctggccgccagaggccccgacagcggcatccagcaggacgccgacggcctgagcgacaccagctgcgagccccccgcccccgacacctggtacaagggcagaaaggccggcctgctgctgcccggcgccggcgccaccctgtacagagaggagggcccccccgccaccgccaccgccttcctgggcggctgcggcctgagccccgcccccaccggcgactacggcttccccgccgacggcaagccctgcgtggccggcgccctgaccgccatcgtggccggcgaggaggagctgagaggcagctacaactgggactacctgctgagctggtgcccccagttccagcccctggccagcgtgttcaccgagatcgccagactgaaggacgaggccagaccctgcccccccgcccccagaatcgaccccccccccctgatcaccgccgtggcccaccccggcgccaagagcgtgccccccaagcccgccaacaccgccgccgccagagccatcttcccccccgccagccacagaagccccatcagccacgagggcagcctgagcagcgccgccatgagccccagcttcagccccagcctgagccccctggccgccagaagccccgtggtgagccccttcggcgtggcccagggccccagcgccagcgccctgagcgccgagagcggcctggagccccccgacgacaccgagctgcacatctag

SEQ ID NO: 140481 - DNA, 10763 bp, Artificial Sequence
  derived and/or modified sequence
gcggagggcggggggaggggaggggagggggcgcggggccgcggcagcggagctcgcatcctcggcggggcggctgtgcaggaggcggcgcccgggcgtcagcggacggaccgatcgacggccaagggcgcgcggaccgacggcggctgcccggaggggatcgcgggcctcggagacagcgactgcggacgatgcgcggcctcaggccccgcgcgagcgggcgctgcccggggggctgaccgcggccggacggcgccccagcaccgggcgagggagcccgcgtcgcgcggaggtcagggagcctgagctggagccagggccccagtgggacctgacccaaagtctgaggtcaagctgggcccagagcctggcctggagctggagcccaaggcacagctggactacccttgtcatgcagaaggagctgggcattgtgccttcctgccctggcatgaagagccccaggccccacctcctgctaccattgctgctgctgctgctgctgctgctgggggctggggtgccaggtgcctggggtcaggctgggagcctggacttgcagattgatgaggagcagccagcgggtacactgattggcgacatcagtgcggggcttccggcaggcacggcagctcctctcatgtacttcatctctgcccaagagggcagcggcgtgggcacagacctggccattgacgaacacagtggggtcgtccgtacagcccgtgtcttggaccgtgagcagcgggaccgctaccgcttcactgcagtcactcctgatggtgccaccgtagaagttacagtgcgagtggctgacatcaacgaccatgctccagccttcccacaggctcgggctgccctgcaggtacctgagcatacagcttttggcacccgctacccactggagcctgctcgtgatgcagatgctgggcgtctgggaacccagggctatgcgctatctggtgatggggctggagagaccttccggctggagacacgccccggtccagatgggactccagtacctgagctggtagttactggggaactggaccgagagaaccgctcacactatatgctacagctggaggcctatgatggtggttcacccccccggagggcccaggccctgctggacgtgacactgctggacatcaatgaccatgccccggctttcaatcagagccgctaccatgctgtggtgtctgagagcctggcccctggcagtcctgtcttgcaggtgttcgcatctgatgccgatgctggtgtcaatggggctgtgacttacgagatcaaccggaggcagagcgagggtgatggacccttctccatcgacgcacacacggggctgctgcagttagagcggccactggactttgagcagcggcgggtccatgaactggtggtgcaagcacgagatggtggggctcaccctgagctgggctcggcctttgtgactgtgcatgtgcgagatgccaatgacaatcagccctccatgactgtcatctttctcagtgcagatggctccccccaagtgtctgaggccgccccacctggacagctcgttgctcgcatctctgtgtcagacccagatgatggtgactttgcccatgtcaatgtgtccctggaaggtggagagggccactttgccctaagcacccaagacagcgtcatctatctggtgtgtgtggctcggcggctggatcgagaggagagggatgcctataacttgagggttacagccacagactcaggctcacctccactgcgggctgaggctgcctttgtgctgcacgtcactgatgtcaacgacaatgcacctgcctttgaccgccagctctaccgacctgagcccctgcctgaggttgcgctgcctggcagctttgtagtgcgggtgactgctcgggatcctgaccaaggcaccaatggtcaggtcacttatagcctagcccctggcgcccacacccactggttctccattgaccccacctcaggcattatcactacggctgcctcactggactatgagttggaacctcagccacagctgattgtggtggccacagatggtggcctgccccctctagcctcctctgccacagttagcgtggccctgcaagatgtgaatgataatgagccccaattccagaggactttctacaatgcctcactgcctgagggcacccagcctggaacttgcttcctgcaggtgacagccacagacgcggatagtggcccatttggcctcctctcctattccttgggtgctggacttgggtcctccggatctcccccattccgcattgatgcccacagcggtgatgtgtgcacaacccggaccctggaccgtgaccaggggccctcaagctttgacttcacagtgacagctgtggatgggggaggcctcaagtccatggtatatgtgaaggtgtttctgtcagacgagaatgacaaccctcctcagttttatccacgggagtatgctgccagtataagtgcccagagtccaccaggcacagctgtgctgaggttgcgtgcccatgaccctgaccagggatcccatgggcgactctcctaccatatcctggctggcaacagccccccactttttaccttggatgagcaatcagggctgttgacagtagcctggcccttggccagacgggccaattctgtggtgcagctggagatcggggctgaggacggaggtggcctacaggcagaacccagtgcccgagtggacatcagcattgtgcctggaacccccacaccacccatatttgagcaactacagtatgttttttctgtgccagaggatgtggcaccaggcaccagtgtgggcatagtccaggcacacaacccaccaggtcgcttggcacctgtgaccctttccctatcaggtggggatccccgaggactcttctccctagatgcggtatcaggactgttgcaaacacttcgccctctggaccgggagctactgggaccagtgttggagctggaggtgcgagcaggcagtggagtgcccccagctttcgctgtagctcgggtgcgtgtgctgctggatgatgtgaatgacaactcccctgcctttcctgcacctgaagacacggtattgctaccaccaaacactgccccagggactcccatctatacactgcgggctcttgaccccgactcaggtgttaacagtcgagtcacctttaccctgcttgctgggggtggtggagccttcaccgtggaccccaccacaggccatgtacggcttatgaggcctctggggccctcaggagggccagcccatgagctggagctggaggcccgggatgggggctccccaccacgcaccagccactttcgactacgggtggtggtacaggatgtgggaacccgtgggctggctccccgattcaacagccctacctaccgtgtggacctgccctcaggcaccactgctggaactcaggtcctgcaagtgcaggcccaagcaccagatgggggccctatcacctatcaccttgcagcagagggagcaagtagcccctttggcctggagccacagagtgggtggctatgggtgcgggcagcactagaccgtgaggcccaggaattgtacatactgaaggtaatggcagtgtctgggtccaaagctgagttggggcagcagacaggcacagccaccgtgagggtcagcatcctcaaccagaatgaacacagtccccgcttgtctgaggatcccaccttcctggctgtggctgagaaccagcccccagggaccagcgtgggccgagtctttgccactgaccgagactcaggacccaatggacgtctgacctacagcctgcaacagctgtctgaagacagcaaggccttccgcatccacccccagactggagaagtgaccacactccaaaccctggaccgtgagcagcagagcagctatcagctcctggtgcaggtgcaggatggagggagcccaccccgcagcaccacaggcactgtgcatgttgcagtgcttgacctcaacgacaacagccccacgttcctgcaggcttcaggagctgctggtgggggcctccctatacaggtaccagaccgcgtgcctccgggaacactggtgacgactctgcaggcgaaggatccagatgagggggagaatgggaccatcttgtacacgctaactggtcctggctcagagcttttctctctgcaccctcactcaggggagctgctcactgcagctcccctgatccgagcagagcggccccactatgtgctgacactgagtgctcatgaccaaggcagccctcctcgaagtgccagcctccagctgctggtgcaggtgcttccctcagctcgcttggccgagccgcccccagatctcgcagagcgggacccagcggcaccagtgcctgtcgtgctgacggtgacagcagctgagggactgcggcccggctctctgttgggctcggtggcagcgccagagcccgcgggtgtgggtgcactcacctacacactggtgggcggtgccgatcccgagggcaccttcgcgctggatgcggcctcagggcgcttgtacctggcgcggcccctggacttcgaagctggcccgccgtggcgcgcgcttacggtacgcgctgaggggccgggaggcgcgggcgcgcggctgctgcgagtgcaggtgcaagtgcaggacgagaatgagcatgcgcccgcctttgcgcgcgacccgctggcgctggcgctgccagagaacccggagcccggcgcagcgctgtacactttccgcgcgtcggacgccgacggccccggccccaatagcgacgtgcgctaccgcctgctgcgccaggagccgcccgtgccggcgcttcgcctggacgcgcgcaccggggcgctcagcgctccgcgcggcctggaccgagagaccactcccgcgctgctgctgctggtggaagccaccgaccggcccgccaacgccagccgccgtcgtgcagcgcgcgtttcagcgcgcgtcttcgtcacggatgagaatgacaacgcgcctgtcttcgcctcgccgtcacgcgtgcgcctcccagaggaccagccgcctgggcccgcggccctgcacgtggtagcccgggacccggatctgggcgaggctgcacgcgtgtcctatcggctggcatctggcggggacggccacttccggctgcactcaagcactggagcgctgtccgtggtgcggccgttggaccgcgaacaacgagctgagcacgtactgacagtggtggcctcagaccacggctccccgccgcgctcggccacgcaggtcctgaccgtcagtgtcgctgacgtcaacgacgaggcgcctactttccagcagcaggagtacagcgtcctcttgcgtgagaacaaccctcctggcacatctctgctcaccctgcgagcaaccgaccccgacgtgggggccaacgggcaagtgacttatggaggcgtctctagcgaaagcttttctctggatcctgacactggtgttctcacgactcttcgggccctggatcgagaggaacaggaggagatcaacctgacagtgtatgcccaggacaggggctcacctcctcagttaacgcatgtcactgttcgagtggctgtggaggatgagaatgaccatgcaccaacctttgggagtgcccatctctctctggaggtgcctgagggccaggacccccagacccttaccatgcttcgggcctctgatccagatgtgggagccaatgggcagttgcagtaccgcatcctagatggggacccatcaggagcctttgtcctagaccttgcttctggagagtttggcaccatgcggccactagacagagaagtggagccagctttccagctgaggatagaggcccgggatggaggccagccagctctcagtgccacgctgcttttgacagtgacagtgctggatgccaatgaccatgctccagcctttcctgtgcctgcctactcggtggaggtgccggaggatgtgcctgcagggaccctgctgctgcagctacaggctcatgaccctgatgctggagctaatggccatgtgacctactacctgggcgccggtacagcaggagccttcctgctggagcccagctctggagaactgcgcacagctgcagccttggacagagaacagtgtcccagctacaccttttctgtgagtgcagtggatggtgcagctgctgggcccctaagcaccacagtgtctgtcaccatcacggtgcgcgatgtcaatgaccatgcacccaccttccccaccagtcctctgcgcctacgtctgccccgcccaggccccagcttcagtaccccaaccctggctctggccacactgagagctgaagatcgtgatgctggtgccaatgcttccattctgtaccggctggcaggcacaccacctcctggcactactgtggactcttacactggtgaaatccgcgtggcccgctctcctgtagctctaggcccccgagatcgtgtcctcttcattgtggccactgatcttggccgtccagctcgctctgccactggtgtgatcattgttggactgcagggggaagctgagcgtggaccccgctttccccgggctagcagtgaggctacgattcgtgagaatgcgcccccagggactcctattgtctcccccagggccgtccatgcaggaggcacaaatggacccatcacctacagcattctcagtgggaatgagaaagggacattctccatccagcctagtacaggtgccatcacagttcgctcagcagaggggctagacttcgaggtgagtccacggctgcgactggtgctgcaggcagagagtggaggagcctttgccttcactgtgctgaccctgaccctgcaagatgccaacgacaatgctccccgtttcctgcggccccattatgtggccttccttcctgagtcccggcccttggaggggcccctgctgcaggtggaggcggatgacctggatcaaggctctggaggacagatttcctacagtctggctgcatcccagccggcacgtggattgttccacgtagacccaaccacaggcactatcactaccacagccatcctggaccgtgagatctgggctgaaacacggttggtgctgatggccacagacagagggagcccagccctggtgggctcagctaccttgacggtgatggtcatcgacaccaatgacaatcgccccaccatcccccaaccctgggagctccgagtgtcagaagatgcgttattgggctcagagattgcacaggtaacagggaatgatgtggactcaggacccgtgctgtggtatgtgctaagcccatctgggccccaggatcccttcagtgttggccgctatggaggccgtgtctccctcacggggcccctggactttgagcagtgtgaccgctaccagctgcagctgctggcacatgatgggcctcatgagggccgtgccaacctcacagtgcttgtggaggatgtcaatgacaatgcacctgccttctcacagagcctctaccaggtaatgctgcttgagcacacacccccaggcagtgccattctctccgtctctgccactgatcgggactcaggtgccaacggtcacatttcctaccacctggcttcccctgccgatggcttcagtgttgaccccaacaatgggaccctgttcacaatagtgggaacagtggccttgggccatgacgggtcaggagcagtggatgtggtgctggaagcacgagaccacggggctccaggccgggcagcacgagccacagtgcacgtgcagctgcaggaccagaacgaccacgccccgagcttcacattgtcacactaccgtgtggctgtgactgaagacctgccccctggctccactctgctcaccctggaggctacagatgctgatggaagccgcagccatgccgctgtggactacagcatcatcagtggcaactggggccgagtcttccagctggaacccaggctggctgaggctggggagagtgctggaccaggcccccgggcactgggctgcctggtgttgcttgaacctctagactttgaaagcctgacacagtacaatctaacagtggctgcagctgaccgtgggcagccaccccaaagctcagtcgtgccagtcactgtcactgtactagatgtcaatgacaacccacctgtctttacccgagcatcctaccgtgtgacagtacctgaggacacacctgttggagctgagctgctgcatgtagaggcctctgacgctgaccctggccctcatggcctcgtgcgtttcactgtcagctcaggcgacccatcagggctctttgagctggatgagagctcaggcaccttgcgactggcccatgccctggactgtgagacccaggctcgacatcagcttgtagtacaggctgctgaccctgctggtgcacactttgctttggcaccagtgacaattgaggtccaggatgtgaatgatcatggcccagccttcccactgaacttactcagcaccagcgtggccgagaatcagcctccaggcactctcgtgaccactctgcatgcaatcgacggggatgctggggcttttgggaggctccgttacagcctgttggaggctgggccaggacctgagggccgtgaggcatttgcactgaacagctcaacaggggagttgcgtgcgcgagtgccctttgactatgagcacacagaaagcttccggctgctggtgggtgctgctgatgctgggaatctctcagcctctgtcactgtgtcggtgctagtgactggagaggatgagtatgaccctgtatttctggcaccagctttccacttccaagtgcccgaaggtgcccggcgtggccacagcttgggtcacgtgcaggccacagatgaggatgggggtgccgatggcctggttctgtattcccttgccacctcttccccctattttggtattaaccagactacaggagccctgtacctgcgggtggacagtcgggcaccaggcagcggaacagccacctctgggggtgggggccggacccggcgggaagcaccacgggagctgaggctggaggtgatagcacgggggcctctgcctggttcccggagtgccacagtgcctgtgaccgtggatatcacccacaccgcactgggcctggcacctgacctcaacctgctattagtaggggccgtggcagcctccttgggagttgtggtggtgcttgcactggcagccctggtcctaggacttgttcgggcccgtagccgcaaggctgaggcagcccctggcccaatgtcacaggcagcacccctagccagtgactcactgcagaaactgggccgggagccacctagtccaccaccctctgagcacctctatcaccagactcttcccagctatggtgggccaggagctggaggaccctacccccgtggtggctccttggacccttcacattcaagtggccgaggatcagcagaggctgcagaggatgatgagatccgcatgatcaatgagttcccccgtgtggccagtgtggcctcctctctggctgcccgtggccctgactcaggcatccagcaggatgcagatggtctgagtgacacatcctgcgaaccacctgcccctgacacctggtataagggccgaaaggcagggctgctgctgccaggtgcaggagccactctctacagagaggaggggcccccagccactgccacagccttcctggggggctgtggcctgagccctgcacccactggggactatggcttcccagcagatggcaagccatgtgtggcaggtgcgctgacagccattgtggccggcgaggaggagctccgtggcagctataactgggactacctgctgagctggtgccctcagttccaaccactggccagtgtcttcacagagatcgctcggctcaaggatgaagctcggccatgtcccccagctccccgtatcgacccaccacccctcatcactgccgtggcccacccaggagccaagtctgtgccccccaagccagcaaacacagctgcagcccgggccatcttcccaccagcttctcaccgctcccccatcagccatgaaggctccctgtcctcagctgccatgtcccccagcttctcaccctctctgtctcctctggctgctcgctcacccgttgtctcaccatttggggtggcccagggtccctcagcctcagcactcagcgcagagtctggcctggagccacctgatgacacggagctgcacatctagctgtggcccaggctgggccccgacctgggatgcgcacagtgtccccaacgcaggccccactctgagcctgccctgggcagcctcggactatgactggctacggggaggccaccaccaggccccagctctccaccctgaactccccagccccctcagagtactaggaccacagaagccctgttgctcactgacctgtgaccaggtccaatgtggggagaaatatgaaggaggtagcagccctgggttctcctcagtgagggatccctgccctgcaccagcaccctgagatggagctgagactttatttattgggggtagggggatggaggaggtccctccaacatgtttggacccagctcctttgggttccactgacacccctgcccctgcccctgcccagaaccaagtgccatttctcactctggagccttaataaactgcaatttgtatccag

SEQ ID NO: 140482 - DNA, 948 bp, Artificial Sequence
  derived and/or modified sequence
cttcctggggggctgtggcctgagccctgcacccactggggactatggcttcccagcagatggcaagccatgtgtggcaggtgcgctgacagccattgtggccggcgaggaggagctccgtggcagctataactgggactacctgctgagctggtgccctcagttccaaccactggccagtgtcttcacagagatcgctcggctcaaggatgaagcgtggcccacccaggagccaagtctgtgccccccaagccagcaaacacagctgcagcccgggccatcttcccaccagcttctcaccgctcccccatcagccatgaaggctccctgtcctcagctgccatgtcccccagcttctcaccctctctgtctcctctggctgctcgctcacccgttgtctcaccatttggggtggcccagggtccctcagcctcagcactcagcgcagagtctggcctggagccacctgatgacacggagctgcacatctagctgtggcccaggctgggccccgacctgggatgcgcacagtgtccccaacgcaggccccactctgagcctgccctgggcagcctcggactatgactggctacggggaggccaccaccaggccccagctctccaccctgaactccccagccccctcagagtactaggaccacagaagccctgttgctcactgacctgtgaccaggtccaatgtggggagaaatatgaaggaggtagcagccctgggttctcctcagtgagggatccctgccctgcaccagcaccctgagatggagctgagactttatttattgggggtagggggatggaggaggtccctccaacatgtttggacccagctcctttgggttccactgacacccctgcccctgcccctgcccagaaccaagtgccatttctcactctggagccttaataaactgcaatttgtatccagtc

SEQ ID NO: 140483 - DNA, 9897 bp, Artificial Sequence
  derived and/or modified sequence
atgcaaaaagagctgggcattgtgcctagctgcccaggcatgaagtctcctagacctcatcttttactccccctcctccttctgttgctcctgctgttaggagctggcgtgccgggtgcgtggggccaggccggcagcctggatctgcagattgatgaggaacagccagctggcacactgatcggagatatctccgcaggcctgccagctggcaccgcagctcctctgatgtattttattagtgctcaggagggttccggggtggggaccgacctcgccattgacgaacattcaggggtggttcgaacagcgagggtcctggatcgggagcagagagacaggtatcgcttcacggccgtgactcccgacggcgcaacagtggaagtcacagtccgcgttgctgatataaatgatcatgctccagcttttccacaagccagggcagctctccaggtcccagagcacacagcattcggcacacgctacccactggaacctgcccgcgacgcagacgcaggacggttgggcacacaagggtacgcgctgtccggcgacggcgctggtgagacattccgtctcgagacacgccctggccccgatggaacgcctgtccccgaactggtggtgacgggcgagcttgaccgagagaaccggagccactacatgctgcaattggaggcttatgacgggggaagccccccacgtcgcgctcaggctctgctcgatgtcacgctgctggacatcaacgatcatgcgccggctttcaatcagtcacgataccacgctgtggtgtcagagtccctggctcccggctcccctgtgcttcaggtttttgcctcagatgccgacgcgggggttaatggcgccgtaacctacgaaattaacaggcgccaatccgaaggggatgggccttttagtatcgacgcacataccggattgctccagcttgagcgccccttagacttcgagcagagacgggtgcacgaactcgttgtgcaagcgcgcgatggcggcgcacaccccgaactcggaagcgccttcgttacagtccatgtcagggacgcaaatgacaaccaacccagtatgaccgttattttcctgagtgccgacgggagtccacaggtgtcggaggccgcccctcccggacaactcgtggctcggatatccgtcagtgatcctgatgatggagactttgcccacgtgaatgtgtcactcgagggcggtgaaggccattttgccctgtccacacaggactcagttatttatctcgtgtgtgtggcccgacgactcgatcgagaggagagagatgcatacaatctgcgtgtcaccgcaactgatagcggatcacccccgctgagggccgaagctgctttcgtcttacatgtgacagacgtgaacgacaacgcacccgcgttcgatcgccaactctatagaccagagccgctacccgaggtagcactccccggctccttcgtggtgagagtaaccgctagggatccagaccagggtacaaatgggcaggttacttatagtctggctcctggggctcatacccattggttttcgatcgaccctacctccggtatcataacgacagccgcgtctttggattacgaactggagccccagccacagctgatagtggtcgctacagatggggggctgccgccgctggccagctcagccaccgtgtccgtcgctctgcaggacgtaaacgataacgaaccccagttccaacggaccttctataacgcgtctctgcctgaaggaacgcagccgggcacctgttttctgcaagtcaccgctacggatgccgactcgggtcctttcggcctgctgtcttattcactgggagccggtctaggttcatctggcagccctcctttcaggattgacgcacatagcggcgacgtttgtacaacccgcacactagatcgcgaccaaggtccctcctccttcgactttacagtgactgctgtggacggcgggggcctcaagtctatggtgtacgtaaaggtattcttatccgatgagaacgacaacccgcctcagttctatcctagagaatacgctgcgtctatttcagcccaatctccacctggcacagccgtgttgcgcctgcgcgcacatgatcctgaccaaggttcccatgggcggctctcctatcatatcctggcgggtaacagcccacctcttttcaccttggacgagcagagtgggctgctaaccgtggcctggcctctcgcccgccgggccaactctgtagtacagctcgagatcggagccgaggacggcggaggcttgcaggccgagccatccgcgagggtcgacatctcaatcgtaccgggcacccctacaccccccatcttcgaacagctccaatacgtcttctctgtccccgaggacgtggctcccggtacatcagtcggaatcgttcaagctcataacccccccggacgtctggcccctgtgactctaagcctgagtggcggggatcctagggggctgttcagtcttgatgctgtctccggtctgttacagactctaaggcccctagaccgagagttgctaggtccggtgctagagctcgaggttcgagccggttcgggcgtcccccctgccttcgctgtggccagggtccgagttctgttagacgatgtgaatgacaattctcccgcgtttcctgccccagaggacactgtgttgttacccccaaataccgcacctggcacccctatctatactctccgagctctggatcccgacagcggtgtcaactcaagagtgacgttcactctgttggcaggcgggggaggtgccttcaccgtagacccgactaccggtcatgtgcggctcatgcgccctttaggcccaagcggcggccctgcacatgaattggagttggaagctagagacggtggatctcccccacgtacatcgcacttccggttgcgggtggtcgtgcaggacgtgggaacacggggcctcgccccacgctttaacagcccaacctaccgcgtggatctccctagcggaactactgcaggtacccaggttctgcaggtccaggcccaagcccctgacggcgggcccataacttaccacttagcagcagaaggggcgtcttcacctttcggcctggagcctcagagcggctggctgtgggtgcgagctgccctggatagggaagcccaggagctgtacatcctcaaagtgatggcagtgagcggttccaaggctgaactagggcagcagactggtacagccaccgtccgggtcagcatcttgaaccagaacgagcactcaccccggctgtcagaagatcctactttcctggccgtggccgaaaatcagccccctggtacatccgtgggtcgggtctttgctactgatcgggatagcggacccaacggaagattgacttatagtctccaacaactgtccgaagatagtaaggcgtttagaatccacccacagacgggtgaggtgacaacattacagaccctggatcgtgagcaacagtcttcctatcagctgctagttcaagttcaagacggagggagcccgcctcggagcacaaccggaacagtgcatgtggccgtgctcgacctcaatgataactcccctacatttttacaagccagcggcgcggccggcggcgggcttccaattcaggtacctgatcgagtgccgcccggcactctggttacgaccttgcaggccaaagaccccgatgaaggagagaacggtaccattctgtataccttgacaggaccaggctccgaactgtttagtttgcacccccacagcggcgagctgctgaccgcagcccccttgatcagggctgaacgcccccattatgttctgacattgtccgcgcatgaccagggatcaccaccacgctccgcgtctctccagcttctagttcaggttctgcccagtgcccgtctcgctgagcctccacctgacttggcagagcgtgatccagcagctcccgttccagtggtactcacagtaacggccgcagagggcttgagacccggaagcctgctgggctcagtcgccgcacccgaaccagctggcgttggggcactgacttacacccttgttggcggcgcagaccccgaaggtacttttgcactggacgctgcctccgggcgtttgtatttagcccgcccactggactttgaagccggaccaccatggagagccctgactgtccgcgccgaaggacctggcggagccggagcgagactcctacgggttcaggtccaggtgcaggacgaaaacgaacacgccccggccttcgctagagatccactggctttagcactgcctgagaatcccgagcctggcgccgccctatacacgttccgcgcgtcggacgctgacgggcctggtcccaattctgatgtcagatatagattgttacgtcaggaaccacccgtacctgctctccggctggacgcaaggacgggggccctgagtgcgcctaggggtttggacagagagactacaccagctctgctgctgcttgtggaggcgacagataggccagcgaatgctagtcggcgcagagcagctcgagtcagcgcccgcgtcttcgtcacggacgagaatgacaacgcacccgtgttcgcttcaccatcaagggtacggctcccagaggaccagccaccaggaccagccgccctgcacgtcgtcgccagagacccagacttgggagaagccgcccgcgttagctatcgactggcctcaggaggcgacgggcacttccgactccacagcagtacaggagccctcagcgtagtgaggccactggacagagaacagcgcgccgaacacgtcttgacagtggtggcctccgatcatggttcccctccaagatctgccacacaagtgctgactgtgtccgtggcggacgtgaacgacgaggcaccaacatttcagcagcaggaatactctgtcctgctgcgcgaaaacaacccaccgggcacttctctgctgacgcttagagctacagacccggacgtgggggctaacggacaggtcacatatggcggggtcagctctgaaagtttctcgctggatccagacactggtgttctgaccacactgagggcccttgatcgcgaggagcaggaggagataaacctaaccgtgtacgctcaggacaggggctccccaccacaattgacccacgtcactgtgcgtgtggcggtggaggacgaaaatgatcacgctcccactttcggatctgcacatctgagcctggaagtacctgagggccaagaccctcagacgctcacgatgttaagggccagtgatcctgacgtcggggcgaatgggcagctgcagtacagaatcctggatggcgaccccagtggcgctttcgtgctggacttagcctctggggaattcggcaccatgcggcccttggatcgggaagttgagcctgcatttcagttgcgcatcgaggctcgcgacgggggacaaccggctctgagcgcaaccctgctactcaccgtcacagtcctggacgcaaatgaccatgcccccgcttttcccgtgccggcatacagcgtcgaggtgcctgaagatgtccccgcagggaccctgctgctgcagcttcaggcgcatgatccagacgcgggtgcgaacgggcatgtgacgtattacctgggagccggaactgctggcgccttcctgttagaaccaagttccggggaattacgaacggcagccgccctcgaccgcgagcagtgccccagctacaccttctccgtgtccgccgtcgacggagccgctgccggcccactatccaccacagtgagcgtgaccattaccgtgagggacgtcaatgatcacgccccaacattccccactagcccgcttcgcttgcgactaccccgcccaggaccgagtttttccacacccactctcgctctcgcgactttacgcgccgaggatcgcgacgcaggcgcgaatgcttccatcctgtatagacttgccggtactccgcccccgggaaccaccgtagatagctacaccggagagattagagtagctcgaagtcctgttgcactggggcctagggatcgggtgcttttcatagtcgcaaccgacctggggagaccagcacgctccgccactggcgtcatcatcgttgggttgcaaggagaagctgaacgaggcccacgattccctagggcctccagtgaggccacaatccgagagaatgcccctccaggaaccccaattgtcagtccaagagccgttcatgctgggggcacgaatggcccaatcacctacagcatcctctccggaaatgagaaggggacgttctctatccagccttctacaggggcaatcaccgtaagatccgccgaggggctggatttcgaagttagccccaggctgcgcctggtgctccaggctgagtcaggcggggcattcgcctttacagtcctgacccttactcttcaagacgccaatgacaacgcacctcggttcctgcgcccgcactacgtagccttcctgccagaaagccgccctctggaggggcctctgctacaggtggaggccgatgatctggaccagggttccggaggacagatctcttatagccttgccgctagtcaaccagccagggggctgttccacgtggacccgaccacagggacgattacgacaaccgctatcttagaccgggaaatttgggcagagacacggctggtccttatggccacagatagggggtcaccagcactcgttgggagcgccacattgacagttatggtgattgacacaaatgataatcgaccaacaatccctcaaccttgggaacttcgggtttctgaagacgccttgcttgggagtgagatcgcccaggtcacagggaacgatgtagactctggccctgttctgtggtacgtcttgagtccgtcaggccctcaggacccattcagcgtcgggcgctacgggggacgggtgtctttaactggacccctcgattttgagcaatgcgacaggtatcagctccagttgctcgcccacgatggaccgcatgaagggagggccaacttgaccgtgctggttgaagacgtgaacgacaatgctcctgcatttagccagtccctctatcaagttatgctcctcgaacatacacctccagggtcggcaatcctttcagtgagcgcaaccgacagggacagcggagcaaacggccacatttcgtaccaccttgcatctccggccgacggattctctgtggatccaaacaacgggacattgtttactattgtgggcacagtggcgctggggcacgacgggagcggcgctgtggacgtggtgctcgaagcacgcgaccatggcgcacccggtcgagccgcgcgggccacggtccacgtgcagctgcaggatcagaacgaccacgcccccagtttcactctgagtcactacagggtggccgtgacagaggacttgcctccgggctctaccctgctcacactggaggctacggatgcagatggatcacggtctcatgccgcagtcgactactctattatctctggcaattggggccgagtgttccagctggaaccaagactcgctgaggcaggcgaaagcgccggacctggccccagagctctgggctgcctggttttgctggaacccctggattttgaaagcttgacgcagtataacctgacggtggctgcagcggaccgcggtcagcctcctcagagcagtgtagtccccgtcacagtgacagtcctggatgttaatgataaccctccagtcttcacgagagctagttacagggtgacagtgcccgaggacacaccagtcggcgctgaactcttacacgtggaagcgagcgacgcagatccaggcccccacggcttagtccgatttactgtgagctcaggagatcccagcggactgttcgagttggatgagtcttccgggacactccggctggcgcacgctctcgattgtgagacccaggctagacaccagctggttgtccaggccgctgaccccgcgggtgcccacttcgccctggcccccgtcaccattgaggtgcaagatgtgaacgatcatggacccgcattccctctgaacctcttatcaaccagcgtggccgagaatcaaccacctggaacactggtgaccaccctgcatgcgatcgatggggacgcgggtgccttcggccgcctgagatactcccttcttgaggccggccccggccccgaaggacgagaagctttcgcactgaactcctctaccggcgaactcagagccagggtcccttttgactatgagcacaccgagagtttccgactgctggtcggagcagccgacgccggaaatttatccgcctcagtcactgtatcagttctcgttacaggcgaggacgagtatgaccctgtgtttctcgcaccggcctttcattttcaagtccccgaaggcgctagacgggggcacagtctcggtcacgttcaagctactgacgaagacggcggcgctgatgggctagtcctgtacagtctggccacgtcctccccatattttggcattaatcagaccacaggcgcactctacttgagggtagactcgagggcccccgggagtgggacggctacctccggcgggggtggcaggacaaggagggaagccccccgggagctgcgcttagaggtgattgccagaggacctttgcccggctcccgaagcgccacagttcctgtcaccgtggacattacacacacagccttagggcttgcccccgatctgaatctgctcctggttggcgccgtggcagcctctctgggggttgttgttgtcctggcattggccgcgcttgtgcttggcctcgtgcgagccagatcccgcaaggccgaagctgcccccggaccaatgtcgcaggccgctccgctggctagcgacagtcttcaaaaactcgggcgggagcccccttctccccccccatctgagcacctctaccatcaaacccttcccagctatggaggcccaggagcaggcggtccttaccctcgtgggggctcgttggacccatcccattcaagtgggagaggtagtgccgaggccgccgaggatgacgaaattaggatgatcaatgaatttcctagggtagccagtgtggcctcctcccttgccgcaagggggcccgattctggtattcaacaggacgcagacgggctaagtgataccagttgtgagccacctgcccctgacacttggtacaaagggcgcaaagccggcctcttattaccaggggctggggcgacactttacagagaggagggtcctccggccacagccaccgccttcctcggcggctgcggtctgtctccagcccctactggcgactacggcttcccagcggacgggaagccttgtgtagcgggcgccttgaccgccattgtcgctggtgaggaggaattacgcgggagttataattgggattatctgctctcttggtgccctcagttccagccattggcatctgtgtttactgaaatagctaggctgaaggacgaggcccggccatgtcctcccgcgcctcggattgatcccccccctttgatcaccgcagtggcccaccctggcgctaagtctgtgcccccaaaaccagcaaacaccgccgctgctagggctatattcccgcccgcctctcatcggtcccctatctctcacgaggggtcactgagctccgcagccatgtctccctcctttagtccatccttatcccctttagctgcccgcagccccgtcgtgtccccatttggcgtcgcccagggaccctccgcttctgccctttccgccgaatccgggttggaaccccccgatgacactgagttgcacatctag

SEQ ID NO: 140484 - DNA, 9897 bp, Artificial Sequence
  derived and/or modified sequence
atgcagaaggagctgggcatcgtgcccagctgccccggcatgaagagcccccggccccacctgctgctgcccctgctgctgctgctgctgctgctgctgggcgccggcgtgcctggggcctggggccaggccggcagcctggacctgcagattgatgaggagcagcctgctggcaccctgattggagacatctctgctggcctgcctgctggaacagctgcccccctgatgtacttcatcagcgcccaggagggcagcggcgtgggcacagacctggccattgatgagcacagcggcgtggtgaggacagcccgggtgctggaccgggagcagagggaccgctaccgcttcaccgctgtgaccccagatggagccaccgtggaggtgacagtgcgggtggccgacatcaatgaccacgccccagccttcccccaggcccgggccgccctgcaggtgcctgagcacacagccttcggcacccgctaccccctggagcccgccagagatgctgatgctggccgcctgggcacccagggctacgccctgtctggagatggagctggggagaccttccggctggagaccaggcctggcccagatggcacccctgtgcctgagctggtggtgactggagagctggaccgggagaacagaagccactacatgctgcagctggaggcctatgatggcggcagccccccaagaagagcccaggccctgctggatgtgaccctgctggacatcaatgaccacgccccagccttcaaccagagccgctaccacgctgtggtgtctgagagcctggcccctggcagccctgtgctgcaggtgtttgccagtgatgctgatgctggggtgaatggagctgtgacctatgagatcaacagacggcagagtgaaggagatggccccttcagcattgatgcccacacaggcctgctgcagctggagcggcccctggactttgagcagaggagagtgcatgagctggtggtgcaggccagagatggaggagcccaccctgagctgggcagcgcctttgtgacagtgcacgtgagagatgccaatgacaaccagcccagcatgaccgtcatcttcctgtctgcagatggcagcccccaggtgtctgaggccgcccctcctggccagctggtggcccgcatctctgtgtctgaccctgatgatggagactttgcccacgtgaatgtgtccctggagggcggggagggccactttgccctgagcacccaggacagcgtcatctacctggtgtgtgtggcccggcggctggaccgggaggagagagatgcctacaacctgcgggtgacagccacagattctggcagcccccccctgcgggcagaggccgcctttgtgctgcacgtgacagatgtgaatgacaatgccccagcctttgaccggcagctgtacagacctgagcccctgcctgaggtggccctgcccggcagctttgtggtgcgggtgacagcccgggaccctgaccagggcaccaacggccaggtgacctacagcctggcccctggggcccacacccactggttcagcattgaccccaccagcggcatcatcaccacagctgccagcctggactatgagctggagccccagccccagctgattgtggtggccacagatggcggcctgccccccctggccagcagcgccaccgtgtctgtggccctgcaggatgtgaatgacaatgagccccagttccagaggaccttctacaatgccagcctgcctgagggcacccagcccggcacctgcttcctgcaggtgacagccacagatgctgacagcggccccttcggcctgctgagctacagcctgggcgccggcctgggcagcagcggcagcccccccttcagaattgatgcccacagcggagatgtgtgcaccaccaggaccctggaccgggaccagggccccagcagctttgacttcaccgtgacagctgtggatggcggcggcctgaagtccatggtgtatgtgaaggtgttcctgagtgatgaaaatgacaaccccccccagttctacccccgggagtatgctgccagcatcagcgcccagagccccccaggcacagctgtgctgcggctgcgggcccatgaccctgaccagggcagccacggccgcctgagctaccacatcctggccggcaacagccccccactcttcaccctggatgagcagagcggcctgctgactgtggcctggcccctggcccggcgggccaacagcgtggtgcagctggagatcggggctgaagatggcggcggcctgcaggccgagcccagcgcccgggtggacatcagcatcgtgcccggcacccccaccccacccatctttgagcagctgcagtatgtgttttctgtgcctgaagatgtggcccctggcacctctgtgggcatcgtgcaggcccacaaccccccaggccgcctggcccctgtgaccctgagcctgtctggaggagacccccggggcctcttcagcctggatgctgtgtctggcctgctgcagaccctgcggcccctggaccgggagctgctgggccctgtgctggagctggaggtgcgggccggcagcggcgtgcccccagcctttgctgtggcccgggtgcgggtgctgctggatgatgtgaatgacaacagccctgccttccctgcccctgaggacacagtgctgctgccccccaacacagcccctggcacccccatctacaccctgcgggccctggaccctgattctggagtgaacagccgggtgaccttcaccctgctggccggcggcggcggggccttcaccgtggaccccaccactggacatgtgcggctgatgaggcccctgggccccagcggcggccctgcccacgagctggagctggaggccagagatggcggcagcccccccaggaccagccacttccggctgcgggtggtggtgcaggatgtgggcacccggggcctggccccccgcttcaacagccccacctacagagtggacctgcccagcggcaccacagctggcacccaggtgctgcaggtgcaggcccaggccccagatggcggccccatcacctaccacctggccgctgagggcgccagcagccccttcggcctggagccccagagcggctggctgtgggtgcgggccgccctggaccgggaggcccaggagctgtacatcctgaaggtgatggctgtgtctggcagcaaggccgagctgggccagcagacaggaacagccaccgtgcgggtgtccatcctgaaccagaatgagcacagcccccggctgtctgaggaccccaccttcctggccgtggccgagaaccagcccccaggcacctctgtgggccgggtgtttgccacagaccgggacagcggccccaacggccgcctgacctacagcctgcagcagctgtctgaggacagcaaggccttccgcatccacccccagacaggagaggtgaccaccctgcagaccctggaccgggagcagcagagcagctaccagctgctggtgcaggtgcaggacggcggcagccccccaagaagcaccaccggcaccgtgcacgtggccgtgctggacctgaatgacaacagccccaccttcctgcaggccagcggggccgccggcggcggcctgcccatccaggtgcctgacagagtgcccccaggcaccctggtgaccaccctgcaggccaaggaccctgatgaaggagaaaatggcaccatcctgtacaccctgactggacctggcagcgagctgttcagcctgcacccccacagcggggagctgctgacagctgcccccctcatccgggcagagcggccccactacgtgctgaccctgagcgcccatgaccagggcagccccccaagaagtgccagcctgcagctgctggtgcaggtgctgcccagcgcccggctggccgagcccccaccagacctggccgagcgggaccctgctgcccctgtgcctgtggtgctgactgtgacagctgctgagggcctgcggcccggcagcctgctgggctctgtggccgcccctgagcctgctggggtgggcgccctgacctacaccctggtgggcggcgctgaccctgagggcacctttgccctggatgctgccagcggccgcctgtacctggcccggcccctggactttgaggccggccccccctggagggccctgactgtgcgggcagagggccctgggggcgctggggcccggctgctgcgggtgcaggtgcaggtgcaggatgaaaatgagcacgccccagcctttgcccgggaccccctggccctggccctgcctgaaaatcctgagcctggagctgccctgtacaccttccgggccagtgatgctgatggccctggccccaacagtgatgtgcgctaccgcctgctgcggcaggagccccctgtgcctgccctgcggctggatgccaggactggagccctgagcgccccccggggcctggaccgggagaccaccccagccctgctgctgctggtggaggccacagacaggcctgccaatgccagcagaagaagagctgcccgggtgtctgcccgggtgtttgtgacagatgaaaatgacaatgcccctgtgtttgccagccccagccgggtgcggctgcctgaggaccagcccccaggccctgctgccctgcacgtggtggcccgggaccctgacctgggggaggccgcccgggtgtcctaccgcctggccagcggaggagatggccacttccggctgcacagcagcactggagccctgtctgtggtgcggcccctggaccgggagcagagagctgagcacgtgctgactgtggtggccagtgaccacggcagccccccaagaagtgccacccaggtgctgactgtgtctgtggctgatgtgaatgatgaggcccccaccttccagcagcaggagtacagcgtgctgctgcgggagaacaaccccccaggcaccagcctgctgaccctgcgggccacagatcctgatgtgggcgccaacggccaggtgacctacggcggcgtgtcctctgagagcttcagcctggaccctgacaccggggtgctgaccaccctgcgggccctggaccgggaggagcaggaggagatcaacctgactgtgtatgcccaggaccggggcagccccccccagctgacccacgtgacagtgcgggtggccgtggaggatgaaaatgaccacgcccccacctttggaagtgcccacctgagcctggaggtgcctgagggccaggacccccagaccctgaccatgctgcgggccagtgaccctgatgtgggcgccaacggccagctgcagtaccgcatcctggatggagaccccagcggggcctttgtgctggacctggccagcggggagtttggcaccatgaggcccctggaccgggaggtggagcccgccttccagctgagaattgaggccagagatggcggccagcctgccctgagcgccaccctgctgctgactgtgacagtgctggatgccaatgaccacgccccagccttccctgtgcctgcctacagcgtggaggtgcctgaagatgtgcctgctggcaccctgctgctgcagctgcaggcccatgaccctgatgctggggccaatggacatgtgacctactacctgggcgccggcacagctggggccttcctgctggagcccagcagcggggagctgaggacagctgctgccctggaccgggagcagtgccccagctacaccttctctgtgtctgctgtggatggagctgctgctggccccctgagcaccaccgtgtctgtgaccatcaccgtgagagatgtgaatgaccacgcccccaccttccccaccagccccctgcggctgcggctgccccggcccggccccagcttcagcacccccaccctggccctggccaccctgcgggcagaagatagagatgctggggccaatgccagcatcctgtaccgcctggccggcaccccacctcctggcaccaccgtggacagctacacaggagagatccgggtggcccggagccctgtggccctgggcccccgggacagagtgctcttcatcgtggccacagacctgggccggcctgcccggagcgccactggagtcatcatcgtgggcctgcagggcgaggccgagcggggcccccgcttcccccgggccagcagcgaggccaccatcagagaaaatgcccctcctggcacccccatcgtgagccccagggctgtgcatgctgggggcaccaacggccccatcacctacagcatcctgtctggaaatgagaagggcaccttcagcatccagcccagcactggagccatcaccgtgcgctctgctgagggcctggactttgaggtgagcccccggctgcggctggtgctgcaggccgagagcggcggggcctttgccttcaccgtgctgaccctgaccctgcaggatgccaatgacaatgccccccgcttcctgcggccccactacgtggccttcctgcctgagagccggcccctggagggccccctgctgcaggtggaggctgatgacctggaccagggcagcggcggccagatctcctacagcctggccgccagccagcctgcccggggcctcttccacgtggaccccaccaccggcaccatcaccaccacagccatcctggaccgggagatctgggccgagacccggctggtgctgatggccacagaccggggcagccctgccctggtgggcagcgccaccctgactgtgatggtgattgacaccaatgacaaccggcccaccatcccccagccctgggagctgcgggtgtctgaagatgccctgctgggcagcgagatcgcccaggtgactggaaatgatgtggacagcggccctgtgctgtggtacgtgctgagccccagcggcccccaggaccccttctctgtgggccgctatggaggccgggtgtccctgaccggccccctggactttgagcagtgtgaccgctaccagctgcagctgctggcccatgatggcccccatgagggccgggccaacctgactgtgctggtggaggatgtgaatgacaatgccccagccttcagccagagcctgtaccaggtgatgctgctggagcacaccccacctggcagcgccatcctgtctgtgtctgccacagaccgggacagcggggccaacggccacatctcctaccacctggccagccctgcagatggcttctctgtggaccccaacaacggcaccctcttcaccatcgtgggcaccgtggccctgggccatgatggcagcggggctgtggatgtggtgctggaggcccgggaccatggagcccctggccgggccgcccgggccaccgtgcacgtgcagctgcaggaccagaatgaccacgcccccagcttcaccctgagccactacagagtggccgtgacagaggacctgcccccaggcagcaccctgctgaccctggaggccacagatgctgatggcagccgcagccacgccgctgtggactacagcatcatcagcggcaactggggccgggtcttccagctggagccccggctggccgaggccggggagagcgctggccctggcccccgggccctgggctgcctggtgctgctggagcccctggactttgagagcctgacccagtacaacctgactgtggccgctgctgaccggggccagcccccccagagctctgtggtgcctgtgacagtgacagtgctggatgtgaatgacaacccccctgtgttcacccgggccagctacagagtgacagtgcctgaggacacccctgtgggcgctgagctgctgcacgtggaggccagtgatgctgaccccggcccccacggcctggtgcgcttcaccgtgtcctctggggaccccagcggcctgtttgagctggatgagagcagcggcaccctgcggctggcccacgccctggactgtgagacccaggcccggcaccagctggtggtgcaggccgctgaccctgctggggcccactttgccctggcccctgtgaccatcgaggtgcaggatgtgaatgaccacggccctgccttccccctgaacctgctgagcacctctgtggccgagaaccagcccccaggcaccctggtgaccaccctgcacgccattgatggagatgctggggccttcggccgcctgcgctacagcctgctggaggccggccctggccctgagggccgggaggcctttgccctgaacagcagcactggagagctgcgggcccgggtgccctttgattatgagcacacagagagcttccggctgctggtgggcgctgctgatgctggcaacctgagcgcctctgtgacagtgtctgtgctggtgactggagaagatgaatatgaccctgtgttcctggccccagccttccacttccaggtgcctgagggcgcccggcggggccacagcctgggccacgtgcaggccacagatgaagatggaggagcagatggcctggtgctgtacagcctggccaccagcagcccctacttcggcatcaaccagaccactggagccctgtacctgcgggtggacagccgggcccctggcagcggcacagccaccagcggcggcggcggccgcacccggcgggaggccccccgggagctgcggctggaggtgattgcccggggccccctgcccggcagccgcagcgccaccgtgcctgtgacagtggacatcacccacacagccctgggcctggccccagacctgaacctgctgctggtgggcgctgtggccgccagcctgggcgtggtggtggtgctggccctggccgccctggtgctgggcctggtgcgggcccggagcaggaaggccgaggccgcccctggccccatgagccaggccgcccccctggccagtgacagcctgcagaagctgggccgggagccccccagccccccaccttctgagcacctgtaccaccagaccctgcccagctatggaggccctggagctgggggcccctacccccggggcggcagcctggaccccagccacagcagcggccggggcagcgctgaggccgcagaagatgatgagatccgcatgatcaatgagttcccccgggtggcctctgtggccagcagcctggccgcccggggcccagattctggcatccagcaggatgctgatggcctgagtgacaccagctgtgagcccccagccccagacacctggtacaagggcaggaaggccggcctgctgctgcccggggccggggccaccctgtaccgggaggagggccccccagccacagccacagccttcctgggcggctgcggcctgagccctgcccccaccggggactatggcttcccagcagatggcaagccctgtgtggccggggccctgacagccatcgtggccggggaggaggagctgcggggcagctacaactgggactacctgctgtcctggtgcccccagttccagcccctggccagcgtcttcacagaaattgcccggctgaaggatgaggcccggccctgccccccagcccccagaattgatcctccacccctcatcacagctgtggcccaccctggggccaagtctgtgccccccaagccagccaacacagctgctgcccgggccatcttccccccagccagccacaggagccccatcagccatgagggcagcctgagcagcgctgccatgagccccagcttcagccccagcctgagccccctggccgcccggagccctgtggtgagcccctttggagtggcccagggccccagcgccagcgccctgtctgctgagagcggcctggagcccccagatgacacagagctgcacatctag

SEQ ID NO: 140485 - DNA, 9897 bp, Artificial Sequence
  derived and/or modified sequence
atgcagaaggagctgggcatcgtgcccagctgccccggcatgaagtctcctagaccccatttgctcttgcctcttctgctgttactattgctgctgctgggcgccggcgttcctggggcttggggccaggctgggagcctggacttgcagatagacgaagagcagccagcaggcaccctgatcggcgatatctcagctgggctgcccgcagggacagccgcacccttgatgtacttcatctcagctcaggaaggcagtggggtcggcactgacctcgccatcgatgagcacagcggagtagtccggacggccagggtgctcgatagagagcagcgggacagataccgtttcaccgccgtgacccctgatggcgccaccgtggaggtgacagtcagggtggctgatatcaatgaccacgctcccgccttcccccaggcaagagcagccctgcaagtccctgaacataccgccttcggcaccagatacccgcttgaaccggcccgcgatgccgatgcaggaagactgggcactcagggctacgccttaagcggagacggcgcaggcgagacttttcgactggagactaggccagggccggacggaacgcctgtccccgagctggtggttaccggagagcttgacagggagaataggtcccactatatgctgcagctcgaagcctacgacggtggctccccgcctcggcgagcccaggccctactggacgtcacgcttttggatattaacgaccacgcccccgcctttaatcagtcacggtatcacgctgtcgtatcagaaagccttgctccgggttccccagttctgcaagtgttcgcaagcgatgcagatgccggagtcaacggtgccgtcacttatgaaatcaaccgtaggcagtccgagggtgatggtccttttagtatagatgcgcatacaggactgctacagcttgagaggccacttgattttgagcagcggcgtgtgcatgagttagtggtgcaggcaagagatggcggagcacatcccgaattaggaagcgccttcgttacagttcatgtgagagacgcaaacgataaccagccttcaatgacggtgatttttttgagtgctgatggcagtccccaggtgtccgaggccgccccccccggccagctcgttgccaggatctcagtatccgatcctgacgacggggacttcgcgcatgtgaatgtatctcttgagggcggagagggacacttcgccctttcaactcaggatagtgttatttaccttgtatgtgttgctcgcagactcgatagggaggaacgtgatgcttacaatctgcgggtcaccgcaaccgacagtggcagcccaccgttgagggccgaagcggcctttgtgttgcatgtgaccgatgtaaacgacaatgcgccagcctttgataggcagctgtatcggccagaacccttgccagaagtagcattgccagggtctttcgtcgtgcgtgttactgctcgggatcccgatcagggaaccaatggccaggtgacatactcactggctcccggggctcacacacactggttcagcatagatcccacctccggcatcatcaccaccgccgcttccctggactacgaactcgaaccccaaccgcagctcattgtcgtcgctaccgatggtggcctgccccccctcgccagctccgctacggtgagcgtcgccctacaggacgtgaatgataacgaacctcagtttcagagaacattctataacgcatctctgccagaaggcacacagccagggacgtgcttccttcaggtgacagccaccgatgcagatagtggaccctttggcctcctcagctatagtctgggtgctgggttgggatcaagtggcagcccaccatttcgtatcgacgcccactccggcgacgtgtgtacgactaggaccctggatcgcgatcagggacctagcagcttcgacttcacggttacagcagttgacggcggcgggcttaaaagcatggtgtacgtgaaggttttcctgagcgacgagaacgacaacccaccacaattttatccaagagagtatgctgcttccatctcagcgcagtcacccccaggcaccgcagtcctccgattacgggctcacgaccccgatcagggttctcacggtcgccttagttatcatatcctagcgggaaactcaccccccttattcactctcgacgaacaatccggtctgctgacagtggcctggccactagcccggcgggcaaactccgttgtgcagctggagattggggcagaagatggtggcgggctgcaggcagagccatccgcccgtgtggatatctccatagtacccggaaccccaacccctcccatctttgaacaactccagtatgttttcagtgttcccgaagatgtggcccctggcacctccgtcgggatcgtgcaagcacacaatcccccaggaagactggcacctgttacactgtcactttctggcggggacccccgcggcttattttctcttgacgccgtcagtggtctgcttcagactcttcgccctcttgatcgcgagttgctgggccccgtcctagaactggaagtgcgagcagggtccggagtacctcctgcctttgctgttgcgagggtgcgggttctcttggacgatgtgaacgacaactcccccgcattcccagcaccggaagacaccgtgctgcttccccctaacacggctccaggtaccccaatctacacattaagggccttagatccggacagcggagtgaactcgagagtgactttcactctcttggcgggcggtggtggggccttcactgtggaccccaccacgggtcacgtgagactgatgcgccctctcggcccctctggcggacccgcccacgaacttgaactggaggccagagacggagggagcccccctaggacctcgcattttcgactacgtgtggtagtccaggacgtaggcacaagagggctggcccccaggtttaactcccctacttaccgcgtggatttgccatccggtacaactgcagggacccaggtgctgcaggtacaggctcaggcacccgatggaggccctataacatatcatctcgccgcagaaggagcttcttctccttttgggcttgagccccaatctgggtggttgtgggttagagctgccctggatcgggaggcgcaggagctttacatactaaaggtcatggccgtgagcggttccaaggccgagctggggcagcagactgggaccgccacagtcagagtgtcgatcctgaaccagaacgagcacagtcccaggctgagcgaggatcctacatttcttgctgtggccgagaatcagccaccagggacctctgtggggcgcgtcttcgccaccgatcgggattcaggtccgaacggtcggttgacatattcactacaacaacttagcgaggattctaaggctttccgcatacacccccagacaggggaggtaacaaccctgcaaacgctcgatagggaacagcagtctagctatcagcttctggtgcaagtccaggatggggggagcccaccccgatccacaactggaacagtgcacgtggctgtcctggacctgaacgataattcgcctacatttcttcaagcatctggcgcagccgggggaggactgcccattcaagttccagatcgcgtccccccagggactttagtgacaacactacaggccaaggaccctgatgaaggtgagaacgggacaattctgtataccctgactggtcccggcagcgaactcttctccctgcaccctcactctggggaattgctgaccgcagcacccctcatccgagccgagcgtcctcattacgtgctcactctgagtgctcacgatcagggctcgcctcctaggtccgcatctctacagctactggtgcaggtattgccctcagccagactagccgaaccacctcccgacctagctgaaagagatccggctgctcctgttcctgtggtactgactgtgacagccgccgagggtctgcgtcccgggtcactgctcggtagcgtcgccgctccagagcctgcaggagtcggcgcactgacatataccctcgtgggcggagccgacccggagggaacatttgcacttgatgctgcctctggccggctctaccttgcaagaccattggatttcgaggccgggcccccttggcgcgccctcacggtacgcgcagagggcccgggtggagcgggcgcacgccttttgcgcgtgcaggtccaggtgcaagacgaaaatgagcacgctcccgctttcgctcgggaccccctagcccttgctctgcccgaaaaccctgagccaggagccgctttgtacacctttagggcctccgatgcagacgggcccggcccaaactccgacgtgcgctatcggctgcttaggcaggagccacccgtccccgctttgcggcttgacgctcgcactggagccttgtctgccccaagaggcctggatagagagaccacccccgccctgttgcttcttgttgaggccaccgaccggccagccaacgcctccagacggcgcgctgcacgggtaagcgccagagtgttcgtcacagacgagaatgacaacgcgcccgtcttcgcctctccaagtagagtgagactgccagaagaccagccccccggtcccgcggccttacatgtggtcgcccgcgatccagatcttggcgaagcagccagagtgagctacaggttggcgagtggcggggacggtcatttccggctccactcctctacaggcgccctgtccgtcgtgagacccctcgatcgcgaacagagggcagaacatgtactgaccgttgtcgctagtgaccatggctcaccaccacgctcggctacccaggtattaactgtgtctgtcgctgacgtgaacgacgaagctccaaccttccagcagcaggaatattcggtgctgctacgcgaaaacaatcctcccggtacaagtctgctcactctccgtgctaccgaccctgacgttggtgcaaacgggcaggtgacatacgggggtgtgagcagtgaatctttcagtttggatcccgataccggagttttgaccacccttcgggccctggaccgagaagagcaggaagagatcaacctgacagtttacgcccaggaccgagggtccccaccacaactgactcatgtcaccgtgcgggtggccgtcgaggacgaaaatgatcacgcccccacctttggatctgcgcacctatccctcgaggtccccgaaggacaggatcctcagacacttacgatgttacgtgcatctgacccagatgtgggtgccaatggacaattgcagtatcggatcctggatggcgacccaagtggggcattcgtactcgacctagccagcggcgaatttggaactatgcgacccctggatcgcgaagttgaaccggcctttcagctgcgaatcgaagcaagggacgggggacaacccgctcttagtgcaaccctgctgctgacagttactgtcctggacgccaacgatcacgcccctgctttcccagttcctgcatacagcgtggaagttcccgaagacgtgccagccgggaccctgctgcttcaacttcaggctcatgacccagacgctggcgcgaatggtcatgtgacatactatctgggcgccggcaccgcgggggcattccttctcgagccttcctcaggcgagctgcgaacagctgccgctcttgacagagaacagtgtcccagctatactttctctgtttcagctgtcgatggtgcagccgccggacctttgagcacgaccgtgagcgtcaccatcaccgtccgagacgtaaacgaccacgcacccacctttccgacatctcctttaagattgcggctcccccggcctggcccctcgttttcgaccccaacgttagccctggctacactgagggctgaagatcgggacgctggagctaatgcctctatcctgtaccggctggcaggaactccccctccaggaactacggtcgactcgtacaccggtgagattcgagtcgctcgatccccagttgccctcggaccgcgcgacagagtgctattcattgttgccactgacttgggaaggcctgcgcgttcggccactggggttatcatcgtgggtctccagggagaggccgaaagggggcctagattccccagggctagctctgaagctacgatccgagaaaacgctccccccggcacccccattgtatcacccagagctgtgcatgccggtgggacaaacggcccaataacatactctatactttccggaaacgaaaaaggaacatttagtatacagccaagcaccggcgccatcaccgtcagaagcgccgaggggctagacttcgaggttagcccaaggctgcggctcgtgctccaagcagaatcaggcggggccttcgcctttactgtcctcacacttacactgcaagacgccaacgacaacgcccctagatttctccgcccgcattacgttgcttttcttcccgagtcacggccccttgaaggccccctgctacaggttgaggcagatgacctggatcaaggatccggcggccagattagttactccttagcggccagccagcccgctagaggcctgtttcatgtggatcccacaactggaaccatcacaacaactgccattctggatcgcgagatctgggccgagacgcggctggtgctcatggccacggatcggggtagtcccgcgttggtcggatcagccacgctgacagtgatggtgattgatactaacgacaatcgacctactatcccccagccgtgggaactgcgggtaagtgaggatgcactgttagggagtgaaattgcacaagtcacaggaaacgatgtggatagtgggccagtcttatggtacgtcctgtccccaagcggtcctcaggatccctttagcgtcggtaggtacgggggaagggtctcgctcactggaccattggacttcgagcagtgtgataggtaccaacttcagctactcgctcacgatggccctcacgaggggcgagccaatctcacagttttggtggaagatgtgaatgataatgcaccagcctttagccagagcctatatcaggtgatgctcctggagcatactcctccaggctcagccatcctatcagtaagcgctacagatcgggactctggtgctaatggacatatctcgtatcacttggcctcaccagccgatgggttttcagtggacccaaacaacggtacactgtttaccatcgtagggaccgtagcactaggccacgacggatctggggccgtggatgttgtcctggaagcccgcgaccatggagctcccggaagggctgctcgggcgaccgtccacgtgcagctgcaggaccagaacgatcacgccccatccttcacattatctcactatcgagtggcagtgactgaggaccttcccccaggctctactttgctcactctggaagctacagatgccgatggcagccgctctcatgccgctgtagattacagcattattagcgggaattggggccgtgtctttcaattggaacctcggctggccgaggctggcgagagcgcaggacctgggcctagagccttggggtgtttagtcctcttggaaccactcgacttcgaatccctgacccaatacaatctaactgtcgccgccgccgatcggggacaaccccctcagtcgtccgtggtccccgtcaccgtaacagtcctggatgtgaatgacaacccccccgttttcaccagagcatcctatcgcgtgacggtccccgaggatacccccgtgggagcagaacttctgcatgtagaggcaagcgatgctgatcctggaccacacggcctggttaggttcacggtatccagtggtgacccatcaggactctttgaactggatgagtcttctgggacgctccgacttgctcacgccctggactgcgaaactcaggcaagacaccaattagtcgttcaggcagcggaccccgctggtgctcactttgcgttagcacctgtcacgattgaggtgcaggatgtaaatgaccacggccccgctttccctttaaacctcctcagcacaagcgtcgccgagaatcagccccccggcaccctggtgaccacactgcacgccattgacggggatgccggcgcttttggccggctgcgctactctctcctcgaagcggggccaggacccgagggtcgagaagcgttcgccctgaactcaagcactggggagctgcgtgccagggttccctttgattatgagcacaccgagagctttcgcctgttggtcggcgcagccgatgcaggcaaccttagtgctagtgtcaccgtttctgtcctggtaacgggcgaagatgagtacgatcccgtgttcctggcgcctgcattccactttcaggtccccgagggggccaggcgcggacatagccttggccacgtccaagcgacagatgaagacggtggagcagatggactagttctgtatagcctggcgacaagcagcccttatttcgggataaatcagaccaccggcgcactgtacctgcgagttgatagccgagcaccaggttctggcacggctaccagcggcggcggcggccggacccgtagggaagccccaagggaacttaggctggaggttatcgctcgaggaccactcccaggatctcggtccgccacggtgcccgtcacagtggacatcacccacaccgccttgggactggcccctgatctgaacctgctcctggtgggcgccgtggccgccagcctgggtgtggtggttgtccttgccctggctgctttagttttagggttagtccgcgctcggtcacgcaaagcagaggctgcacctggccctatgagccaggccgctcccttagcatcagactctctccaaaagttgggccgggaaccaccaagtccaccaccgagcgagcacctttaccaccaaactctcccatcctacgggggacctggagccggtgggccatatcctcgcggagggagcctcgacccaagccattcaagcgggcggggatcggccgaagccgctgaggacgacgaaatccgaatgattaacgagttcccaagagtcgcttccgtcgcgagttctctcgccgcccgtggccctgatagcgggattcagcaggacgcagatggattgagtgacacttcatgtgaacctcccgcaccagatacttggtacaaaggccgaaaggcggggctgctattgccgggcgctggagcaaccctctatagggaggaggggccccctgcaaccgctacggctttcctggggggctgtggtctctctcctgcccccactggagactatggtttcccggcagatggtaagccctgcgtggcaggagctctgacagccattgtagcaggggaggaagaattgcggggctcctacaattgggactacctcctgtcttggtgcccacaattccagcctctggcctccgtatttacggagatcgctaggctgaaggacgaggctaggccatgcccccctgcgccgcgaattgatccaccgcctctcatcactgccgtggctcacccaggggcgaagagtgtgccgcccaagccggctaatacagccgcggcaagggcaatattcccacccgccagtcacaggtctcctatttctcacgaaggcagtctgtcatccgccgcgatgagcccctctttctcaccttctctgagtccgttagcagctcgcagccccgttgtctccccattcggagtagcacagggaccctctgctagcgccctaagtgcagaatccggcctggagccccctgatgacacggagctgcacatctag

SEQ ID NO: 140486 - DNA, 9896 bp, Artificial Sequence
  derived and/or modified sequence
atgcagaaggaactaggcatcgtaccaagctgtcctggcatgaagtcacccagaccccaccttttgctgccactattgttgttactgctcctgcttctgggtgccggagtcccaggcgcatggggtcaggccggttcactcgacctgcagatagacgaagagcagccagccggaacactgattggggacatctctgcaggtctccccgcagggaccgctgcccctctgatgtactttatttctgcccaagaagggtctggcgttggcaccgacctggccatcgacgaacacagcggcgttgtccgaacagcgagagtgctggacagggaacagcgggataggtatcggtttaccgcagtgacaccagacggggcaactgtggaagtcaccgtgcgcgtggccgatatcaacgaccatgccccagccttcccccaggccagggctgccctccaggtgcctgagcataccgccttcggaacaaggtaccccctcgagccagccagggatgccgatgccggaaggctgggcacccagggttatgccctgtctggcgacggcgctggagagacgttccggctggagactagacctggtcctgacggtaccccggtgcccgaactggtggtcacaggagagctggatcgtgagaatcgaagtcactacatgttgcagcttgaggcttacgacggcggatccccgccacggagggcccaggcccttcttgacgttaccctgcttgatattaatgaccatgcgccagcctttaaccaatctagataccatgcagtggtgtccgagtccttagcacccggaagccccgtgctgcaagtcttcgcctcagatgcagacgccggagtaaacggagctgtgacctacgaaatcaacagacgacagagtgagggtgatggacccttcagcatcgacgcccatacaggcctactgcagctggaaagacctttagacttcgaacagcgacgcgtgcacgagctggtcgtgcaggctcgtgatggcggtgcgcatccagagcttgggagcgcgttcgtaacggtccatgtacgagacgcaaacgataatcaaccatctatgaccgtcatcttcctgtctgcagatggcagtccacaggtcagtgaagccgctccccctggacagctggttgctcggatttctgtctctgatccagacgacggcgatttcgcccatgtcaacgtgtccctggaaggcggagaaggtcactttgctctgagcacccaggacagtgttatttatctggtgtgtgtggccaggaggctcgatagggaggaaagagacgcctacaatcttagggtaaccgctaccgactctgggtctccaccactcagagccgaagcggctttcgtgcttcacgttacagacgtaaatgataacgcacctgccttcgatagacaactttatcgcccagaaccattgccagaggttgcgctgcctggcagctttgtcgtccgcgtcacagccagagacccggaccagggtaccaatggtcaggttacctattccctggccccaggggcacatacccactggttcagcatcgaccctacttcgggtatcataactaccgccgcatccttggactacgaactggagcctcagccgcagctgatcgttgtcgctaccgacggaggcctccctcccctagccagttcagccactgtatccgtggccctgcaggatgtgaacgacaatgaaccacagttccagagaacgttctataatgcatcactgccagagggtacgcagcctggtacatgcttccttcaggtgactgcgaccgatgccgacagtggccctttcggcctactctcttactccctgggcgcaggcctgggttcatctggcagcccaccttttagaattgacgcccactccggagatgtgtgcactaccaggaccctggatcgtgatcagggcccttcatctttcgactttacagttactgctgtcgatggaggagggctcaagtctatggtttacgtgaaagtttttctttctgacgaaaatgacaatccccctcagttctatccacgagaatatgccgcatctataagcgcccagtccccacccggtactgctgttctcagactgcgtgcacacgacccggatcaagggtcccacggcaggctatcttatcacatcctcgccggaaactctcccccactgtttacattagatgagcaatcgggactgttgactgtggcctggcccctggcacgtcgagctaatagcgtggtacagttggaaattggagccgaggatgggggaggactgcaggcagaacctagtgctcgcgtggacatctcaatcgttccaggcacccctaccccacccatctttgaacaactgcagtacgtgttctctgtgccagaagacgttgctccagggacttcagtggggatagtgcaagcccataatccgcctgggaggttggcgcctgttaccctctcactcagcggtggagatcccaggggcctcttctctttggatgccgtgtcaggattgctgcagacacttagacctctagatcgcgaattactgggcccagtactggaactagaagtgagggcaggcagcggggtcccaccggcattcgccgtggccagagtgagagtcctgctcgacgatgttaacgataattcccccgcatttcctgccccagaggatactgtgctgctgccgcctaacacagcacccggaaccccgatctacactctgcgggctctggatccagactctggggtgaactcgagagtgacattcacgctgttggccggtggcggaggagctttcactgtagatcccaccaccggccacgttcggcttatgcgccctttggggcctagcgggggacccgcacacgaattggagctggaggctagagacgggggatctcccccaagaacttcccatttccgactccgggtcgtggtgcaggatgtcggaacgaggggtctggccccacggttcaatagcccgacttaccgggtggatctaccatcaggtaccacagctggaacccaggtgctccaagtacaggcccaagccccagacggcggaccaattacttatcacttggctgctgagggcgcttcttctccattcggactcgaaccccagtccggctggctgtgggtccgtgctgccttagatcgcgaagctcaggagctgtacatcttaaaagtcatggcggtctcagggtccaaggctgaacttggtcaacagacaggcaccgcgaccgttcgcgtaagcattctaaatcaaaatgaacactccccaaggctctcagaagaccccacatttctggctgtggccgaaaaccaaccaccgggaacgtcagtcggacgggtttttgctacagatagggactcgggtcctaacggacgcctaacctactctctacagcagctaagcgaggattctaaggccttcaggatccacccccaaaccggagaagttacaacactccagaccctcgacagggagcagcagtcctcatatcagctgctggtgcaggtccaggatggtggttcaccaccaaggtccacaacaggaactgtgcatgttgccgtcctggatttaaacgacaatagcccaacattcctccaggcctctggcgcagccggtggagggcttcccattcaagtcccagacagggtgccacccggaacactagtgacaactctgcaggcaaaagatccggacgagggggaaaatggaaccattctctacaccctcaccggccctggcagcgagctcttcagcttacatccccactcgggcgagttgctcaccgccgctccactgataagggccgagcggcctcactacgtactgactctctctgctcatgaccagggaagcccacctaggtccgcgtccttgcagctgcttgtgcaggtgctgccaagcgccaggctggctgaacctcccccagacttagctgaacgggaccccgctgcacccgtgcctgtggtgttgactgttactgctgccgaaggactgagacccggatccctgctgggttccgtcgccgctccggagccagcgggagtgggagccctcacctacacactggtgggaggcgctgatcccgaaggcacgtttgcgctcgatgccgcttcggggaggttataccttgctcgtcctttggattttgaagcaggaccaccctggagggccctgactgtgagagcagaggggccaggcggagcgggagcaaggcttttgagagtccaggtacaggtgcaggacgagaatgaacatgccccagccttcgcgagggacccgttggcactggccttacccgagaatcctgagcctggcgctgcgctgtatacattccgcgcatcagatgcagatggtcctggaccgaatagcgacgtccgttacaggcttctgaggcaggaaccccctgtgccagccctgcgcctggacgcgaggacaggggcactctctgccccacggggtctggatagggagacgacgcccgctctgctcctgctggtcgaggccacagacagaccagccaacgcttcccgcagacgtgccgctcgggtgagtgcaagagtgttcgtcacagacgaaaatgacaatgctccagtgtttgcctcgccctcaagagtgcggctgcccgaagaccagcccccagggccagctgctctgcacgtcgtggctcgtgaccccgatctcggagaagcagccagggtaagctaccggctggcaagtggcggagatgggcatttccgtctccacagctctaccggcgcactatccgtcgtccgacccctggatcgggagcagcgggcagaacacgtcctgacagtcgtggcttctgaccatggctctccacccagatctgcaacacaggtcctgactgtatccgtcgcggacgtgaacgatgaagcacctacctttcagcagcaagaatattcagtactccttagagagaacaatccccctggcacctccctgctgaccctgcgagctacagacccagatgtgggcgcaaacgggcaagtgacgtatggtggcgtaagcagcgaatccttctccctggacccggacacaggggtcctgaccaccctgcgggctctcgatagagaggaacaggaggaaataaacttaactgtatatgcacaggatcgcggttctccgcctcagttgacgcacgtcaccgtgcgagtagccgtcgaggatgagaacgatcacgcacccacttttggaagcgcgcacctttccctggaagttcccgaggggcaggatccacaaacactaaccatgctgcgtgccagcgaccccgacgtgggagctaatggacagttacagtaccggattctggacggtgatccatcaggggcatttgttttggatctcgcatccggcgagtttggcacaatgcgtcccctcgatagagaagtggaacccgcatttcagctgcgcattgaggccagggacggaggacagccggcactttccgcgacactgctgctgaccgtgactgtcctggatgctaacgatcatgctcccgctttccccgtgcctgcttactctgtcgaggttcctgaggatgttcctgctggaacactcctcctgcagctccaggcacatgatcctgacgctggtgcaaatggacacgtcacctattatctcggagctggaacagccggagctttcctccttgagcccagctctggggagctgaggaccgcagccgcactcgacagggagcagtgtccatcatatacgttttccgtgagtgcagtggacggagctgctgccggtccattaagcaccacagtgagtgtaaccatcaccgttcgggatgtaaatgaccacgcccctactttcccaacttcccccctccggctgcgactcccaagaccgggaccgtccttctctacccctacgctggcgctggccacgctgagggcggaagaccgagatgctggcgctaatgcgtcaatcctctataggttggctgggacaccccctcccggaacaacagttgattcttacaccggtgaaatccgagtagcccgatcgccagtggcccttggaccccgagatagagttttgttcattgtcgccactgatctgggccgaccagctagatccgcaactggagtaatcatagttggcttgcagggcgaagccgagcgtggacccaggttcccacgcgcatcttctgaggccacaattcgagagaatgctcctcccggaacaccaattgtcagcccaagggccgttcacgctggaggcaccaatggcccaattacatatagtatattaagtggcaacgaaaaggggaccttctctattcagccatctaccggcgctataactgtgcggtctgcagaggggttggacttcgaggtgtctcctcggttacgactggtgctgcaggccgaaagcggaggggcattcgccttcaccgttcttacgctcaccctgcaggacgccaatgacaacgcccctaggttcctccggcctcactatgttgcatttcttccagagtctcggcctctggaggggccactattacaagttgaggccgacgatctggatcagggatctggtggccagatcagctattctctcgctgcttctcagccagctaggggcctgttccacgtcgatcccaccacaggcactattacaacaacggcaatccttgatcgggagatctgggcggagactagactggtgctgatggcaaccgatagggggtccccagcccttgtcggtagcgctaccctcacggtcatggttattgacacgaatgataaccgccctaccataccccagccctgggagttacgcgtgtcggaggatgcactgttaggcagcgaaatagcgcaggttacaggtaatgacgtggactccggcccagttctgtggtacgttctgtctcctagcgggccacaggacccattctccgtgggccgatatgggggtcgcgtttccctcacggggcctctcgacttcgaacaatgcgatcggtaccaactccagctcttggcccatgatggccctcacgaaggtagggccaatctgactgtactcgttgaggacgtcaatgataatgctcctgcctttagccaaagcctctaccaagttatgctgctggaacatacaccccctgggtcggccatccttagcgtatctgcgaccgatcgagactctggcgcaaatggacacatctcttatcacctcgcaagcccggcagacggattcagtgttgaccctaataacgggacactgtttacaatagtcggcactgttgctctgggccacgacgggtcaggcgcagtagacgtcgtgttggaagcccgtgaccatggtgcaccgggacgcgctgccagagcaacagtgcatgtgcaactacaggaccagaatgaccacgcgccttcatttacattgtctcattacagagtggcagttacagaggatctgccaccaggctctacgctcttaacactggaggcaaccgatgccgacggcagcaggagccatgccgctgtggactactcaataatctctggaaattggggtagggtcttccagctggagccccgtctggctgaggccggagaatcagcgggacccggtcccagagccctcggctgtctcgtgctgttggagccgcttgacttcgaaagtctcactcagtacaatcttaccgtggccgcagctgatagggggcagcctccacagagctctgtcgtacccgtgacagtcaccgttctggacgtgaatgacaacccccctgtcttcaccagggcttcttaccgcgttaccgtcccagaagacaccccagtgggagcagaactgctgcatgtggaggcatctgacgcagatcctggcccacacggtctggttagattcactgtgagttctggagatccctccggtctgttcgagctggacgaatcgtcgggcactctgagactagcacacgccctggactgtgaaacccaggccaggcatcagctcgttgtgcaggccgcagatcctgctggcgcacattttgctttggctccagtgacgatagaggttcaggatgtaaacgatcacggacctgcattcccactgaatctcctcagcacttctgtggccgaaaatcagcctcctggaacccttgtcaccaccttgcacgctattgatggtgatgccggagccttcggcagactgcgttactctctattagaggccggacccggaccggaggggagagaggcattcgcactaaatagtagcactggtgaattaagggccagagtcccatttgactacgaacataccgagtcctttcggctgctcgtgggagcagcagatgcaggtaacttatctgcaagcgtgactgtctccgtgctcgttaccggagaggatgagtatgatcctgtcttcctggcacccgcttttcacttccaggtgcctgaaggggcaaggaggggacacagtttgggtcatgtacaggcaactgacgaggatggcggagcagacggtctggtgctgtattctcttgcaaccagctcaccgtactttggcattaatcagactacgggagcactctatctgagggtcgacagtcgggctccaggcagtgggactgccacttccggcggtgggggtaggacccggcgtgaagctccaagagagctcaggttagaggtaattgccagagggcctctccccggtagtcggtctgcgactgtgccagttaccgtggatatcacgcacaccgcccttgggctagctccagatttgaatctgcttctggtaggggctgtcgcggcatccctcggagttgttgtcgttctggcgctggccgcattggttctcggtctagtccgcgcacggtcccggaaagctgaagcagctcccggacccatgtcccaggctgctccattagcttcagattctctgcagaaactcggacgagagcctccaagccctcctccttccgagcatctgtaccaccagaccctcccttcttatgggggacctggtgccggtggtccatatcccaggggcggaagcctagatcccagccactctagcgggagaggctccgccgaagccgcagaggatgatgaaattaggatgatcaatgagttccctagggtagcatccgtggcctcttccttggctgcccgtggccctgattctggcatccagcaggatgctgacggcctgagcgatactagctgcgagcccccagccccagatacctggtataaaggaaggaaggccggactgctgctccccggagccggagcaacactctatagggaggaaggtccacccgcaacggccacggcttttctgggaggctgcggcctgtcccccgcacctactggcgattacggatttcccgctgacggaaagccttgcgtggctggcgcactgacagccatcgtggccggagaggaggagcttcgtggatcctacaactgggactatttgctgtcatggtgcccccagtttcagccactcgcctcggtgttcacagagatagctaggctcaaagatgaggcaagaccctgtccgccagccccacgtatcgatcctccgcctctgattacagcagttgcccaccctggcgcaaagtctgtccctcccaagcccgctaatacggctgcagctagggccatttttccacccgcttcccataggagcccaatcagccacgaggggagtctgagcagcgcagccatgtcaccatctttttccccttccctgtcacctctagctgcgagatcacccgttgtttctccctttggcgtggctcagggaccctctgcgtcggcgcttagcgctgagagtgggttggaaccccctgatgacactgaactccatattta

SEQ ID NO: 140487 - protein, 323 aa, Artificial Sequence
  derived and/or modified sequence
MDSKHQCVKLNDGHFMPVLGFGTYAPPEVPRSKALEVTKLAIEAGFRHIDSAHLYNNEEQVGLAIRSKIADGSVKREDIFYTSKLWSTFHRPELVRPALENSLKKAQLDYVDLYLIHSPMSLKPGEELSPTDENGKVIFDIVDLCTTWEAMEKCKDAGLAKSIGVSNFNRRQLEMILNKPGLKYKPVCNQVECHPYFNRSKLLDFCKSKDIVLVAYSALGSQRDKRWVDPNSPVLLEDPVLCALAKKHKRTPALIALRYQLQRGVVVLAKSYNEQRIRQNVQVFEFQLTAEDMKAIDGLDRNLHYFNSDSFASHPNYPYSDEY

SEQ ID NO: 140488 - DNA, 972 bp, Artificial Sequence
  derived and/or modified sequence
atggacagcaagcaccagtgcgtgaagctgaacgacggccacttcatgcccgtgctgggcttcggcacctacgccccccccgaggtgcccagaagcaaggccctggaggtgaccaagctggccatcgaggccggcttcagacacatcgacagcgcccacctgtacaacaacgaggagcaggtgggcctggccatcagaagcaagatcgccgacggcagcgtgaagagagaggacatcttctacaccagcaagctgtggagcaccttccacagacccgagctggtgagacccgccctggagaacagcctgaagaaggcccagctggactacgtggacctgtacctgatccacagccccatgagcctgaagcccggcgaggagctgagccccaccgacgagaacggcaaggtgatcttcgacatcgtggacctgtgcaccacctgggaggccatggagaagtgcaaggacgccggcctggccaagagcatcggcgtgagcaacttcaacagaagacagctggagatgatcctgaacaagcccggcctgaagtacaagcccgtgtgcaaccaggtggagtgccacccctacttcaacagaagcaagctgctggacttctgcaagagcaaggacatcgtgctggtggcctacagcgccctgggcagccagagagacaagagatgggtggaccccaacagccccgtgctgctggaggaccccgtgctgtgcgccctggccaagaagcacaagagaacccccgccctgatcgccctgagataccagctgcagagaggcgtggtggtgctggccaagagctacaacgagcagagaatcagacagaacgtgcaggtgttcgagttccagctgaccgccgaggacatgaaggccatcgacggcctggacagaaacctgcactacttcaacagcgacagcttcgccagccaccccaactacccctacagcgacgagtactag

SEQ ID NO: 140489 - DNA, 1807 bp, Artificial Sequence
  derived and/or modified sequence
ccctcatcaggattacagctttatcaggactgcatcttcttcagaaatgaatatttctcttacaacgcaaagaaagaaaaatcaaaataaattttctgattgaaaatgtaaaaaggcaaatatttttacagttttaactttaattttttattgaggaccaactatttgaaaaattctcattagtcattcctttaaattatgtgtatgtgagagaaagacgtaagatggttaattatttcaaatgatgcagtataaagaaggggcattatcacggcagaaacgaaaaaagatatttgtagctggaggtttttatagtctaacatatggttgctatttgttctacaaatccttttgaataatttaatatagagatttagaatagaaaataatactttagatagaaattaatgagtttattataaccatatattataataatttacttaggaattctctttgataagaaacaaatgaactgaatgcaattttctccacagaccatataagactgcctatgtacctcctcctacatgccattggttaaccatcagtcagtttgcaggggtggggggaggggtttcctgcccattgtttttgtaatctctgaggagaagcagcagcaaacatttgctagtcagacaagtgacagggaatggattccaaacaccagtgtgtaaagctaaatgatggccacttcatgcctgtattgggatttggcacctatgcacctccagaggttccgagaagtaaagctttggaggtcacaaaattagcaatagaagctgggttccgccatatagattctgctcatttatacaataatgaggagcaggttggactggccatccgaagcaagattgcagatggcagtgtgaagagagaagacatattctacacttcaaagctttggtccacttttcatcgaccagagttggtccgaccagccttggaaaactcactgaagaaagctcaattggactatgttgacctctatcttattcattctccaatgtctctaaagccaggtgaggaactttcaccaacagatgaaaatggaaaagtaatatttgacatagtggatctctgtaccacctgggaggccatggagaagtgtaaggatgcaggattggccaagtccattggggtgtcaaacttcaaccgcaggcagctggagatgatcctcaacaagccaggactcaagtacaagcctgtctgcaaccaggtagaatgtcatccgtatttcaaccggagtaaattgctagatttctgcaagtcgaaagatattgttctggttgcctatagtgctctgggatctcaacgagacaaacgatgggtggacccgaactccccggtgctcttggaggacccagtcctttgtgccttggcaaaaaagcacaagcgaaccccagccctgattgccctgcgctaccagctgcagcgtggggttgtggtcctggccaagagctacaatgagcagcgcatcagacagaacgtgcaggtttttgagttccagttgactgcagaggacatgaaagccatagatggcctagacagaaatctccactattttaacagtgatagttttgctagccaccctaattatccatattcagatgaatattaacatggagggctttgcctgatgtctaccagaagccctgtgtgtggatggtgacgcagaggacgtctctatgccggtgactggacatatcacctctacttaaatccgtcctgtttagcgacttcagtcaactacagctgagtccataggccagaaagacaataaatttttatcattttgaaataa

SEQ ID NO: 140490 - DNA, 972 bp, Artificial Sequence
  derived and/or modified sequence
atggactctaagcatcagtgcgtaaaattgaatgatggccacttcatgccagtgcttggtttcggcacctacgctcctcccgaggtcccgaggtcaaaggcccttgaggtgactaagctagcaattgaggcaggatttcgtcatatcgacagcgcccatctgtataacaatgaggaacaggtggggctggcaatccggtctaagatcgcggacggtagtgtcaaaagagaagacatcttctacacgtccaagttatggtcaacctttcataggcctgaattagttcggccagctctggagaactcactgaaaaaggctcagctcgactacgtcgatctatacctgatccatagtccgatgtcactcaagcctggggaagaattgtctcccacggacgagaacggcaaggtgatattcgatatcgtagacctatgcactacatgggaagccatggaaaagtgtaaggatgctggcctggccaagtcaattggcgtgtcaaacttcaacagaaggcaattagaaatgatcctgaataaacctggactcaagtataagcctgtgtgtaatcaagtcgagtgccacccctacttcaaccgaagcaaactgctggatttctgtaaatccaaagatatcgtgttggtcgcttactccgcactgggctctcagcgggataagcgctgggtggaccccaattcacctgttttactggaggatcccgtgctgtgcgcactggccaaaaagcataagagaacaccagccttgatcgcactccgataccagttacagcggggcgtggtggtgctagccaagtcctacaacgagcagcgcatcaggcagaacgtccaagtgttcgagtttcaacttacagccgaagacatgaaggccatagacgggcttgatcggaatctgcactatttcaacagcgactcttttgcgagccaccccaattacccctattccgacgagtattag

SEQ ID NO: 140491 - DNA, 972 bp, Artificial Sequence
  derived and/or modified sequence
atggacagcaagcaccagtgtgtgaagctgaatgatggccacttcatgcctgtgctgggcttcggcacctacgcccctcctgaggtgcccaggagcaaggccctggaggtgaccaagctggccatcgaggccggcttccgccacattgattctgcccacctgtacaacaatgaggagcaggtgggcctggccatccgcagcaagattgctgatggctctgtgaagcgggaggacatcttctacaccagcaagctgtggagcaccttccacaggcctgagctggtgcggcctgccctggagaacagcctgaagaaggcccagctggactatgtggacctgtacctgatccacagccccatgagcctgaagccaggagaggagctgagccccacagatgaaaatggcaaggtgatctttgatattgtggacctgtgcaccacctgggaggccatggagaagtgcaaggatgctggcctggccaagagcattggagtgagcaacttcaacagacggcagctggagatgatcctgaacaagccaggcctgaagtacaagcctgtgtgcaaccaggtggagtgccacccctacttcaacagaagcaagctgctggacttctgcaagagcaaggacatcgtgctggtggcctacagcgccctgggcagccagagggacaagcgctgggtggaccccaacagccctgtgctgctggaggaccctgtgctgtgtgccctggccaagaagcacaagaggaccccagccctgattgccctgcgctaccagctgcagaggggcgtggtggtgctggccaagagctacaatgagcagaggatccggcagaatgtgcaggtgtttgagttccagctgacagctgaggacatgaaggccattgatggcctggacaggaacctgcactacttcaacagcgacagctttgccagccaccccaactacccctacagtgatgagtactag

SEQ ID NO: 140492 - DNA, 972 bp, Artificial Sequence
  derived and/or modified sequence
atggacagcaagcaccagtgcgtgaagctgaacgacggccacttcatgcctgtgttgggattcgggacgtacgcaccacctgaagtgcctcgaagtaaggccctggaggtaactaaactggctatcgaagcgggctttagacatattgattctgctcatctctataacaacgaggaacaggtaggactagccattcgctcaaagatcgccgatgggtctgtcaaaagagaagacatattctataccagtaagctgtggagtaccttccataggccggagctggtgcgacctgctttggaaaatagcctgaaaaaggcccagttagattatgtcgacctttacctgattcatagcccaatgtctcttaaacctggtgaagagttgtctccaactgacgagaatggaaaggtgatttttgatatagtggacctgtgtaccacgtgggaggccatggagaaatgtaaagatgccgggttagccaagagtatcggggtcagcaattttaaccgtaggcaactcgagatgatattgaataaacctggactaaagtacaagcccgtgtgcaatcaggtcgaatgtcatccctatttcaataggagcaaactcctggacttttgtaaatcaaaagacatcgtgctggttgcctactccgcgctggggtcccagcgcgataagcggtgggtggatcctaacagtccggtgttgcttgaagaccccgtgttatgtgcactcgccaagaaacacaaaagaacgccagcccttattgcgctaagataccagctgcagcggggcgtggtcgtgctggctaagtcttataatgaacagcgaataaggcaaaatgtgcaggtatttgaattccagctgaccgccgaggatatgaaagccatcgatggcctggatcgaaatctacactacttcaattctgattctttcgcatcccatcctaactatccctattccgacgagtactag

SEQ ID NO: 140493 - DNA, 972 bp, Artificial Sequence
  derived and/or modified sequence
atggacagcaagcatcagtgtgtgaagctgaacgatggccactttatgccagttttaggattcggaacctacgcaccacccgaagtgcctaggtctaaggcattggaagtgacgaagctcgccatcgaggccggatttaggcacatcgactcggcacatttatataataacgaggagcaggtgggattggctatcagatccaaaatcgcagatggttctgtcaaaagagaagacatattttacaccagtaagctttggtcaacgttccaccgcccagagctggtgcgccctgccttggaaaactcactgaagaaagcccaactggactacgtagacctatacctgatccactctccaatgtccttgaaaccgggagaagagctttcccccactgacgagaacgggaaggtgatcttcgatattgtcgatctgtgtactacctgggaggcaatggagaaatgcaaggatgcgggactggccaaatcaattggcgtgtcaaacttcaaccgtcgccagctagaaatgatcctcaacaaaccaggactcaagtacaaacccgtgtgtaaccaagtggaatgccacccatatttcaacagatctaagttattagatttttgcaaatcaaaggatatcgtgctggtggcttattcagccttaggctcccagagagacaagcgctgggtggatccgaatagtccagtgctgcttgaagatcccgttctttgtgccctcgcgaaaaaacacaagagaactcctgccttgatcgcactccggtatcagctgcaaagaggtgtagtagtgctcgctaagtcctacaacgagcagcggatccgccagaacgttcaggttttcgaattccagctgactgctgaagatatgaaggctatcgatggcttggaccgtaatctacactacttcaactccgactccttcgcaagtcacccaaattacccatactcagatgaatattag

SEQ ID NO: 140494 - DNA, 972 bp, Artificial Sequence
  derived and/or modified sequence
atggattccaaacaccaatgcgtgaaacttaatgatggccactttatgccggtgctgggcttcggaacctatgcccctccagaggttcctcgctcaaaagcgctagaagtgacaaaactggctattgaagctggatttcgccacatcgattcagcacatctctacaacaatgaggagcaggtaggcctcgcgataaggtcaaagatcgcagacgggagcgtgaaacgagaagatattttctacacctcaaagctgtggagcacatttcatagacctgagttggtccgccccgccctcgaaaactcgctgaagaaagctcagctggactatgtcgacttatatttaatccattcacctatgtccttaaaacccggcgaggaactgtctccgactgacgagaacggcaaagtcatttttgatatcgtggatctgtgtaccacgtgggaagcaatggaaaaatgtaaggatgctgggctggctaagtccataggggtgtctaactttaataggaggcagctcgaaatgattctcaacaagccgggattaaaatacaagcccgtctgtaatcaggtcgaatgccatccatacttcaacagatccaaattactagatttttgcaaaagcaaggacattgtgttagtggcttattcagcgttgggaagccaaagagataaaagatgggtggatcccaattctccagtgttgctggaggacccagtgctgtgtgcacttgcaaaaaaacataaaaggacgcccgcactcatagctctgagataccagctacagcgcggcgtcgtggtcctggcgaagtcatacaatgaacagaggattcgccaaaatgtacaagtgtttgaattccagctcaccgcagaagatatgaaagcgatagacggcttggatagaaatctccattatttcaattcagactctttcgcttcccatcctaattacccgtattccgatgagtattag

SEQ ID NO: 140495 - DNA, 972 bp, Artificial Sequence
  derived and/or modified sequence
atggacagcaagcaccagtgcgtgaagctgaacgacggccacttcatgcccgtactgggctttggtacgtacgctcctccagaagtgccccgtagcaaagctcttgaggtcaccaagctcgcaatcgaagctgggtttaggcacattgactccgcacacctctataacaatgaggaacaggtaggattggccattaggagcaaaatcgccgatggtagcgtaaaacgagaagatatcttttatacatcaaagctatggagcacattccatcgtcccgagctggtgcgtcctgctcttgagaattctcttaagaaagcgcagctggactatgtggacttgtatcttattcattcacccatgagcctgaaacctggggaggagctaagccccactgacgagaacggaaaagttatatttgacattgtggacctgtgcacaacgtgggaggctatggagaagtgcaaagatgcaggtcttgcaaagagcattggggtctctaactttaaccgaaggcagctggagatgatcctgaacaagccaggtttgaaatacaaacctgtctgcaatcaggtggagtgtcacccgtatttcaatcgcagcaaactgctcgatttctgcaagagtaaggacatagtgttggtggcttactctgccctcggctctcagagagacaagcgctgggtggatccaaattctcccgttttactagaagaccctgtgctctgcgcgcttgctaaaaagcacaagcgcacgcccgcattgatcgccctgaggtaccagctgcagaggggcgtcgtcgtcctcgcgaaatcttacaatgagcagcgaattcgccagaacgtgcaggtatttgaatttcagctgaccgctgaagatatgaaagccatagatggcctcgacagaaatcttcactattttaattcggattcatttgccagccaccctaactacccttacagcgacgaatattag

SEQ ID NO: 140496 - DNA, 972 bp, Artificial Sequence
  derived and/or modified sequence
atggactccaagcaccaatgcgtgaagctgaatgacggacacttcatgccagtgttaggttttgggacttacgctcccccagaagtcccccgatccaaagctctggaggtaaccaagctcgcaatagaagcagggttccgacacatcgactcggctcacttatacaacaatgaagaacaggtgggcctggcaatccgaagcaagattgctgatgggtctgtgaagagggaggatattttctacactagcaaattatggtccacatttcatcggccagaattggtccggcctgccttagagaattctcttaaaaaggcccaactggactacgtggatctctacctgattcatagtccaatgtccctcaaaccaggcgaggagttatcaccaacagacgagaacggaaaagtgattttcgatatagtggatctgtgcactacctgggaagccatggagaagtgtaaggatgcagggcttgcaaagtccataggcgtgagtaattttaatcggaggcagctcgagatgattctcaacaagccagggttgaagtacaaacctgtgtgcaaccaagtagagtgccacccatattttaacagatccaagcttttggacttttgtaaatccaaagatatcgtgttagtcgcctactccgccctggggagccagcgcgataagagatgggtggatcccaacagcccagtgctgcttgaggacccagtcttgtgcgctctggctaaaaaacacaagagaacgcccgctctaatcgctctgcggtaccagctgcagaggggtgtcgtggtcttagcaaagagctataacgaacagaggatccgccagaacgtgcaggtttttgagttccagctgactgctgaggatatgaaggccattgacggcttggataggaacttacactattttaacagtgatagtttcgcatctcatcccaactacccttactcggatgagtactag

SEQ ID NO: 140497 - protein, 499 aa, Artificial Sequence
  derived and/or modified sequence
MVDRGPLLTSAIIFYLAIGAAIFEVLEEPHWKEAKKNYYTQKLHLLKEFPCLGQEGLDKILEVVSDAAGQGVAITGNQTFNNWNWPNAMIFAATVITTIGYGNVAPKTPAGRLFCVFYGLFGVPLCLTWISALGKFFGGRAKRLGQFLTKRGVSLRKAQITCTVIFIVWGVLVHLVIPPFVFMVTEGWNYIEGLYYSFITISTIGFGDFVAGVNPSANYHALYRYFVELWIYLGLAWLSLFVNWKVSMFVEVHKAIKKRRRRRKESFESSPHSRKALQVKGSTASKDVNIFSFLSKKEETYNDLIKQIGKKAMKTSGGGETGPGPGLGPQGGGLPALPPSLVPLVVYSKNRVPTLEEVSQTLRSKGHVSRSPDEEAVARAPEDSSPAPEVFMNQLDRISEECEPWDAQDYHPLIFQDASITFVNTEAGLSDEETSKSSLEDNLAGEESPQQGAEAKAPLNMGEFPSSSESTFTSTESELSVPYEQLMNEYNKANSPKGT

SEQ ID NO: 140498 - DNA, 1500 bp, Artificial Sequence
  derived and/or modified sequence
atggtggatagaggtcccctgctgacctctgcaatcattttctacctggccattggagccgctattttcgaggtgcttgaggaacctcactggaaagaagccaaaaagaattactatactcagaagctgcatctactgaaggagtttccttgtctcggacaggaggggttggataaaatcttagaagtagtgtctgacgccgccgggcaaggtgttgctattacaggtaatcagacttttaataactggaattggcctaacgcgatgatattcgccgcaaccgtcattactactattgggtatggcaacgtggcacccaagaccccggccggacggctcttctgcgtcttctacggtcttttcggggttcccttatgcctcacttggatttctgctctgggaaaattctttggggggcgagcaaaaagactaggccagttcctcacaaagcgaggcgttagtctcaggaaagcacagattacatgcacagtaatttttatagtgtggggggttcttgtgcacttagtgatcccaccattcgtgtttatggttactgagggatggaattacatcgaagggctttattacagcttcattacaatctctaccatcggatttggcgactttgtggctggcgtgaacccatccgcgaattaccatgcactttaccgctattttgtggagctctggatatatttaggactggcgtggctgagtcttttcgtgaactggaaggtgagcatgttcgtggaggtgcataaggctatcaagaagcggcgcaggcgacgtaaagagagtttcgagtcttcgcctcacagcaggaaagcactgcaggtcaaaggctcgacagccagtaaggacgtgaacatcttttcgttcctgtctaaaaaggaggaaacgtacaacgacctgattaagcaaatcggtaagaaggccatgaagactagcggcggcggcgagactggacctggccctggactgggaccacagggaggcggcttgccagcactccctccatcgctggtgccacttgtagtatactccaaaaaccgggttcctactcttgaagaggtctcacagacactccgttcaaagggacatgttagcaggagcccagatgaggaggccgttgctcgcgctcccgaggattcctcacccgctcctgaagtttttatgaaccagcttgatcggataagcgaggaatgcgagccgtgggatgcacaggactaccacccgctcatatttcaggatgctagtataacttttgtaaacactgaagctggtctttctgatgaggagacttcaaagtcaagtcttgaggataacctggcaggcgaagaatcccctcagcagggcgccgaggctaaagcacccctgaatatgggcgagttccctagctcctccgagagcacgttcacaagcactgaaagcgaactgagcgtcccttatgaacagctgatgaacgagtataacaaggcaaacagccctaagggaacctag

SEQ ID NO: 140499 - DNA, 1500 bp, Artificial Sequence
  derived and/or modified sequence
atggtggaccggggccccctgctgaccagcgccatcatcttctacctggccatcggggccgccatctttgaggtgctggaggagccccactggaaggaggccaagaagaactactacacccagaagctgcacctgctgaaggagttcccctgcctgggccaggagggcctggacaagatcctggaggtggtgtctgatgctgctggccagggcgtggccatcactggaaaccagaccttcaacaactggaactggcccaatgccatgatctttgctgccaccgtcatcaccaccatcggctatggaaatgtggcccccaagaccccagctggccgcctcttctgtgtgttctacggcctgtttggagtgcccctgtgcctgacctggatcagcgccctgggcaagttctttggaggccgggccaagaggctgggccagttcctgaccaagaggggcgtgtccctgaggaaggcccagatcacctgcaccgtcatcttcatcgtgtggggcgtgctggtgcacctggtgatccccccatttgtgttcatggtgacagagggctggaactacatcgagggcctgtactacagcttcatcaccatcagcaccatcggctttggagactttgtggccggcgtgaaccccagcgccaactaccacgccctgtaccgctactttgtggagctgtggatctacctgggcctggcctggctgagcctgtttgtgaactggaaggtgtccatgtttgtggaggtgcacaaggccatcaagaagagaagaagaagaaggaaggagagctttgagagcagcccccacagcaggaaggccctgcaggtgaagggcagcacagccagcaaggatgtgaacatcttctccttcctgagcaagaaggaggagacctacaatgacctgatcaagcagatcggcaagaaggccatgaagaccagcggcggcggggagactggacctggccctggcctgggcccccagggcggcggcctgcctgccctgccccccagcctggtgcccctggtggtgtacagcaagaacagagtgcccaccctggaggaggtgtcccagaccctgcggagcaaaggacatgtgagccgcagcccagatgaggaggccgtggcccgggcccctgaggacagcagccctgcccctgaggtgttcatgaaccagctggaccgcatcagtgaagaatgtgagccctgggatgcccaggactaccaccccctcatcttccaggatgccagcatcacctttgtgaacacagaagctggcctgagtgatgaggagaccagcaagagcagcctggaggacaacctggccggggaggagagcccccagcagggcgctgaggccaaggcccccctgaacatgggagagttccccagcagcagcgagagcaccttcaccagcacagaaagtgagctgtctgtgccctatgagcagctgatgaatgagtacaacaaggccaacagccccaagggcacctag

SEQ ID NO: 140500 - DNA, 1500 bp, Artificial Sequence
  derived and/or modified sequence
atggtggaccggggccccctgctgaccagcgccatcatcttctacctagcaatcggggccgcaattttcgaggtgctggaggaaccccattggaaagaagccaaaaagaactactacacgcagaaattgcacctgctgaaggagttcccctgcttgggacaggaaggcttggacaagatcctggaagtcgtctctgacgcagcgggccaaggagtcgcaatcacgggcaatcaaactttcaataactggaattggcccaatgcaatgattttcgccgcaacagtgatcaccactattggctatggaaacgtcgcccctaagacacctgccggcaggctgttctgtgttttctacgggctcttcggcgtgcctctttgcctgacctggatctctgctctcgggaaattctttggaggccgtgccaaacgcctggggcagttcctgacgaaacggggtgtcagtctgcgtaaggcccaaataacatgtaccgtcatattcatcgtatggggcgtgttggtgcatcttgtgattccaccattcgtgttcatggtgaccgagggctggaattacatcgaggggctctactacagctttatcacaatatccaccatcggtttcggtgattttgtggcgggcgtgaacccttccgccaactaccacgccctgtaccgctactttgttgagttatggatatacttgggcctcgcttggctttccttatttgttaactggaaggtgtcaatgttcgtggaggtgcacaaggccattaagaaacgacggagacgccggaaggagagttttgagtcatcaccgcattcccgcaaagccttacaagtcaagggcagtaccgcctctaaagacgtaaatatatttagtttcctatctaaaaaggaagagacctataatgacctgataaaacagatcggaaagaaagccatgaaaacctctggtggcggcgaaacgggtcctggcccaggcctcgggcctcaaggcgggggtcttcctgcactgcctccatccctcgtgccccttgtagtgtactccaagaatagggtgcctacgctggaggaggtcagtcagaccctgcgctccaaagggcatgtctcccgcagcccagacgaggaggcagtggcacgggcacccgaggactcctccccagcgcccgaggtgttcatgaaccagcttgatcgaattagcgaagagtgcgagccatgggatgcccaagattatcatccacttatctttcaggatgcttcaattactttcgtcaatactgaagccgggctgagtgatgaggagacatcgaagagcagcttagaggacaatctggccggggaggagtcaccccagcagggggccgaagccaaagctcctcttaatatgggggagttcccatcatcttctgaatccaccttcactagtaccgagtccgagctctcagtgccctatgaacagctgatgaacgaatacaacaaggctaactctcccaagggtacctag

SEQ ID NO: 140501 - DNA, 3756 bp, Artificial Sequence
  derived and/or modified sequence
agcgacgcgtggagaagcggcccacgtgtctgcccagagtcaagtcctgtgttcttcccgctccttacgcatccgcggtccagggcgccctttcagccccgctggtgttcgcccaccccgggccgcgtgagtggggccccacgcagctccccgcactccgtgggccaacttggccaagcaactctgtccggggagcggtgcttgcggggggtgagtaccgggcactgcgcatgcggagctccaaattcaaacagctgttttcagaggctggagggcgggcggactggtagcagctggggctaggagaggctttctctaggaggcggccgctcgggagccatggtggaccggggccctctgctcacctcggccatcatcttctacctggccatcggggcggcgatcttcgaagtgctggaggagccacactggaaggaggccaagaaaaactactacacacagaagctgcatctgctcaaggagttcccgtgcctgggtcaggagggcctggacaagatcctagaggtggtatctgatgctgcaggacagggtgtggccatcacagggaaccagaccttcaacaactggaactggcccaatgcaatgatttttgcagcgaccgtcattaccaccattggatatggcaatgtggctcccaagacccccgccggtcgcctcttctgtgttttctatggtctcttcggggtgccgctctgcctgacgtggatcagtgccctgggcaagttcttcgggggacgtgccaagagactagggcagttccttaccaagagaggtgtgagtctgcggaaggcgcagatcacgtgcacagtcatcttcatcgtgtggggcgtcctagtccacctggtgatcccacccttcgtattcatggtgactgaggggtggaactacatcgagggcctctactactccttcatcaccatctccaccatcggcttcggtgactttgtggccggtgtgaaccccagcgccaactaccacgccctgtaccgctacttcgtggagctctggatctacttggggctggcctggctgtccctttttgtcaactggaaggtgagcatgtttgtggaagtccacaaagccattaagaagcggcggcggcgacggaaggagtcctttgagagctccccacactcccggaaggccctgcaggtgaaggggagcacagcctccaaggacgtcaacatcttcagctttctttccaagaaggaagagacctacaacgacctcatcaagcagatcgggaagaaggccatgaagacaagcgggggtggggagacgggcccgggcccagggctggggcctcaaggcggtgggctcccagcactgcccccttccctggtgcccctggtagtctactccaagaaccgggtgcccaccttggaagaggtgtcacagacactgaggagcaaaggccacgtatcaaggtccccagatgaggaggctgtggcacgggcccctgaagacagctcccctgcccccgaggtgttcatgaaccagctggaccgcatcagcgaggaatgcgagccatgggacgcccaggactaccacccactcatcttccaggacgccagcatcaccttcgtgaacacggaggctggcctctcagacgaggagacctccaagtcctcgctagaggacaacttggcaggggaggagagcccccagcagggggctgaagccaaggcgcccctgaacatgggcgagttcccctcctcctccgagtccaccttcaccagcactgagtctgagctctctgtgccttacgaacagctgatgaatgagtacaacaaggctaacagccccaagggcacatgaggcagggccggctccccaccccacctttgatggcctcttcccccctcaccctagggtgtcccgagatgaccgggacgcctggcccctggtgggggggcagcctcggaactgggagtggggggccaggggccttcctaaccttccatcatcctcagctagatgtatgcccgggacagggcctctgttctccagctgaaccataccctggctgtgggggcatctgtcctgagcttggctggtgtatctcacaatgcaaagacatgctggctggcgggacaggtgggcaggactgaccctgaggaggccttgcctgcagggtctttgtctcaccatttggtggagtatcacacggttctctgaggtctggggcctcagctgtttaagtttaccggtattactgagctcggcatttggagagggagctctgaagtgtctggggaggtaccgctgtgcgtggggtcaggtgtttccgtaccacagcaggagcagggcccgcccgcatcccagctgtgggcctgccggtcaggtcgggcacctactacaaaccgtagtggggtggaggctgctggaggtgggagtgaggagatgagggcagggtctcaaacagtcctgactcacagggcctggaaacaagtcctatgtgggcctggggcctggggtcctcatcctccttgttggtctactcaggcccagcccagagctgtgttccctgtctcaggtcaagcagtggcagacgcaaggctttctgtgggcccccaagtggtaggagggagagtagcagagcatgggttactggaagccgggactgctagggctggtggccagggagctgcaagagtgaggctcagctctggctggttctgcccttacccctcctgcccgcctgagaactgcacaccctgcccgctggccccaggacctgcactcccaatcctgctgtcttctccttccctgtgccctgaacaaggacctcactgcccgccttcccctcccaccagcccccttgggccaggcagggtgaggccaaattgctcttggcccacaaatgggtgatggtcagatatgtgaatcaagctcctttctctagctagtgtttgatgtgcacgtgtgtgtgcacagtgcgtgtgtgcacacgcacacctgtgcactcgtgtgtgtttaagaaaggaaaggatttgggctggggagcaaaagataatgtgaaactgttggtggactctctggtgaggggtgggcagaacttgctgctactagagttcttgggttctccatgatgttcaccctggggctggcccactgtgtcctgaatgtttttgttattttttgttttattttttaaacaaactgctgtttttatatacctggaatctgttgttggcttcagagccagtggttaaagagcagggtcccaaggattgggagatctagtgtctgccctcctgccctgcaactcaattgggcctttttcggtgacctcatccaaggccatgatgtcaagggccatgtccccaagcagaggtggagaaggggacactgaggtgagcaaaagcaggaaggggcatccactgcgggtgactggaggccgggcaggaagcaagtcatcagagccgctcagctccgttcactctctgccttctgccccactactgtggggcagtggggccagagcccacctccccaacatgtgaagacagtgatgggcacgtgcccacacccccacttctctagccgtttgcagaggccgccacccagcaggggcctgaaaaggagcagcctcgtatttttctgtgaaatgttttaatgaaccatgttgttgctggttgtcctggcatcgcgcacactgtatgtacatactggcaacgatgtcaaatgtaatttattttaacatttttacaataaaacatgaggtggacaggc

SEQ ID NO: 140502 - DNA, 1500 bp, Artificial Sequence
  derived and/or modified sequence
atggtcgatagaggacctctgcttaccagcgcaattatcttttacctcgctatcggtgctgcaatcttcgaggtgttggaggagccacactggaaagaagctaagaaaaattactacacccaaaagcttcaccttctcaaggagttcccctgccttggacaggagggcctggataagatcctggaggttgtctcagatgcagcgggacagggtgtagctattaccggtaaccagacattcaataactggaactggcctaatgccatgatcttcgctgccactgttatcactacaatcggctacggtaatgtagcgccaaaaacgccggctggtcgactgttctgtgttttctatggcctgttcggcgtccctttatgcctcacctggatcagtgctctgggcaagtttttcggcggtagagccaagcgcttgggccaatttctcacaaagaggggcgtgtcgctgaggaaggcccagatcacatgtaccgtcatctttatagtttggggcgtgctggtacatcttgtaattccccctttcgtcttcatggtaaccgagggatggaactatatcgagggcctgtactactccttcattacaatttcaaccatcggtttcggagacttcgtcgccggagttaatccctccgccaattatcacgccctctatagatacttcgttgagttatggatctatctggggctggcatggttatctctgttcgtgaactggaaggtgtccatgtttgtcgaggtccacaaagctatcaagaaacggaggcggagacgcaaggaatcttttgaatccagcccccactcgaggaaggcactgcaggttaaaggctcaactgcaagtaaagatgtgaatattttctccttcctgtccaagaaagaagagacgtataatgatttgatcaagcagatagggaaaaaggcgatgaaaacgtccggtggtggcgaaactggtcccggaccgggactggggcctcagggaggagggcttccggcactgcccccaagtctggtcccgcttgtggtgtacagcaaaaacagggttccaaccctggaggaagtgtctcagactctccggagcaaggggcacgtcagtagatcccccgatgaggaggcggtggcgagagcccctgaagacagtagtcccgctccggaggtcttcatgaatcagctggatcggattagcgaagagtgtgagccctgggatgctcaagactaccatccacttatcttccaggatgctagcatcacttttgtcaatacagaagcaggcctgagcgatgaggaaactagtaagtcgtcactagaagataatttagccggagaggagtccccacagcaaggcgctgaggccaaagctcctctgaacatgggcgagttcccatcgagcagtgaaagtacatttacctccaccgagtccgagctgtccgtgccatacgaacagctgatgaacgaatacaacaaagcgaattcaccaaagggcacctag

SEQ ID NO: 140503 - DNA, 1500 bp, Artificial Sequence
  derived and/or modified sequence
atggtggacagaggccccctgctgaccagcgccatcatcttctacctggccatcggcgccgccatcttcgaggtgctggaggagccccactggaaggaggccaagaagaactactacacccagaagctgcacctgctgaaggagttcccctgcctgggccaggagggcctggacaagatcctggaggtggtgagcgacgccgccggccagggcgtggccatcaccggcaaccagaccttcaacaactggaactggcccaacgccatgatcttcgccgccaccgtgatcaccaccatcggctacggcaacgtggcccccaagacccccgccggcagactgttctgcgtgttctacggcctgttcggcgtgcccctgtgcctgacctggatcagcgccctgggcaagttcttcggcggcagagccaagagactgggccagttcctgaccaagagaggcgtgagcctgagaaaggcccagatcacctgcaccgtgatcttcatcgtgtggggcgtgctggtgcacctggtgatcccccccttcgtgttcatggtgaccgagggctggaactacatcgagggcctgtactacagcttcatcaccatcagcaccatcggcttcggcgacttcgtggccggcgtgaaccccagcgccaactaccacgccctgtacagatacttcgtggagctgtggatctacctgggcctggcctggctgagcctgttcgtgaactggaaggtgagcatgttcgtggaggtgcacaaggccatcaagaagagaagaagaagaagaaaggagagcttcgagagcagcccccacagcagaaaggccctgcaggtgaagggcagcaccgccagcaaggacgtgaacatcttcagcttcctgagcaagaaggaggagacctacaacgacctgatcaagcagatcggcaagaaggccatgaagaccagcggcggcggcgagaccggccccggccccggcctgggcccccagggcggcggcctgcccgccctgccccccagcctggtgcccctggtggtgtacagcaagaacagagtgcccaccctggaggaggtgagccagaccctgagaagcaagggccacgtgagcagaagccccgacgaggaggccgtggccagagcccccgaggacagcagccccgcccccgaggtgttcatgaaccagctggacagaatcagcgaggagtgcgagccctgggacgcccaggactaccaccccctgatcttccaggacgccagcatcaccttcgtgaacaccgaggccggcctgagcgacgaggagaccagcaagagcagcctggaggacaacctggccggcgaggagagcccccagcagggcgccgaggccaaggcccccctgaacatgggcgagttccccagcagcagcgagagcaccttcaccagcaccgagagcgagctgagcgtgccctacgagcagctgatgaacgagtacaacaaggccaacagccccaagggcacctag

SEQ ID NO: 140504 - protein, 955 aa, Artificial Sequence
  derived and/or modified sequence
MPSLPAPPAPLLLLGLLLLGSRPARGAGPEPPVLPIRSEKEPLPVRGAAGCTFGGKVYALDETWHPDLGEPFGVMRCVLCACEAPQWGRRTRGPGRVSCKNIKPECPTPACGQPRQLPGHCCQTCPQERSSSERQPSGLSFEYPRDPEHRSYSDRGEPGAEERARGDGHTDFVALLTGPRSQAVARARVSLLRSSLRFSISYRRLDRPTRIRFSDSNGSVLFEHPAAPTQDGLVCGVWRAVPRLSLRLLRAEQLHVALVTLTHPSGEVWGPLIRHRALAAETFSAILTLEGPPQQGVGGITLLTLSDTEDSLHFLLLFRGLLEPRSGGLTQVPLRLQILHQGQLLRELQANVSAQEPGFAEVLPNLTVQEMDWLVLGELQMALEWAGRPGLRISGHIAARKSCDVLQSVLCGADALIPVQTGAAGSASLTLLGNGSLIYQVQVVGTSSEVVAMTLETKPQRRDQRTVLCHMAGLQPGGHTAVGICPGLGARGAHMLLQNELFLNVGTKDFPDGELRGHVAALPYCGHSARHDTLPVPLAGALVLPPVKSQAAGHAWLSLDTHCHLHYEVLLAGLGGSEQGTVTAHLLGPPGTPGPRRLLKGFYGSEAQGVVKDLEPELLRHLAKGMASLMITTKGSPRGELRGQVHIANQCEVGGLRLEAAGAEGVRALGAPDTASAAPPVVPGLPALAPAKPGGPGRPRDPNTCFFEGQQRPHGARWAPNYDPLCSLCTCQRRTVICDPVVCPPPSCPHPVQAPDQCCPVCPEKQDVRDLPGLPRSRDPGEGCYFDGDRSWRAAGTRWHPVVPPFGLIKCAVCTCKGGTGEVHCEKVQCPRLACAQPVRVNPTDCCKQCPVGSGAHPQLGDPMQADGPRGCRFAGQWFPESQSWHPSVPPFGEMSCITCRCGAGVPHCERDDCSLPLSCGSGKESRCCSRCTAHRRPAPETRTDPELEKEAEGS

SEQ ID NO: 140505 - protein, 915 aa, Artificial Sequence
  derived and/or modified sequence
MPSLPAPPAPLLLLGLLLLGSRPARGAGPEPPVLPIRSEKEPLPVRGAAGCTFGGKVYALDETWHPDLGEPFGVMRCVLCACEAPQWGRRTRGPGRVSCKNIKPECPTPACGQPRQLPGHCCQTCPQERSSSERQPSGLSFEYPRDPEHRSYSDRGEPGAEERARGDGHTDFVALLTGPRSQAVARARVSLLRSSLRFSISYRRLDRPTRIRFSDSNGSVLFEHPAAPTQDGLVCGVWRAVPRLSLRLLRAEQLHVALVTLTHPSGEVWGPLIRHRALAAETFSAILTLEGPPQQGVGGITLLTLSDTEDSLHFLLLFRGLLEPRSGGLTQVPLRLQILHQGQLLRELQANVSAQEPGFAEVLPNLTVQEMDWLVLGELQMALEWAGRPGLRISGHIAARKSCDVLQSVLCGADALIPVQTGAAGSASLTLLGNGSLIYQAVGICPGLGARGAHMLLQNELFLNVGTKDFPDGELRGHVAALPYCGHSARHDTLPVPLAGALVLPPVKSQAAGHAWLSLDTHCHLHYEVLLAGLGGSEQGTVTAHLLGPPGTPGPRRLLKGFYGSEAQGVVKDLEPELLRHLAKGMASLMITTKGSPRGELRGQVHIANQCEVGGLRLEAAGAEGVRALGAPDTASAAPPVVPGLPALAPAKPGGPGRPRDPNTCFFEGQQRPHGARWAPNYDPLCSLCTCQRRTVICDPVVCPPPSCPHPVQAPDQCCPVCPEKQDVRDLPGLPRSRDPGEGCYFDGDRSWRAAGTRWHPVVPPFGLIKCAVCTCKGGTGEVHCEKVQCPRLACAQPVRVNPTDCCKQCPVGSGAHPQLGDPMQADGPRGCRFAGQWFPESQSWHPSVPPFGEMSCITCRCGAGVPHCERDDCSLPLSCGSGKESRCCSRCTAHRRPAPETRTDPELEKEAEGS

SEQ ID NO: 140506 - DNA, 2868 bp, Artificial Sequence
  derived and/or modified sequence
atgcctagcctgccagccccgcctgccccactgctcctgcttggattgctgctccttggctcacgcccagccagaggagctggacccgagccccctgtgctccccattagatccgagaaagaacctttgcccgtacggggggctgccggctgcacgtttggcggtaaggtctacgcccttgatgagacctggcacccagatctgggcgagccattcggagtgatgcgctgcgttctgtgcgcgtgcgaagctccacagtggggcaggaggactagggggcccggaagagtaagctgtaagaacattaaaccagagtgtcccactcctgcctgcgggcagccacggcagctgcccgggcactgctgccagacatgtccacaggaaagatcctcctctgaacggcagccgtccggcctgtcttttgagtatcctcgggaccctgaacatcgaagctattcagaccgtggagagccgggggctgaagaaagggctaggggcgacggccatacggacttcgtggcactcctaaccgggccacggagccaggcagtggcacgggcccgggtttcactgcttcggtcttctctgaggttctccatctcttaccgccgcctagaccggcccaccaggatccggttcagcgatagcaacggaagcgtgctatttgagcaccctgccgccccaactcaagatggtttggtctgtggcgtttggagagcagtcccaagattgagcctgcggcttctgcgagccgagcaactgcatgtagccctcgtcacactgacccatccgtccggtgaagtatggggaccactgatcagacaccgggctctggcagccgaaaccttctctgcaatcctcaccctcgaggggcccccccagcagggcgttggcggaatcaccctgctgacactttcagataccgaagattctctgcacttcctcctgctgttccgcgggctgctggaaccacgctcaggcggcttgacccaggtaccgctgaggttacagatcctccaccagggccagcttctgcgggaactgcaggcaaacgtgtcagcacaagagccaggcttcgcagaagtcctacctaacctgacagtgcaggaaatggattggctcgttctgggggaacttcaaatggccctggaatgggccggccgtccgggccttagaatctctggccacattgctgcacgaaaatcatgcgacgtactgcagtcagtgctgtgtggcgcggatgccctgattcccgtgcagaccggtgccgctgggagtgcctcactgacactgctggggaacggaagtctcatctaccaggttcaggtcgtcggaacaagctctgaagttgtagccatgacactggaaacgaaacctcaacggcgggatcaacgcactgtgttgtgtcacatggcaggcctgcagccagggggccacactgccgtgggcatatgccctggtctcggcgctcgcggagcacacatgctgttgcagaacgagctcttcctgaacgtgggcaccaaagattttccagacggagagttgaggggccatgtcgcagccctgccatattgcgggcacagcgctaggcacgacacactgcctgtcccactcgctggagccttggtcctcccccctgtgaagagccaggccgcagggcatgcatggctgagcctggacacgcactgtcacctccattatgaagtgctgctggccgggctgggtggaagtgaacaggggacggtaaccgctcacctactagggccacccggtaccccaggccctcggcggttgttgaagggattctacggcagtgaagcccagggggtggtgaaggatctggagcccgagctgctcaggcacctcgctaaggggatggcaagcctgatgatcacaaccaagggttcccctagaggtgaattgaggggtcaggtccacatcgccaatcagtgtgaagtggggggactgcgtctcgaggccgccggcgcagaaggggtgagggcattgggagctcctgatactgcctctgcagccccccccgttgtacctggactgccagccttagcacctgcaaaacccggtggcccaggccggccacgcgaccctaacacctgtttttttgagggccagcaacggccccatggcgcaaggtgggccccaaactacgaccccctctgctccctctgcacttgccagcgcagaactgtgatctgcgatcctgttgtttgtccacccccttcctgtccccaccctgtccaagctcctgatcagtgctgccccgtgtgcccagaaaagcaagacgtgcgagacctgcctgggctccctaggagcagagaccctggagagggatgctactttgatggcgaccgctcttggcgagcggcaggcacacgatggcatccagtggtcccaccttttggtttgattaaatgtgccgtttgcacatgcaaaggcgggacgggcgaggtgcattgtgaaaaagtccagtgtccgaggctggcctgcgctcagcccgtgagagtcaacccaacagactgttgtaaacagtgtcccgtgggatcaggtgcacacccccagcttggggatcctatgcaggccgacggacccagagggtgccgatttgcaggccagtggtttcctgagagccagagctggcatcccagcgtcccaccatttggcgagatgagctgcattacctgtaggtgtggcgccggggtcccacattgtgagagggacgattgctccctcccgctctcctgtggcagcggcaaggaatctcgctgctgctcccgatgcacagcgcaccgtcgacctgcccccgagactaggactgaccctgaactggagaaggaagccgaggggagctag

SEQ ID NO: 140507 - DNA, 2748 bp, Artificial Sequence
  derived and/or modified sequence
atgccttcccttcctgccccaccagctcccctgctcctactggggctgctactgctgggatctcgaccagcacgtggggccggccctgagccccccgttctgcctatcaggagtgagaaagagcccctgccagtgcggggtgccgctggctgtacattcggtgggaaagtgtatgcgttggatgaaacatggcacccggatctcggtgaaccttttggcgttatgcgctgcgtcctgtgtgcctgcgaagccccacagtggggtcgaagaacacggggaccagggagagtcagctgcaagaatatcaagcccgaatgtcctacccccgcctgcggacaacctagacagttacccggccattgttgccaaacgtgcccacaagagcggtcatccagcgagcgacaaccaagtgggctgtctttcgagtacccgagggaccccgagcataggagctattccgatcgcggagaacccggggcagaggaacgtgctcgcggcgacggccatacagactttgtagcattgctgacaggaccgcgatctcaggctgtcgctagggcgagggtgagcctgcttcggagtagcttgagattttctatcagctaccgacgccttgataggcccactcggataagattttctgattccaatggtagtgtgcttttcgaacatcctgccgctccgactcaagacggactggtgtgcggagtgtggcgggcagtgccgcgactctccctgcggctgttgagggccgagcagctgcatgttgccctagtgaccctgacccacccaagcggtgaagtttggggaccgcttattcggcaccgggccctcgccgctgaaaccttcagcgccatcctgactttggaagggcctccacagcaaggcgtcggagggattactctcctcacactcagtgacacggaagactccctgcacttcttgctgctgttcaggggcctcctcgagccccgatccggaggcctgacccaagtgcctcttcggctgcagatcttgcaccaggggcagttactccgtgagttgcaggctaatgtgtctgcccaagagcctggattcgcggaagtcttacctaacttgacagtgcaagagatggattggctggtgctaggcgaactgcagatggccctagaatgggccggaagacccgggctccggatcagtggccacattgccgccaggaagagctgtgacgtcctccaatccgtattgtgcggggccgatgcccttattcctgtgcagacgggggctgctggtagtgcctctctaacacttttaggcaatggctctctcatctatcaggctgtagggatttgccctggcctcggtgcccgtggtgctcacatgctcctccagaacgaactgttcttgaatgttggcactaaagacttcccagacggagagctaagaggacacgtcgctgcactgccctactgtggtcactcagccagacacgatactctcccagtccctctcgcaggagcactggtgctgcctcctgttaaaagtcaggccgcgggtcacgcttggctaagtctcgatacacattgtcacctgcactacgaggtgctactggctggactggggggctcggaacaaggaaccgtaactgctcacctgctaggcccccctgggaccccagggcctagacgcctacttaagggcttctatggctcagaagcccagggcgtggtaaaggatctggagcccgagctgctccgccatcttgccaagggcatggcaagcctgatgatcaccaccaagggctccccaagaggggagctgcggggtcaggtccacatcgccaaccaatgcgaagtgggcggtctgcgactggaggcagccggggccgagggcgtcagggctctaggcgctccagacaccgccagcgccgcacctccggtagttccaggacttcccgcactggctcctgccaagccaggtggacctggacgacccagggatcctaatacatgcttttttgagggccaacagcggccacatggagccagatgggctcccaattatgaccctctgtgctccctgtgtacgtgccagcgtaggactgtgatatgtgacccagtcgtgtgtcccccacctagctgccctcatccggtccaggctcctgaccagtgttgcccggtgtgtccagagaaacaagacgttagagacctccccggcctgcctaggagcagggacccgggggagggttgctacttcgatggagaccgcagctggcgcgccgctgggacccgatggcaccccgtggtaccaccatttggactgatcaagtgtgctgtttgtacctgcaaagggggtacaggcgaagtccactgcgagaaagtacagtgtcctaggttggcatgcgcccaaccagtccgcgtgaatccaaccgactgttgtaagcaatgccctgtgggatctggagcccatccgcagcttggagatcccatgcaagcggatgggccccggggatgccgatttgccggccagtggtttcccgagagccagtcttggcacccctcggtccctcccttcggcgaaatgtcctgcataacctgcagatgtggcgccggggtcccacattgcgagcgtgacgattgtagtctgccgctgtcttgcggctcagggaaagaatcccgctgctgcagtcggtgtaccgcacatcgtcggccagcccccgaaactcgcacagaccctgagctcgagaaggaggcagaggggtcgtag

SEQ ID NO: 140508 - DNA, 2868 bp, Artificial Sequence
  derived and/or modified sequence
atgcccagcctgcctgcccccccagcccccctgctgctgctgggcctgctgctgctgggcagcaggcctgcccggggagctggccctgagccccctgtgctgcccatccgctctgagaaggagcccctgcctgtgagaggagctgctggctgcacctttggaggcaaggtgtatgccctggatgagacctggcacccagacctgggggagcccttcggcgtgatgagatgtgtgctgtgtgcctgtgaggccccccagtggggccgccgcacccggggccctggccgggtgtcctgcaagaacatcaagccagaatgtcccaccccagcctgtggccagccccggcagctgcccggccactgctgccagacctgcccccaggagaggagcagcagcgagcggcagcccagcggcctgagctttgagtacccccgggaccctgagcacaggagctacagcgacagaggagagcccggggctgaggagcgggcccggggagatggccacacagactttgtggccctgctgaccggccccaggagccaggccgtggcccgggcccgggtgtccctgctgcggagcagcctgcgcttcagcatctcctacagaaggctggaccggcccacccgcatccgcttcagtgacagcaatggatctgtgctgtttgagcaccctgctgcccccacccaggacggcctggtgtgtggggtgtggagggctgtgccccggctgagcctgcggctgctgcgggcagagcagctgcacgtggccctggtgaccctgacccaccccagcggggaggtgtggggccccctcatccgccaccgggccctggccgctgagaccttcagcgccatcctgaccctggagggccccccccagcagggcgtgggcggcatcaccctgctgaccctgagtgacacagaggacagcctgcacttcctgctgctcttccggggcctgctggagcccaggtctgggggcctgacccaggtgcccctgcggctgcagatcctgcaccagggccagctgctgcgggagctgcaggccaacgtgtctgcccaggagcccggctttgctgaggtgctgcccaacctgactgtgcaggagatggactggctggtgctgggggagctgcagatggccctggagtgggccggccggcccggcctgcgcatcagcggccacatcgccgccaggaagagctgtgatgtgctgcagagcgtgctgtgtggggctgatgccctgatccctgtgcagacaggagctgctggcagcgccagcctgaccctgctgggcaatggcagcctcatctaccaggtgcaggtggtgggcaccagcagcgaggtggtggccatgaccctggagaccaagccccagaggcgggaccagaggacagtgctgtgccacatggccggcctgcagcccggcggccacacagctgtgggcatctgccccggcctgggcgcccggggggcccacatgctgctgcagaatgaactcttcctgaatgtgggcaccaaggacttcccagatggagagctgcggggccacgtggccgccctgccctactgcggccacagcgcccggcatgacaccctgcctgtgcccctggccggggccctggtgctgccccctgtgaagagccaggccgccggccacgcctggctgagcctggacacccactgccacctgcactatgaggtgctgctggccggcctgggcggcagcgagcagggcaccgtgacagcccacctgctgggccccccaggcaccccaggcccccggcggctgctgaagggcttctacggcagcgaggcccagggcgtggtgaaggacctggagcctgagctgctgcggcacctggccaagggcatggccagcctgatgatcaccaccaagggcagccccagaggagagctgcggggccaggtgcacatcgccaaccagtgtgaggtgggcggcctgcggctggaggccgccggggctgagggcgtgcgggccctgggcgccccagacacagccagcgctgcccctcctgtggtgcccggcctgcctgccctggccccagccaagccaggcggccctggccggccccgggaccccaacacctgcttctttgagggccagcagaggccccacggggcccgctgggcccccaactatgaccccctgtgcagcctgtgcacctgccagaggagaactgtcatctgtgaccctgtggtgtgccccccacccagctgcccccaccctgtgcaggccccagaccagtgctgccctgtgtgcccagagaagcaggatgtgcgggacctgcccggcctgcccaggagccgggaccccggggagggctgctactttgatggagaccgctcctggagggctgctggcacccgctggcaccctgtggtgccccccttcggcctcatcaagtgtgctgtgtgcacctgcaagggcggcaccggggaggtgcactgtgagaaggtgcagtgcccccggctggcctgtgcccagcctgtgcgggtgaaccccacagactgctgcaagcagtgccctgtgggcagcggggcccacccccagctgggggaccccatgcaggctgatggcccccggggctgccgctttgctggccagtggttccctgagagccagagctggcaccccagcgtgcccccatttggagagatgagctgcatcacctgccgctgtggggccggcgtgccccactgtgaaagagatgactgcagcctgcccctgagctgtggcagcggcaaggagagccgctgctgcagccgctgcacagcccaccggcggcctgcccctgagaccaggacagatcctgagctggagaaggaggccgagggcagctag

SEQ ID NO: 140509 - DNA, 2748 bp, Artificial Sequence
  derived and/or modified sequence
atgcccagcctgcctgcccccccagcccccctgctgctgctgggcctgctgctgctgggcagcaggcctgcccggggagctggccctgagccccctgtgctgcccatccgctctgagaaggagcccctgcctgtgagaggagctgctggctgcacctttggaggcaaggtgtatgccctggatgagacctggcacccagacctgggggagcccttcggcgtgatgagatgtgtgctgtgtgcctgtgaggccccccagtggggccgccgcacccggggccctggccgggtgtcctgcaagaacatcaagccagaatgtcccaccccagcctgtggccagccccggcagctgcccggccactgctgccagacctgcccccaggagaggagcagcagcgagcggcagcccagcggcctgagctttgagtacccccgggaccctgagcacaggagctacagcgacagaggagagcccggggctgaggagcgggcccggggagatggccacacagactttgtggccctgctgaccggccccaggagccaggccgtggcccgggcccgggtgtccctgctgcggagcagcctgcgcttcagcatctcctacagaaggctggaccggcccacccgcatccgcttcagtgacagcaatggatctgtgctgtttgagcaccctgctgcccccacccaggacggcctggtgtgtggggtgtggagggctgtgccccggctgagcctgcggctgctgcgggcagagcagctgcacgtggccctggtgaccctgacccaccccagcggggaggtgtggggccccctcatccgccaccgggccctggccgctgagaccttcagcgccatcctgaccctggagggccccccccagcagggcgtgggcggcatcaccctgctgaccctgagtgacacagaggacagcctgcacttcctgctgctcttccggggcctgctggagcccaggtctgggggcctgacccaggtgcccctgcggctgcagatcctgcaccagggccagctgctgcgggagctgcaggccaacgtgtctgcccaggagcccggctttgctgaggtgctgcccaacctgactgtgcaggagatggactggctggtgctgggggagctgcagatggccctggagtgggccggccggcccggcctgcgcatcagcggccacatcgccgccaggaagagctgtgatgtgctgcagagcgtgctgtgtggggctgatgccctgatccctgtgcagacaggagctgctggcagcgccagcctgaccctgctgggcaatggcagcctcatctaccaggccgtgggcatctgccccggcctgggcgcccggggggcccacatgctgctgcagaatgaactcttcctgaatgtgggcaccaaggacttcccagatggagagctgcggggccacgtggccgccctgccctactgcggccacagcgcccggcatgacaccctgcctgtgcccctggccggggccctggtgctgccccctgtgaagagccaggccgccggccacgcctggctgagcctggacacccactgccacctgcactatgaggtgctgctggccggcctgggcggcagcgagcagggcaccgtgacagcccacctgctgggccccccaggcaccccaggcccccggcggctgctgaagggcttctacggcagcgaggcccagggcgtggtgaaggacctggagcctgagctgctgcggcacctggccaagggcatggccagcctgatgatcaccaccaagggcagccccagaggagagctgcggggccaggtgcacatcgccaaccagtgtgaggtgggcggcctgcggctggaggccgccggggctgagggcgtgcgggccctgggcgccccagacacagccagcgctgcccctcctgtggtgcccggcctgcctgccctggccccagccaagccaggcggccctggccggccccgggaccccaacacctgcttctttgagggccagcagaggccccacggggcccgctgggcccccaactatgaccccctgtgcagcctgtgcacctgccagaggagaactgtcatctgtgaccctgtggtgtgccccccacccagctgcccccaccctgtgcaggccccagaccagtgctgccctgtgtgcccagagaagcaggatgtgcgggacctgcccggcctgcccaggagccgggaccccggggagggctgctactttgatggagaccgctcctggagggctgctggcacccgctggcaccctgtggtgccccccttcggcctcatcaagtgtgctgtgtgcacctgcaagggcggcaccggggaggtgcactgtgagaaggtgcagtgcccccggctggcctgtgcccagcctgtgcgggtgaaccccacagactgctgcaagcagtgccctgtgggcagcggggcccacccccagctgggggaccccatgcaggctgatggcccccggggctgccgctttgctggccagtggttccctgagagccagagctggcaccccagcgtgcccccatttggagagatgagctgcatcacctgccgctgtggggccggcgtgccccactgtgaaagagatgactgcagcctgcccctgagctgtggcagcggcaaggagagccgctgctgcagccgctgcacagcccaccggcggcctgcccctgagaccaggacagatcctgagctggagaaggaggccgagggcagctag
